United States Patent Application Publication US 2008/0229439 A1 - sequence listing, part 10

SEQ ID NO: 20169 - protein, 1756 aa, Oryza sativa
  Clone ID: TF_OSC900135j.C1.p1.fg
MSDLGGKNGENGNEDGASSKGTPSPKGATIPFDYSKLTIPPHNFVSVPSGRAPQFDGTHYAAWKHKMKLHLISLHPSIWKVVCTSVDVPHDDMELTSEQEQLIHRNAQASNAILSALSPEEFNKVDGLEEAKEIWDTLQLAHEGSPAVREAKIELLEGRLGRFVMDDKETPQEMYDRMMILVNKIKGLGSEDMTNHFVVKRLLCAFGPRNPTLVSMIRERKDFKRLTPSDILGRIVSHEMQEEEAREVRQMVKNAAMIKNQEVALKAKQEEESSCEESEDEEMAFIVKRFKHFLRKSGYGKGRKDDDKGKRQSKRACFNCGEYGHFIANCPKSNEAKAKGGKKKPERAHVAEAHMAEVWYSGDEEDPEVKPKPEPKDKVEGEGGVATVAFKSSSSSKERLFNNLSDDDDDSYHYSCFMAQGRKVMTQKPSHTSLDVDSSDEESDNELDDVLKSFSKPAMQHLAKLMRALDSKEQSLERQEELLILEKKRNLTLEESLAKECAKNEQLANELNLANGSLASLTDVNETLQDKFANLDKSHKYLEVQFDILWNSTYKPNVVSNSSNPSTSNGCARCYNVDLNSYATNVDAMQALKKENERLGTLVKYGCMKTYHSKDALYKTITAHPNKDGHGLGLSGGSPVSKRVMVNGKECLMFVREGKAPQASEVTCPFTSQTPESSRKNDRKFLPCKTGSSRHFVRKFRASDKPKGLTGSSGYNARKFQPEGLYYDSYVISKNSEGKVVAYFNGNYNDEYRTCVWVPKALAYSSGGSRWVVDSGCTNHMTGERSMFTSLDEEGGSRANIVFGDDGKGKVMGLGEYILGLSNVSFEKDRVCSACQAGKQVGSPHPIKNIMTTTRPLELLHMDLFGPVAYVSIGGNKYGFVIVDDFSRFTWVYFLHDKSKAQDVFKRFVKKAQNLYVLTIKRVRTDNGGEFKNTQVEEFLDEEGIKHEFSAPYDPPQNGIVERKNRTLIEAARAMLDEYKISDVFWVEAVSTACHAINRLYLHKILKKTSYELLSGKKPNVSYFHVFGSKCFILSKRPRSSKFSPKVDEGFLLGYESNAHAYRVFNKTSGIVEVTRDVTFDESNGSQGEQVVVHVVGDVDPSQAIGTKAIGDIRPVETQDDQEDRDQPPSLTSNSLTSAVSAEPEVLGPIDQNLRTSPGPEVPGSTIRNLRTSGSEDVPTAQVDGINAAGTLEHTDQAQVPPMHHPRIHDSVQRDHPVDNILGDIRKEVTTRSRVASFCQHFSFVSSLEPTRVEDALGDPDWVMAIQEELNNFTRNQVWTLVERPKQNVIGTNWIFRNKQDKHGVVVRNKARLVSQGFTQVEGLDFGETFALVARLESIRILLAYAAHHDFRLFQMDVKSAFLNGPILELVYVEQPLGFEDPKLPNHVYKLHKALYGLKQAPRVWYECLRDFLLKNGFEIGKADTTLFTKKFKSDLFICQIYVDDIIFGSTNASFCEEFSSIMTKRFEMSMMGELTFFLGLQVKQAQEGTFISQTKYVKDILKKFGMEDAKPIKTPMPTNGHLDLDDNGKCVDQKVYRSMVGSLLYLCASRPDIMLSVCMCARFQAEPKECHLIAVKRILKYLVQTPNLGLWYPKGCELLGYSDSDYAGCKVDRKSTAGTCQFLGRSLVSWSSKKQNSIALSTAEAKYVAAGSCCAQLLWMKQTLKDFGYNFTKIPLLCDNESAIKIANNPIQHSRTKHIDIRHHFLRDHETKGDTCLTHVRTKTQLANIFTKPLDEKRFCELWSELNILDSRNIR

SEQ ID NO: 20170 - protein, 1320 aa, Oryza sativa
  Clone ID: TF_OSC400798j.C1.p18.fg
MAGFADALRPDKFTGVHFKRWQIRVTLWLTAMKCFWVSTGKPEGVLTAEQQKQFEEATTLFVGCILSVLGDRLVEVYMHMTDAKELWDALNTKFGATDASNDLYIMEQFHDYKMADNRSVVEQAHEIQTMAKELELLKCVLPDKFVAGCIIAKLPPSWRSFGTALKHKRQEYSVEGLIASLDVEEKAREKDAASKGDGGQSSANVVHKAQNKSKGKYKAQQTTNFKKQKKNNNNPNQDERTCFVCGQIGHLARKCPQRKGMKAPAGQTSKSANVTIGNTGDGSGYGNLPTVFSVNQSTNWWVDTGANVHVCADISLFSSYQVARGSTVLMGNGSHASVHGVGTVDLKFTSGKIVQLKNVQHVPSIDRNLVSGSRLTRDGFKLVFESNKVVVSKHGYFIGKGYECGGLFRFSLSDFCNKSVNHICGSVDDEANVWHSRLCHINFGLMSRLSSMCLIPKFSIVKGSKCHSCVQSKQPRKPHKAAEERNLAPLELLHSDLCEMNGVLTKGGKRYFMTFIDDATRFCYVYLLKTKDEALDYFKIYKAEVENQLDRKIKRLRSDRGGEFFSNEFDLFCEEHGIIHERTPPYSPESNGIAERKNRTLTDLVNAMLDTAGLPKAWWGEALLTSNHVLNRVPNRNKDKTPYEIWIGRKPSLSYLRIWGCLAKVNVPITKKRKLGPKTVDCVFLGYAHHSIAYRFLIVKSEVLDMHVGTIIESRDATFFESFFPMKDTHSGSNQPSEIIPSSITPPEQTEHTHELVSEEDVSEAPRRSKRQRTAKSFGDDFTVYLVDDTPKSISEAYASPDADYWKEAVRSEMDSIIANGTWEVTERPYGCKPVGCKWVFKKKLRPDGTIEKYKARLVAKGYTQKEGEDFFDTYSPVARLTTIRVLLSLAASHGLLVHQMDVKTAFLNGELDEEIYMDQPDGFVVEGQEGKVCKLLKSLYGLKQAPKQWHEKFDKTLISAGFAVNEADKCVYYRHGGGEGVILCLYVDDILIFGTNLEVINEVKSFLSKNFDMKDLGVADVILNIKLIRGENEITLLQSHYVEKILNRFGYIDSKPSPTPYDPSLLLRKNKRIARNQLEYSQIIGSLMYLASATRPDISFAVSKLSRFTSNPGDDHWRALERVMRYLKGTVELGLHYTGYPAVLEGYSDSNWISDVDEIKATSGYVFTLGGGAVSWRSCKQTILTRSTMEAELTALDTATVEAEWLRDLLMDLPVVEKPVPAILMNCDNQTTCEKTIEVCQEIKKLRSYNVGLHPNSEKPGRSLHEGTITKCDRQCIEGDGFETHSILERTHLCELDCWSQSMKILGESSRKLTKDLGV

SEQ ID NO: 20171 - protein, 295 aa, Oryza sativa
  Clone ID: TF_OSC27732j.C1.p1.np
RVFPCLYNSKRLRSVKVLSLVSNLSLPFVFPLSLSKPLQMADNEKGNKVRSQDIGTSSSRVNEAPDTSCAAVVQHLINQNKLLIEILQQHRMPILNPSQMQPQVQLEAVQAFTPQVSAPPTSQKAPHAIPHVDPKEASIICFMCDEQGHYARNCPQQKRKAPMRTEDEVRKMIITSTEWPTPGMTRRQRRNTFRGAPQLTEHLLANGGRVSDSEDSDQVSSDDEGAKSPQGFNQNKIELKACSRCGEIGHVASSCASACVHGEEGHPPDRCPTSRITCFFCEGTDHVPKDCQFSF

SEQ ID NO: 20172 - protein, 444 aa, Oryza sativa
  Clone ID: TF_OSC474j.C1.p1.fg
VHGDKAPVDGKGEAATLAKRADVSGGQECGVVRVEDVQRVETPAAEITNAMKDTKIVKNKDQERGGSEREEEETVAMAGTGSREEALLNPRNQALRPQSQGRPGFEAERGGGGPPKIKCFKCGREGHHQATCPNPPLCYSCHNTGHISAHCPMNLMKRGVKLCGFGIPGHGFYSLQVEISDAEVARAPVRGILTVILGEGSVVKIVTELKHLFVGLNWEWKVKQLNDKEFLINFPFDEVRSKISTCKCFDFETSLIKASVVETGMTEEAVDELVAVWVKIFGIPKIAKTVNWLLHSIAAIVELVGEFETMDGASLRRDGPVRVRVACKDPRELHFSVHVYINKVGYMTKWEPEGYPPYENRQMPPDDDGGDDKDDKNDEELQEDMNLDDEFKNQNSPRGRQLRDADSNQGNRFGAYSAPLHTKGNHMGHRGVVSRSWYLRKVPY

SEQ ID NO: 20173 - protein, 622 aa, Oryza sativa
  Clone ID: TF_OSC411214j.C1.p1.fg
MSWQRVGALLLGAQSCLPVPEVPAVGGIGSVLLFMARMGWELCHVFRPYTVVNKPNIHHNSKRLRSVKVLSLVSNLSLPFAFPLSLSKPLQQMADNEKDNKVRSQDIGTSSPRVNEAPDTSCVTLVQHLINQNRLLIEILQQHQTPILNLSQIQPQVQLEAVQALTPQVSMPPASRRTHGDVPHVDSKEASIICFRCDEQGHYARECPQQKRKTPMRTEDEVRKMIITSTEWPPLGMTKRQRRNTFRGAPQLTEHLLANGGRVSDSEDSDQVSSDDEDEMERKACSRCGEIGHVASSCATTCVHCEEDHPPDRCPTSRITCFFCEGTDHVPKDCQFSFLLTKKMANQPASSNGEKHQGNTNPRQDYSFSLTPVPGQRNQNEKRKCRVREDICCFNCQGMGHFADKCPKPRNIAAGTSVHATPCNQKLAPQRIVIHVSRSSPIARVATAPTPASALPQGVNAQFQPQPSVDKTEASIGIVPLDAPAQQPRNQVQDEEPEREKVIVCYNALTLLCTDGLSKELSSMEEVVSLPDLLQAKRRAINLRRAIPSRRPLFASNSTQKEASPVNNSNMQSYHIITEPIKDDAVTRTMPAISLQNQNEQPRLWFSVRYLSLCSRKFAAIM

SEQ ID NO: 20174 - protein, 860 aa, Oryza sativa
  Clone ID: TF_OSC400055j.C1.p6.gm
MADNEKGNKVRSQDIGTSSSRVNEAPDTSCVTLVQHLINQNRLLIEILQQHQTPILNLSQIQPQVQLEAVQALTPQVSMPPASRRTHGDVPHVDSKEASIICFMCDEQGHYARECPQQKRKTPMRTEDEVRKMIITSTEWPPPGMTKRQRRNTFRGAPQLTEHLLANGGRVSDSEDSDQVSSDDEDEKSPQGFNQNKMEHKACSRCGEIGTDHVPKDCQFSFLLTKKMANQPASSNGEKHQGNTNPRQDYSFSLTPVPGQRNQNEKRKCRVREDICCFNCQGMGHFADKCPKPRNIAASTSVHATPCNQKLAPQRIVIHASRSSPIARVAIAQTPASALPQGVNAQFQPQPPVDKIEANIGIVPLDVPAQQPRNQNWNHPAGATNVQVPTVQQQCKLSEFLKTEPPTFAIAVDPMEASDWLRIVEKKLGLIQCTDQERVVFATHQLVALASEWWDSYEASRPEGHTITWDEFSSVFKRSHVPAGMITLRKREFRYLKQEDLTVTEYLHEFHRLAHYAPEDVENDEDQQEKFLQGLKDEIAVQLLLEEYEDFEKLVDKAIQLESEHNRMKNCKRRIVSIPVFPCGNQRQRTEPLQITGSSIAHQEFPPQEDGPNADNNISNTNDDDDTTNNHASCPISDHSNRACNVNIIHQDVDDSINDGTQNDNPSSCDSEKDSDGDSNYGTTDANVSKDFQPPIPTPSQNDRPQTDSSAKKTLICYNCKELGHYSRDCLQPRQSRPPHYRQFTRSRHPNRIVVTGANAVPVRPRATTVSLAFDEPLEGSLKGSRLKYHIVTRSIHNSWSEEYLVDKVQKVIDRRYQQSDHRGAGAPPPIGCAGVAAFGRALRLPCGARPSAARALGCG

SEQ ID NO: 20175 - protein, 1601 aa, Oryza sativa
  Clone ID: TF_OSC100891j.C1.p11.fg
MSDARSRRSVASSTRRQQDAELAAAEERRRATAQTAAAAARAARLAAAELAAARAEAEAEAAEDAARAAEVEVETLRSSINGSIAGDITADRELEELARGRARERAERWAAAHLHGGGGGPRDRAPADGNPDGRGRAGGSPEPARGPRRRHGSLSPDRRHGHHGVQTVVRDFGPGGGWPTLTKTNYIEWAAVMRVRLQVRHMWEAVRYGDVDYDEDRRALDALIAAVPPEMQFSLSQKRTAKEAWDAIAAARIGSDRARKSTLQALRKEWENLAFKPGEDVDDFALRLNTLLQKMVQYGDDTYDEERAVEKLFRCVPEKYRQIARSIESLLDLSTMSIEEALGRLKVVDGDEPRPLSGPITIGGKLHLTREQWEASQGDRRKGESSSPTGGHKPRKARGGVQLRWARRRAEGGARRGAQGVATGNHKPARDDTCRNCGKLGHWAKDCRQPRRGQAHVARVEEEEPALLLAHASIELPPAAPAAAAFLHLDEPKVLVSLCDGSSNDKADGWYLDTGATHHMTGRREFFTEFDSSVRGTVKFGDASGVEIKGVGSVTFTAKSGEHRLLTGVYYIPALRNSIISVGQLDENGSRVLVEDGLMRIWDRRRRLLAKVTRGTNRLYILSAQVAHPVCLAARRDDEAWQWHERFGHLHFEALKQLSAKEMVRGMPCLDHVEQLCDVCVVTKQRRLPFPQQTSFRAKERLGLVHGDLCGPVTPATPGGRRYFLLLVDDLSRYMWVMVLGSKGEAADAIRHAQAAAEAECGRKLRVLRTDNGGEFTAAEFASYCADEGIQRHYTAPYSPQQNGVVERRNQTVVGMARALLKQRGMPAIFWGEAVVTAAYILNRSPTKALDGRTPYEAWHGRKPAVSHLRVFGCLAFAKELGHIGKLDDRSTPGVFIGYAEGSKAYRILDPETQRVRITRDVVFDEGRGWVWDKAVDDGSTPTYDDFTIEYVHFEGAGGVGSSSSPSVSTPVPEPPPTPTPTHPRATTSTTTSSSSTPPQPVSPHAPAPTATPPGTSTPTPARVERSPVEFVTPLSHDGERIDAYHDGEQLRYRTMEDLLGDQPVPGLVPRNLEAQLHLACDDGEPRSFAEAEKHAAWRAAMQSEMDAVQENRTWELADLPRGHRAITLKWVFKLKRDEAGAIVKHKARLVARGFVQQEGIDYDDAFAPVARMESVRLLLALAAQEGWGVHHMDVKSAFLNGDLKEEVYVHQPPGFVIPGKEGKVLRLHKALYGLRQAPRAWNAKLDSTLKGMGFEQSPHEAAIYRRGNGGNALLVGVYVDDLVITGTKDAEVAAFKEEMKATFQMSDLGPLSFYLGIEVHQDNSGITLRQTAYAKRVVELAGLTDCNPALTPMEERLKLSRDSTAEEVDATQYRRLVGSLRYLTHTRPDLAFSVGYVSRFMQRPTTEHQQAVKRIIRYVAGTLDHGLYYPRCPGKAHFVGYSDSDHAGDIDTSKSTSGILFFLDECLVSWQSIKQQVVALSSCEAEYMAASAASTQALWLARLLSDLLGRDTGAVELRVDSKSALALAKNPVFHERSKHIRVRYHFIRSYLEEGSIKASYINTKDQLADLLTKPLGRIKFLELCSRIGMAQLSHKTAHKT

SEQ ID NO: 20176 - protein, 1357 aa, Oryza sativa
  Clone ID: TF_OSC100891j.C1.p14.gm
MRVRLQVRHMWEAVRYGDVDYDEDRRALDALIAAVPPEMQFSLSQKRTAKEAWDAIAAARIGSDRARKSTLQALRKEWENLAFKPGEDVDDFALRLNTLLQKMVQYGDDTYDEERAVEKLFRCVPEKYRQIARSIESLLDLSTMSIEEALGRLKVVDGDEPRPLSGPITIGGKLHLTREQWEASQGDRRKGESSSPTGGHKPRKARGGVQLRWARRRAEGGARRGAQGVATGNHKPARDDTCRNCGKLGHWAKDCRQPRRGQAHVARVEEEEPALLLAHASIELPPAAPAAAAFLHLDEPKVLVSLCDGSSNDKADGWYLDTGATHHMTGRREFFTEFDSSVRGTVKFGDASGVEIKGVGSVTFTAKSGEHRLLTGVYYIPALRNSIISVGQLDENGSRVLVEDGLMRIWDRRRRLLAKVTRGTNRLYILSAQVAHPVCLAARRDDEAWQWHERFGHLHFEALKQLSAKEMVRGMPCLDHVEQLCDVCVVTKQRRLPFPQQTSFRAKERLGLVHGDLCGPVTPATPGGRRYFLLLVDDLSRYMWVMVLGSKGEAADAIRHAQAAAEAECGRKLRVLRTDNGGEFTAAEFASYCADEGIQRHYTAPYSPQQNGVVERRNQTVVGMARALLKQRGMPAIFWGEAVVTAAYILNRSPTKALDGRTPYEAWHGRKPAVSHLRVFGCLAFAKELGHIGKLDDRSTPGVFIGYAEGSKAYRILDPETQRVRITRDVVFDEGRGQLFFTERVYPSPRASTDSNTNTPSGHDFDYDELFVDTTPAARVERSPVEFVTPLSHDGERIDAYHDGEQLRYRTMEDLLGDQPVPGLVPRNLEAQLHLACDDGEPRSFAEAEKHAAWRAAMQSEMDAVQENRTWELADLPRGHRAITLKWVFKLKRDEAGAIVKHKARLVARGFVQQEGIDYDDAFAPVARMESVRLLLALAAQEGWGVHHMDVKSAFLNGDLKEEVYVHQPPGFVIPGKEGKVLRLHKALYGLRQAPRAWNAKLDSTLKGMGFEQSPHEAAIYRRGNGGNALLVGVYVDDLVITGTKDAEVAAFKEEMKATFQMSDLGPLSFYLGIEVHQDNSGITLRQTAYAKRVVELAGLTDCNPALTPMEERLKLSRDSTAEEVDATQYRRLVGSLRYLTHTRPDLAFSVGYVSRFMQRPTTEHQQAVKRIIRYVAGTLDHGLYYPRCPGKAHFVGYSDSDHAGDIDTSKSTSGILFFLDECLVSWQSIKQQVVALSSCEAEYMAASAASTQALWLARLLSDLLGRDTGAVELRVDSKSALALAKNPVFHERSKHIRVRYHFIRSYLEEGSIKASYINTKDQLADLLTKPLGRIKFLELCSRIGMAQLSHKTAHKT

SEQ ID NO: 20177 - protein, 225 aa, Oryza sativa
  Clone ID: TF_OSC1462j.C1.p1.fg
SPTGGRKPRKARGGVQLRWARRRAEGGARRGAQGVATGNHKPARDDTCRNCGKLGHWAKDCRQPRRGQAHVARVEEEEPALLLAHASIELPPAAPAAAAFLHLDEPKVLVSLCDGSSNDKADGWYLDTGATHHMTGRREFFTEFDSSVRGTVKFGDASGVEIKGVGSVTFTAKSGEHRLLTGVYYIPALRNSIISVGQLDENGSRVLVEDGLMTIRDRRRRLLAK

SEQ ID NO: 20178 - protein, 237 aa, Oryza sativa
  Clone ID: TF_OSC1462j.C1.p1.gp
SPTGGRKPRKARGGVQLRWARRRAEGGARRGAQGVATGNHKPARDDTCRNCGKLGHWAKDCRQPRRGQAHVARVEEEEPALLLAHASIELPPAAPAAAAFLHLDEPKVLVSLCDGSSNDKADGWYLDTGATHHMTGRREFFTEFDSSVRGTVKFGDASGVEIKGVGSVTFTAKSGEHRLLTGVYYIPALRNSIISVGQLDENGSRVLVEDGLMTIRDRRRRLLAKVTRGTNRLYILS

SEQ ID NO: 20179 - protein, 1586 aa, Oryza sativa
  Clone ID: TF_OSC19433j.C1.p2.fg
MSDARSQRSVASSTRRQQDAKLAAAEERRRATAQTAAAAAKAARLAAAELAAARAEAEAEAAEDAARAAEVEVETLRSSINGSIAGDITADRELEELARGRARERAERWAAAHLHGGGGGPRDRAPADGNPDGRGRAGGSPEPARGPRRRHGSLSPDRRHGHHGVQTVVRDFGPGGGWPTLTKTNYIEWAAVMRVRLQVRHMWEAVRYGDVDYDEDRRALDALIAAVPPEMQFSLSQKRTAKEAWDAIAAARIGSDRARKSTLQALRKEWENLAFKPGEDVDDFALRLNTLLQKMVQYGDDTYDEERAVEKLFRCVPEKYRQIARSIESLLDLSTMSIEEALGRLKVVDGDEPRPLSGPITIGGKLHLTREQWEASQGDGRKGESSSPTGGRKPRKARGGVQLRWARRRAEGGARRGAQGVATGNHKPARDDTCRNCGKLGHWAKDCRQPRRGQAHVARVEEEEPALLLAHASIELPPAAPAAAAFLHLDEPKVLVSLCDGSSNDKADGWYLDTGATHHMTGRREFFTEFDSSVRGTVKFGDASGVEIKGVGSVTFTAKSGEHRLLTGVYYIPALRNSIISVGQLDENGSRVLVEDGLMRIWDRRRRLLAKVTRGTNRLYILSAQVAHPVCLAARRDDEAWQWHERFGHLHFEALKQLSAKEMVRGMPCLDHVEQLCDVCVVTKQRRLPFPQQTSFRAKERLGLVHGDLCGPVTPATPGGRRYFLLLVDDLSRYMWVMVLGSKGEAADAIRHAQAAAEAECGRKLRVLRTDNGGEFTAAEFASYCADEGIQRHYTAPYSPQQNGVVERRNQTVVGMARALLKQRGMPAIFWGEAVVTAAYILNRSPTKALDGRTPYEAWHGRKPAVSHLRVFGCLAFAKELGHIGKLDDRSTPGVFIGYAEGSKAYRILDPETQRVRITRDVVFDEGRGWVWDKAVDDGSTPTYDDFTIEYVHFEGAGGVGSSSSPSVSTPVPEPPPTPTPTHPRATTSTTTSSSSTPPQPVSPHAPAPTATPPGTSTPTPARVERSPVEFVTPLSHDGERIDAYHDGEQLRYRTMEDLLGDQPVPGLVPRNLEAQLHLACDDGEPRSFAEAEKHAAWRAAMQSEMDAVQENRTWELADLPRGHRAITLKWVFKLKRDEAGAIVKHKARLVARGFVQQEGIDYDDAFAPVARMESVRLLALAAQEGWGVHHMDVKSAFLNGDLKEEVYVHQPPGFVIPGKEGKVLRLHKALYGLRQAPRAWNAKLDSTLKGMGFEQSPHEAAIYRRGNGGNALLVGVYVDDLVITGTKDAEVAAFKEEMKATFQMSDLGPLSFYLGIEVHQDNSGITLRQTAYAKRVVELAGLTDCNPALTPMEERLKLSRDSTAEEVDATQYRRLVGSLRYLTHTRPDLAFSVGYAVKRIIRYVAGTLDHGLYYPRCPGKAHFVGYSDSDHAGDIDTSKSTSGILFFLGECLVSWQSIKQQVVALSSCEAEYMAASAASTQALWLARLLSDLLGRDTGAVELRVDSKSALALAKNPVFHERSKHIRVRYHFIRSYLEEGSIKASYINTKDQLADLLTKPLRRIKFLELCSRIGMAQLSHKTAHKT

SEQ ID NO: 20180 - protein, 264 aa, Oryza sativa
  Clone ID: TF_OSC20233j.C1.p1.fg
MSIEEALGRLKVVDGDEPRPLSGPITIGGKLHLTREQWEASQGDGRKGESSSPTGGHKPRKARGGVQLRGAQGVATGNHKPARDDTCRNCGKLGHWAKDCRQPRRGQAHVARVEEEEPALLLAHASIELPPAAPAAAAFLHLDEPKVLVSLCDGSSNDKADGWYLDTGATHHMTGRREFFTEFDSSVRGTVKFGDASGVEIKGVGSVTFTAKSGEHRLLTGVYYIPALRNSIISVGQLDENGSRVLVEDGLMRIWDRRRRLLAK

SEQ ID NO: 20181 - protein, 323 aa, Oryza sativa
  unsure (1)..(323): unsure at all Xaa locations
  Clone ID: TF_OSC20233j.C1.p1.gp
LQKMVQYGDDTYDEERAVEKLFRCVPEKYRXIARSIESLLDLSTMSIEEALGRLKVVDGDEPRPLSGPITIGGKLHLTREQWEASXGDGRKGESSSPTGGHKPRKARGGVQLRWAXRRAEGGARRGAQGVATGNHKPARDDTCRNCGKLGHWAKDCRQPRRGQAHVARVEEEEPALLLAHASIELPPAAPAAAAFLHLDEPKVLVSLCDGSSNDKADGWYLDTGATHHMTGRREFFTEFDSSVRGTVKFGDASGVEIKGVGSVTFTAKSGEHRLLTGVYYIPALRNSIISVGQLDENGSRVLVEDGLMRIWDRRRRLLAKVTR

SEQ ID NO: 20182 - protein, 1601 aa, Oryza sativa
  Clone ID: TF_OSC28279j.C1.p1.fg
MSDARSQRSVASSTRRQQDAELAAAEERRRATAQTAAAAARAARLAAAELAAARAEAEAEAAEDAARAAEVEVETLRSSINGSIAGDITADRELEELARGRARERAERWAAAHLHGGGGGPRDRAPADGNPDGRGRAGGSPEPARGPRRRHGSLSPDRRHGHHGVQTVVRDFGPGGGWPTLTKTNYIEWAAVMRVRLQVRHMWEAVRYGDVDYDEDRRALDALIAAVPPEMQFSLSQKRTAKEAWDAIAAARIGSDRARKSTLQALRKEWENLAFKPGEDVDDFALRLNTLLQKMVQYGDDTYDEERAVEKLFRCVPEKYRQIARSIESLLDLSTMSIEEALGRLKVVDGDEPRPLSGPITIGGKLHLTREQWEASQGDGRKGESSSPTGGRKPRKARGGVQLRWARRRAEGGARRGAQGVATGNHKPARDDTCRNCGKLGHWAKDCRQPRRGQAHVARVEEEEPALLLAHASIELPPAAPAAAAFLHLDEPKVLVSLCDGSSNDKADGWYLDTGATHHMTGRREFFTEFDSSVRGTVKFGDASGVEIKGVGSVTFTAKSGEHRLLTGVYYIPALRNSIISVGQLDENGSRVLVEDGLMRIWDRRCRLLAKVTRGTNRLYILSAQVAHPVCLAARRDDEAWQWHERFGHLHFEALKQLSAKEMVRGMPCLDHVEQLCDVCVVTKQRRLPFPQQTSFRAKERLGLVHGDLCGPVTPATPGGRRYFLLLVDDLSRYMWVMVLGSKGEAADAIRHAQAAAEAECGRKLRVLRTDNGGEFTAAEFASYCADEGIQRHYTAPYSPQQNGVVERRNQTVVEMARALLKQRGMPAIFWGEAVVTAAYILNRSPTKALDGRTPYEAWHGRKPAVSHLRVFGCLAFTKELGHIGKLDDRSTPGVFIGYAEGSKAYRILDPETQRVRITRDVVFDEGRGWVWDKAVDDGSTPTYDDFTIEYVHFEGAGGVGSSSSPSVSTPVPEPPPTPTPTHPRATTSTTTSSSSTPPQPVSPHAPAPTATPPGTSTPTPARVERSPVEFVTPLSHDGERIDAYHDGEQLRYRTMEDLLGDQPVPGLVPRNLEAQLHLACDDGEPRSFAEAEKHAAWRAAMQSEMDAVQENRTWELADLPRGHRAITLKWVFKLKRDEAGAIVKHKARLVARGFVQQEGIDYDDAFAPVARMESVRLLLALAAQEGWGVHHMDVKSAFLNGDLKEEVYVHQPPGFVIPGKEGKVLRLHKALYGLRQAPRTWNAKLDSTLKGMGFEQSPHEAAIYRRGNGGNALLVGVYVDDLVITGTKDAEVAAFKEEMKATFQMSDLGPLSFYLGIEVHQDNSGITLRQTAYAKRVVELAGLTDCNPALTPMEERLKLSRDSTAEEVDATQYRRLVGSLRYLTHTRPDLAFSVGYVSRFMQRPTTEHQQAVKRIIRYVAGTLDHGLYYPRCPGKAHFVGYSDSDHAGDIDTSKSTSGILFFLGECLVSWQSIKQQVVALSSCEAEYMAASAASTQALWLARLLSDLLGRDTGAVELRVDSKSALALAKNPVFHERSKHIRVRYHFIRSYLEEGSIKASYINTKDQLADLLTKPLGRIKFLELCSRIGMAQLSHKTAHKT

SEQ ID NO: 20183 - protein, 1601 aa, Oryza sativa
  Clone ID: TF_OSC400946j.C1.p15.fg
MSDARSRRSVASSTRRQQDAELAAAEERRRATAQTAAAAARAARLAAAELAAARAEAEAEAAEDAARAAEVEVETLRSSINGSIAGDITADRELEELARGRARERAERWAAAHLHGGGGGPRDRAPADGNPDGRGRAGGSPEPARGPRRRHGSLSPDRRHGHHGVQTVVRDFGPGGGWPTLTKTNYIEWAAVMRVRLQVRHMWEAVRYGDVDYDEDRRALDALIAAVPPEMQFSLSQKRTAKEAWDAIAAARIGSDRARKSTLQALRKEWENLAFKPGEDVDDFALRLNTLLQKMVQYGDDTYDEERAVEKLFRCVPEKYRQIARSIESLLDLSTMSIEEALGRLKVVDGDEPRPLSGPITIGGKLHLTREQWEASQGDGRKGESSSPTGGHKPRKARGGVQLRWARRRAEGGARRGAQGVATGNHKPARDDTCRNCGKLGHWAKDCRQPRRGQAHVARVEEEEPALLLAHASIELPPAAPAAAAFLHLDEPKVLVSLCDGSSNDKADGWYLDTGATHHMTGRREFFTEFDSSVRGTVKFGDASGVEIKGVGSVTFTAKSGEHRLLTGVYYIPALRNSIISVGQLDENGSRVLVEDGLMRIWDRRRRLLAKVTRGTNRLYILSAQVAHPVCLAARRDDEAWQWHERFGHLHFEALKQLSAKEMVRGMPCLDHVEQLCDVCVVTKQRRLPFPQQTSFRAKERLGLVHGDLCGPVTPATPGGRRYFLLLVDDLSRYMWVMVLGSKGEAADAIRHAQAAAEAECGRKLRVLRTDNGGEFTAAEFASYCADEGIQRHYTAPYSPQQNGVVERRNQTVVGMARALLKQRGMPAIFWGEAVVTAAYILNRSPTKALDGRTPYEAWHGRKPAVSHLRVFGCLAFAKELGHIGKLDDRSTPGVFIGYAEGSKAYRILDPETQRVRITRDVVFDEGRGWVWDKAVDDGSTPTYDDFTIEYVHFEGAGGVGSSSSPSVSTPVPEPPPTPTPTHPRATTSTTTSSSSTPPQPVSPHAPAPTATPPGTSTPTPARVERSPVEFVTPLSHDGERIDAYHDGEQLRYRTMEDLLGDQPVPGLVPRNLEAQLHLACDDGEPRSFAEAEKHAAWRAAMQSEMDAVQENRTWELADLPRGHRAITLKWVFKLKRDEAGAIVKHKARLVARGFVQQEGIDYDDAFAPVARMESVRLLLALAAQEGWGVHHMDVKSAFLNGDLKEEVYVHQPPRFVIPGKEGKVLRLHKALYGLRQAPRAWNAKLDSTLKGMGFEQSPHEAAIYRRGNGGNALLVGVYVDDLVITGTKDAEVAAFKEEMKATFQMSDLGPLSFYLGIEVHQDNSGITLRQTAYAKRVVELAGLTDCNPALTPMEERLKLSRDSTAEEVDATQYRRLVGSLRYLTHTRPDLAFSVGYVSRFMQRPTTEHQQAVKRIIRYVAGTLDHGLYYPRCPGKAHFVGYSDSDHAGDIDTSKSTSGILFFLGECLVSWQSIKQQVVALSSCEAEYMAASAASTQALWLARLLSDLLGRDTGAVELRVDSKSALALAKNPVFHERSKHIRVRYHFIRSYLEEGSIKASYINTKDQLADLLTKPLGRIKFLELCSRIGMAQLSHKTAHKT

SEQ ID NO: 20184 - protein, 1542 aa, Oryza sativa
  Clone ID: TF_OSC401408j.C1.p1.fg
MSDARSRRSVASSTRRQQDAELAAAEERRRATAQTAAAAARAARLAAAELAAARAEAEAEAAEDAARAAEVEVETLRSSINGSIAGDITADRELEELARGRARERAERWAAAHLHGGGGGPRDRAPADGNPDGRGRAGGSPEPARGPRRRHGSLSPDRRYGHHGVQTVVRDFGPGGGWPTLTKTNYIEWAAVMRVRLQVRHMWEAVRYGDVDYDEDRRALDALIVAVPPEMQFSLSQKRTAKEAWDAIAAARIGSDRARKSTLQALRKEWENLAFKPGEDVDDFALRLNTLLQKMVQYGDDTYDEERAVEKLFRCVPEKYRRIARSIESLLDLSTMSIEEALGRLKVVDGDEPQPLSGPITIGGKLHLTREQWEASQGDGRKGESSSPTGGRKPRKARGGVQLRWARRRAEGGARRGAQGVATGNHKPARDDTCRNCGKLGHWAKDCRQPRRGQAHVARVEEEEPALLLAHASIELPPAAPAAAAFLHLDEPKVLVSLCDGSSNDKADGWYLDTGATHHMTGRREFFTEFDSSVRGSVKFGDTSGVEIKGVGSVTFTAKSGEHRLLTRVYYIPALRNSIISVGQLDENGSRVLVEDGLMRIWDRRRRLLAKVTRGTNRLYILSAQVAQPVCLAARRDDEAWQWHERFGHLHFEALKQLSAKEMVRGMPCLDHVEQLCDVCVVTKQRRLPFPQQTSFRAKERLELVHGDLCGPVTPATPGGRRYFLLLVDDLSRYMWVMVLGSKGEAADAIRHAQAAAEAECGRKLRVLRTDNGGEFTAAEFVSYCADEGIQRHYTAPYSPQQNGVVERRNQTVVGMARALLKQRGMLAIFWGEAVDTVRGLAWRKPAVSHLRVFGCLAFAKELGHIGKLDDRSTPGVFIGYAEGSKTYRILDPETQRVRIARDVVFDEGRGWVWDKAVDDGSTPTYDDFTIEYVHFEGAGGPVSPHAPAPTATPPGTSTPTPARVERSPVGFVTPLSHDEERIDAYHDGEQLRYRTMEDLLGDQPVPGLVPRNLEAQLHLACDDGEPRSFAKAEKHAAWRATMQSEMDAVQENRTWELADLPRGHRAITLKWVFKLKRDEAGAIVKHKARLVARGFVQQEGIDYDDAFAPVARMESVRLLLALAAQEGWGVHHMDVKSAFLNGDLKEEVYVHQPPGFVILGKEGKVLRLHKALYGLRQAPRAWNAKLDSTLKGMGFEQSPHEAAIYRRGNGGNALLVGVYVDDLVITGTKDAEVAAFKEEMKATFQMSDLGPLSFYLGIEVHQDNSGITLRQTAYAKRVVELAGLTDCNPALTPMEERLKLSRDSTAEEVDATQYRRLVGSLRYLTHTRPDLAFSVGYVSRFMQRPTTEHQQAVKRIIRYVAGTLDHGLYYPRCPDKAHFVGYSDSDHAGDIDTSKSTSGILFFLGECLVSWQSIKQQVVALSSCEAEYMAASAASTQALWLARLLSDLLGRDTGAVELRVDNKSALALAKNPVFHERSKHIRVRYHFIRSYLEEGSIKASYINTKDQLADLLTKPLGRIKFLELCSRIGMAQLSHKTAHKT

SEQ ID NO: 20185 - protein, 1286 aa, Oryza sativa
  Clone ID: TF_OSC401589j.C1.p7.fg
MWEAVWYGDVDYDKDRRALDALITAVPPEMQFSLSQKRTAKEAWDAIAAARIGSDRARKSTLQALRKEWENLAFKPGKDVDDFALRLNNLLQKMVQCDDDTYDEERAVEKLFHCVPEKYRQIARSIESLLDLSTMSIEEALGRLKVVDDDEPQPLSGPITIGGKLHLTREQWEASQSDGRKGESSPSIGGRKPRKACGGVQLRWARRRAEGGARRGAQGGAASNHKPARDDTCRNCGKLGHWAKDCRQPRRGQAHVAQVEEEEPALLLAHASIELPPAAPAAAAFLHLDEPKVLVSLCNSSSNNKADGWYLDTGATHHMTGRREFFTEFDPGVRGSIKFGDASGVEIKGVGSVTFTAKSGEHRLLTGVYYIPALRNSIISVGQLDENGSRVLVEDRLMRIWDRRRRLLAKVTRGTNRLYILGAQVAQPVCLTARRDDEAWQWHERFGHLHFEALKHLSAKEMVRGMPCLDHVEQLCDVFMTSFRAKERLELVHGDLCGPVTPATPGGRCYFLLLVDDLSRYMWVMVLGSKGEAADAIRRAQAAAEVECGRKLRVLRTDNGSEFTAAEFALYCVDEGIQRHYTAPYSPQQNGVVERHNQTVVGMARALLKQRGMPAIFWGEAVVTAVYILNRSPTKALDGRTPYEAWHGRKPAVSHLRVFGCLAFAKELGHIGKLDDKSTPGVLISYAEGSKAYHILDPETQRVRTARDVVFDEGRGWVWDKAVDDGLTPTYDDFTIEYVHFEGAGGSVSPRAPAPTATPPGTSTPTPARVERSPVEFATPLSHDGERIDAYHDGEQLRYRTMEDLLSDQPVPGLVPRDLEAQLHLACDDGEPGSFAEAEKHAAWRATMQSEMDAVQENRTWEFADLPRGHRAITLKWVFKLKRDEAGAIVKHKARLVARGFVQQEGIDYDDAFAPVARMESSAFLNGDLKEEVYVHQPPGFVLPSKEGKVLRLHKALYGLRQAPRAWNAKLDSTLKGMGFEQSPHEAAIYRRGNGGNALLVGVYVDDLVITGTKDAEVAAFKEEMKATFQMSDLGPLFFYLGIEVHQDNFGITLRQTAYAKRVVELAGLTDCNPALTPMEERLKLSHDSTAEEVDATQYRRLVGSLRYLTHTRPDLAFSVGYVSRCPGKAHFLRYSDSDHAGDIDTSKSTSGILFFLGECLVSWQSVKQQVVALSSCEAEYQALWLARLLGDLLGRDTGAVELRVDSKSALALAKTPVFHERSKHIRVRYHFIRSYLEEGSIKASYINTKDQLADLLTKPLGRIKFLELCSRIGMAQLSHKTTHKT

SEQ ID NO: 20186 - protein, 1601 aa, Oryza sativa
  Clone ID: TF_OSC401648j.C1.p6.fg
MSDARSRRSVASSTRRQQDAELAAAEERRRATAQTAAAAARAARLAAAELAAARAEAEAEAAEDAARAAEVEVETLRSSINGSIAGDITADRELEELARGRARERAERWAAAHLHGGGGGPRDRAPADGNPDGRGRAGGSPEPARGPRRRHGSLSPDRRHGHHGVQTVVRDFGPGGGWPTLTKTNYIEWAAVMRVRLQVRHMWEAVRYGDVDYDEDRRALDALIAAVPPEMQFSLSQKRTAKEAWDAIAAARIGSDRARKSTLQALRKEWENLAFKPGEDVDDFALRLNTLLQKMVQYGDDTYDEERAVEKLFRCVPEKYRQIARSIESLLDLSTMSIEEALGRLKVVDGDEPRPLSGPITIGGKLHLTREQWEASQGDGRKGESSSPTGGHKPRKARGGVQLRWARRRAEGGARRGAQGVATGNHKPARDDTCRNCGKLGHWAKDCRQPRRGQAHVAQVEEEEPALLLAHASIELPPAAPAAAAFLHLDEPKVLVSLCDGSSNDKADGWYLDTGATHHMTGRREFFTEFDSSVRGTVKFGDASGVEIKGVGSVTFTAKSGEHRLLTGVYYIPALRNSIISVGQLDENGSRVLVEDGLMRIWDRRRRLLAKVTRGTNRLYILSAQVAHPVCLAARRDDEAWQWHERFGHLHFEALKQLSAKEMVRGMPCLDHVEQLCDVCVVTKQRRLPFPQQTSFRAKERLGLVHGDLCGPVTPATPGGRRYFLLLVDDLSRYMWVMVLGSKGEAADAIRHAQAAAEAECGRKLRVLRTDNGGEFTAAEFASYCADEGIQRHYTAPYSPQQNGVVERRNQTVVGMARALLKQRGMPAIFWGEAVVTAAYILNRSPTKALDGRTPYEAWHGRKPAVSHLRVFGCLAFAKELGHIGKLDDRSTPGVFIGYAEGSKAYRILDPETQRVRITRDVVFDEGRGWVWDKAVDDGSTPTYDDFTIEYVHFEGAGGVGSSSSPSVSTPVPEPPPTPTPTHPRATTSTTTSSSSTPPQPVSPHAPAPTATPPGTSTPTPARVERSPVEFVTPLSHDGERIDAYHDGEQLRYRTMEDLLGDQPVPGLVPRNLEAQLHLACDDGEPRSFAEAEKHAAWRAAMQSEMDAVQENRTWELADLPRGHRAITLKWVFKLKRDEAGAIVKHKARLVARGFVQQEGIDYDDAFAPVARMESVRLLLALAAQEGWGVHHMDVKSAFLNGDLKEEVYVHQPPGFVIPGKEGKVLRLHKALYGLRQAPRAWNAKLDSTLKGMGFEQSPHEAAIYRRGNGGNALLVGVYVDDLVITGTKDAEVAAFKEEMKATFQMSDLGPLSFYLGIEVHQDNSGITLRQTAYAKRVVELAGLTDCNPALTPMEERLKLSRDSTAEEVDATQYRRLVGSLRYLTHTRPDLAFSVGYVSRFMQRPTTEHQQAVKRIIRYVAGTLDHGLYYPRCPGKAHFVGYSDSDHAGDIDTSKSTSGILFFLGECLVSWQSIKQQVVALSSCEAEYMAASAASTQALWLARLLSDLLGRDTGAVELRVDSKSALALAKNPVFHERSKHIRVRYHFIRSYLEEGSIKASYINTKDQLADLLTKPLGRIKFLELCSRIGMAQLSHKTAHKT

SEQ ID NO: 20187 - protein, 1791 aa, Oryza sativa
  Clone ID: TF_OSC409503j.C1.p9.fg
MDNLSEPLLAEIIKRIAKTSDRNSLSLVSKQLYTIDAEQRDAIHVGCGLHPATEALASLCSRFPNLWKVVIDYSGWISIHGKQLDNQGLLVLSSHCSSLTDLTLNFCSYIDDSGIGYLAYCKKLRSFRLNFAPAISSRGLLSVAVGCKSLCTFHLVDCMKVGSVEWLEYLGRAGSLEELVVKDSAPRRCAMSDARSRRSVASSTRRQQDAELAAAEERRRATAQTAAAAARAARLAAAELAAARAEAEAEAAEDAARAAEVEVETLRSSINGSIAGDITADRELEELARGRARERAERWAAAHLHGGGGGPRDRAPADGNPDGRGRAGGSPEPARGPRRRHGSLSPDRRHGHHGVQTVVRDFGPGGGWPTLTKTNYIEWAAVMRVRLQVRHMWEAVRYGDVDYDEDRRALDALIAAVPPEMQFSLSQKRTAKEAWDAIAAARIGSDRARKSTLQALRKEWENLAFKPGEDVDDFALRLNTLLQKMVQYGDDTYDEERAVEKLFRCVPEKYRQIARSIESLLDLSTMSIEEALGRLKVVDGDEPRPLSGPITIGGKLHLTREQWEASQGDGRKGESSSPTGGHKPRKARGGVQLRWARRRAEGGARRGAQGVATGNHKPARDDTCRNCGKLGHWAKDCRQPRRGQAHVARVEEEEPALLLAHASIELPPAAPAAAAFLHLDEPKVLVSLCDGSSNDKADGWYLDTGATHHMTGRREFFTEFDSSVRGTVKFGDASGVEIKGVGSVTFTAKSGEHRLLTGVYYIPALRNSIISVGQLDENGSRVLVEDGLMRIWDRRRRLLAKVTRGTNRLYILSAQVAHPVCLAARRDDEAWQWHERFEHLHFEALKQLSAKEMVRGMPCLDHVEQLCDVCVVTKQRRLPFPQQTSFRAKERLGLVHGDLCGPVTPATPGGRRYFLLLVDDLSRYMWVMVLGSKGEAADAIRHAQAAAEAECGRKLRVLRTDNGGEFTAAEFASYCADEGIQRHYTAPYSPQQNGVVERRNQTVVGMARALLKQRGMPAIFWGEAVVTAAYILNRSPTKALDGRTPYEAWHGRKPAVSHLRVFGCLAFAKELGHIGKLDDRSTPGVFIGYAEGSKAYRILDPETQRVRITRDVVFDEGRGWVWDKAVDDGSTPTYDDFTIEYVHFEGAGGVGSSSSPSVSTPVPEPPPTPTPTHPRATTSTTTSSSSTPPQPVSPHAPAPTATPPGTSTPTPARVERSPVEFVTPLSHDGERIDAYHDGEQLRYRTMEDLLGDQPVPGLVPRNLEAQLHLACDDGEPRSFAEAEKHAAWRAAMQSEMDAVQENRTWELADLPRGHRAITLKWVFKLKRDEAGAIVKHKARLVARGFVQQEGIDYDDAFAPVARMESVRLLLALAAQEGWGVHHMDVKSAFLNGDLKEEVYVHQPPGFVIPGKEGKVLRLHKALYGLRQAPRAWNAKLDSTLKGMGFEQSPHEAAIYRRGNGGNALLVGVYVDDLVITGTKDAEVAAFKEEMKATFQMSDLGPLSFYLGIEVHQDNSGITLRQTAYAKRVVELAGLTDCNPALTPMEERLKLSRDSTAEEVDATQYRRLVGSLRYLTHTRPDLAFSVGYVSRFMQRPTTEHQQAVKRIIRYVAGTLDHGLYYPRCPGKAHFVGYSDSDHAGDIDTSKSTSGILFFLGECLVSWQSIKQQVVALSSCEAEYMAASAASTQALWLARLLSDLLGRDTGAVELRVDSKSALALAKNPVFHERSKHIRVRYHFIRSYLEEGSIKASYINTKDQLADLLTKPLGRIKFLELCSRIGMAQLSHKTAHKT

SEQ ID NO: 20188 - protein, 1427 aa, Oryza sativa
  Clone ID: TF_OSC416913j.C1.p26.fg
MVTTASRRWSGIVVPAVGGPTLTKTNYIEWAAVMRVRLQVRHMWEAVRYGDVDYDEDRRALDALIAAVPPEMQFSLSQKRTAKEAWDAIAAARIGSDRARKSTLQALRKEWENLAFKPGEDVDDFALRLNTLLQKMVQYGDDTYDEERAVEKLFRCVPEKYRQIARSIESLLDLSTMSIEEALGRLKVVDGDEPRPLSGPITIGGKLHLTREQWEASQGDGRKGESSSPTGGRKPRKARGGVQLRWARRRAEGGARRGAQGVATGNHKPARDDTCRNCGKLGHWAKDCRQPRRGQAHVARVEEEEPALLLAHASIELPPAAPAAAAFLHLDEPKVLVSLCDGSSNDKADGWYLDTGATHHMTGRREFFTEFDSSVRGTVKFGDASGVEIKGVGSVTFTAKSGEHRLLTGVYYIPALRNSIISVGQLDENGSRVLVEDGLMRIWDRRRRLLAKVTRGTNRLYILSAQVAHPVCLAARRDDEAWQWHERFGHLHFEALKQLSAKEMVRGMPCLDHVEQLCDVCVVTKQRRLPFPQQTSFRAKERLGLVHGDLCGPVTPATPGGRRYFLLLVDDLSRYMWVMVLGSKGEAADAIRHAQAAAEAECGRKLRVLRTDNGGEFTAAEFASYCADEGIQRHYTAPYSPQQNGVVERRNQTVVGMARALLKQRGMPAIFWGEAVVTAAYILNRSPTKALDGRTPYEAWHGRKPAVSHLRVFGCLAFAKELGHIGKLDDRSTPGVFIGYAEGSKAYRILDPETQRVRITRDVVFDEGRGWVWDKAVDDGSTPTYDDFTIEYVHFEGAGGVGSSSSPSVSTPVPEPPPTPTPTHPRATTSTTTSSSSTPPQPVSPHAPAPTATPPGTSTPTPARVERSPVEFVTPLSHDGERIDAYHDGEQLRYRTMEDLLGDQPVPGLVPRNLEAQLHLACDDGEPRSFAEAEKHAAWRAAMQSEMDAVQENRTWELADLPRGHRAITLKWVFKLKRDEAGAIVKHKARLVARGFVQQEGIDYDDAFAPVARMESVRLLALAAQEGWGVHHMDVKSAFLNGDLKEEVYVHQPPGFVIPGKEGKVLRLHKALYGLRQAPRAWNAKLDSTLKGMGFEQSPHEAAIYRRGNGGNALLVGVYVDDLVITGTKDAEVAAFKEEMKATFQMSDLGPLSFYLGIEVHQDNSGITLRQTAYAKRVVELAGLTDCNPALTPMEERLKLSRDSTAEEVDATQYRRLVGSLRYLTHTRPDLAFSVGYAVKRIIRYVAGTLDHGLYYPRCPGKAHFVGYSDSDHAGDIDTSKSTSGILFFLGECLVSWQSIKQQVVALSSCEAEYMAASAASTQALWLARLLSDLLGRDTGAVELRVDSKSALALAKNPVFHERSKHIRVRYHFIRSYLEEGSIKASYINTKDQLADLLTKPLRRIKFLELCSRIGMAQLSHKTAHKT

SEQ ID NO: 20189 - protein, 1827 aa, Oryza sativa
  Clone ID: TF_OSC419638j.C1.p10.fg
MSDARSRRSVASSTRRQQDAELAAAEERRRATAQTAAAAARAARLAAAELAAARAEAEAEAAEDAARAAEVEVETLRSSINGSIAGDITADRELEELARGRARERAERWAAAHLHGGGGGPRDRAPADGNPDGRGRAGGSPEPARGPRRRHGSLSPDRRHGHHGVQTVVRDFGPGGGWPTLTKTNYIEWAAVMRVRLQVRHMWEAVRYGDVDYDEDRRALDALIAAVPPEMQFSLSQKRTAKEAWDAIAAARIGSDRARKSTLQALRKEWENLAFKPGEDVDDFALRLNTLLQKMVQYGDDTYDEERAVEKLFRCVPEKYRQIARSIESLLDLSTMSIEEALGRLKVVDGDEPRPLSGPITIGGKLHLTREQWEASQGDGRKGESSSPTGGHKPRKARGGVQLRWARRRAEGGARRGAQGVATGNHKPARDDTCRNCGKLGHWAKDCRQPRRGQAHVARVEEEEPALLLAHASIELPPAAPAAAAFLHLDEPKVLVSLCDGSSNDKADGWYLDTGATHHMTGRREFFTEFDSSVRGTVKFGDASGVEIKGVGSVTFTAKSGEHRLLTGVYYIPALRNSIISVGQLDENGSRVLVEDGLMRIWDRRRRLLAKVTRGTNRLYILSAQVAHPVCLAARRDDEAWQWHERFGHLHFEALKQLSAKEMVRGMPCLDHVEQLCDVCVVTKQRRLPFPQQTSFRAKERLGLVHGDLCGPVTPATPGGRRYFLLLVDDLSRYMWVMVLGSKGEAADAIRHAQAAAEAECGRKLRMLRTDNGGEFTAAEFASYCADEGIQRHYTAPYSPQQNGVVERRNQTVVGMARALLKQRGMPAIFWGEAVVTAAYILNRSPTKALDGRTPYEAWHGRKPAVSHLRVFGCLAFAKELGHIGKLDDRSTPGVFIGYAEGSKAYRILDPETQRVRITRDVVFDEGRGWVWDKAVDDGSTPTYDDFTIEYVHFEGAGGVGSSSSPSVSTPVPEPPPTPTPTHPRATTSTTTSSSSTPPQPVSPHAPAPTATPPGTSTPTPARVERSPVEFVTPLSHDGERIDAYHDGEQLRYRTMEDLLGDQPVPGLVPRNLEAQLHLACDDGEPRSFAEAEKHAAWRAAMQSEMDAVQENRTWELADLPRGHRAITLKWVFKLKRDEAGAIVKHKARLVARGFVQQEGIDYDDAFAPVARMESVRLLLALAAQEGWGVHHMDVKSAFLNGDLKEEVYVHQPPGFVIPGKEGKVLRLHKALYGLRQAPRAWNAKLDSTLKGMGFEQSPHEAAIYRRGNGGNALLVGVYVDDLVITGTKDAEVAAFKEEMKATFQMSDLGPLSFYLGIEVHQDNSGITLRQTAYAKRVVELAGLTDCNPALTPMEERLKLSRDSTAEEVDATQYRRLVGSLRYLTHTRPDLAFSVGYVSRFMQRPTTEHQQAVKRIIRYVAGTLDHGLYYPRCPGKAHFVGYSDSDHAGDIDTSKSTSGILFFLGECLVSWQSIKQQVVALSSCEAEYMAASAASTQALWLARLLSDLLGRDTGAVELRVDSKSALALAKKPRFSRTEQAHPSEVDVITYSTLIDGYCLAGKMDEAMKLLSDMVSVGLKPDTVTYSTLINGYCKISRMENALSLFRQMVCNGVSPNIITYNIVLQGLFQTGQTRAAKEIYVRIIKRGIQLEISTCNIVLQGLCKNNLTGEALQMFQNLCLMDVKLETRTFNIMIGSLLRSGRKDESKDLFAALSANGLAPDVVTYTLMIENLIEDGLLEESDNLFLSMEKNGCVPNSRMLNCIVRKLLQKGEIGRAGVYLSKIDKNDFSLEASTAELLILLVSSGKYNQHMKGLPEKYHSFVKSRAV

SEQ ID NO: 20190 - protein, 1247 aa, Oryza sativa
  Clone ID: TF_OSC421987j.C1.p2.fg
MELAAARAEAEAEAAEDAARVAEVEVETLRSSINGSITGDSTADRELEELARGRTVVRDFGPGCGWPTLTKTNYIEWAAMMRVRLQVQHMWEAVRYGDVDYDEDRRALDALIAAVLPEMQFSLSQKRTAKEAWDAIVAARIGSDRARKSTLQALRKEWENLAFKPGEDVDDFALRLNTLLQKMVQYGDDTYDEERAVEMLFRCVPEKYRQIARSIESLLDLSTMSIEEALGRLKVVDGDEPQPLSGPITIGGKLHFTREQWEASQGDGMKGESSPSTGGRKPRKACGGVQLRWARRRAEGGARRGAQGGAAGNHKPARDDTCRNCGKLGHWAKDCRQPRHGQAHVAQVEEEEPALLLAYASIELPPATPATAAFLHLDEPKVLVSLCNSSSNDKADGWYLDTGATHHMTGRREFFTELDPSVRGSIKFGDASGVEIKGVGSVTFIAKSGKHRLLTGVYYIPALRNSIISVGQLDENGSHVLVKHGVMRIWDRRRRLLAKRAGRTTSLLAARRDDEAWQWHERFGHLHFEALKQLSAKEMVRGLPCLDHVEQLCDVCVVTKQRRLPLPQQTSFRAKERLELVHGDLCGLVTPATPGGRRYFLLLVDDLSRYMWVMVLGSKGEAADAIRRAGMPAIFWGEAVVTAVYILNRSPTKALDGRTPYEAWHGRKPAVSHLRVFGCLAFAKELGHIGKLDDRSTPGVFIGYAEGSKTYRILDPETQRVRTARDVVFDEGRGWVWDKAVDDGSTLTYDFTVEYVHFEGAGGVGSSSSPSVPTPVPEPPPTPAATHSRASTSAATTSSPAPPQPATPRTPAPTATPLGMSTPTPARVERSPVELATPLSTTGSASTRTTTASSSGTVRWRTFSATSRCRDWCPATWRRSCTLRATTSEMDAVQENCTWELANLPRGHRAITLKWVFKLKRDEAGAIVKHKARLVARGFVQQEGIDYDDAFAPVARMESVRLLALAAQEGWGVHHMDVKSAFLNGDLKEVYVHQPPGFVIPGKEGNVLRLHKALYGLRQAPRAWNAKLDSTLKGMGFEQSPHEAAIYQRGNGGNALLVGVYVDDLITGTKNAEVYQDDSGITLRQTAYAKRVVELAGLTDCNPALTPMERLKLSRDSTTEEVDATQYRRLVGSLRYLTHTRPDLAFSVGYVSRFMQRPTTEHQQAVKRIICYVAGTLDHGLYYPRCPGKAHFVGYSDHAGDIDTSKSTSGILFFLGECLVSWQSVKQQVVALSSCEAEYMAASAAST

SEQ ID NO: 20191 - protein, 1601 aa, Oryza sativa
  Clone ID: TF_OSC422301j.C1.p5.fg
MSDARSQRSVASSTRRQQDAELAAAKERRRATAQTAAAAARAARLAAAELAAARAEAEAEAAEDAARAAEVEVETLRSSINGSIAGDITADRELEELARGRARERAERWAAAHLHGGGGGPRDRAPADGNPDGRGRAGGSPEPARGPRRRHGSLSPDRRHGHHGVQTVVRDFGPGGGWPTLTKTNYIEWAAVMRVRLQVRHMWEAVRYGDVDYDEDRRALDALIAAVPPEMQFSLSQKRTAKEAWDAIAAARIGSDRARKSTLQALRKEWENLAFKPGEDVDDFALRLNTLLQKMVQYGDDTYDEERAVEKLFRCVPEKYRQIARSIESLLDLSTMSIEEALGRLKVVDGDEPRPLSGPITIGGKLHLTREQWEASQGDGRKGESSSPTGGRKPRKARGGVQLRWARRRAEGGARRGAQGVATGNHKPARDDTCRNCGKLGHWAKDCRQPRRGQAHVARVEEEESALLLAHASIELPPAAPAAAAFLHLDEPKVLVSLCDGSSNDKADGWYLDTGATHHMTGRREFFTEFDSSVRGTVKFGDASGVEIKGVGSVTFTAKSGEHRLLTGVYYIPALRNSIISVGQLDENGSRVLVEDGLMRIWDRRRRLLAKVTRGTNRLYILSAQVAHPVCLAARRDDEAWQWHERFGHLHFEALKQLSAKEMVRGMPCLDHVEQLCDVCVVTKQRRLPFPQQTSFRAKERLGLVHGDLCGPVTPATPGGRRYFLLLVDDLSRYMWVMVLGSKGEAADAIRHAQAAAEAECGRKLRVLRTDNGGEFTAAEFASYCADEGIQRHYTAPYSPQQNGVVERRNQTVVGMARALLKQRGMPAIFWGEAVVTAAYILNRSPTKALDGRTPYEAWHGRKPAVSHLRVFGCLAFAKELGHIGKLDDRSTPGVFIGYAEGSKAYRILDPETQRVRITRDVVFDEGRGWVWDKAVDDGSTPTYDDFTIEYVHFEGAGGVGSSSSPSVSTPVPEPPPTPTPTHPRATTSTTTSSSSTPPQPVSPHAPAPTATPPGTSTPTPARVERSPVEFVTPLSHDGERIDAYHDGEQLRYRTMEDLLGDQPVPGLVPRNLEAQLHLACDDGEPRSFAEAEKHAAWRAAMQSEMDAVQENRTWELADLPRGHRAITLKWVFKLKRDEAGAIVKHKARLVARGFVQQEGIDYDDAFAPVARMESVRLLLALAAQEGWGVHHMDVKSAFLNGDLKEEVYVHQPPGFVIPGKEGKVLRLHKALYGLRQAPRAWNAKLDSTLKGMGFEQSPHEAAIYRRGNGGNALLVGVYVDDLVITGTKDAEVAAFKEEMKATFQMSDLGPLSFYLGIEVHQDNSGITLRQTAYAKRVVELAGLTDCNPALTPMEERLKLSRDSTAEEVDATQYRRLVGSLRYLTHTRPDLAFSVGYVSRFMQRPTTEHQQAVKRIIRYVAGTLDHGLYYPRCPGKAHFVGYSDSDHAGDIDTSKSTSGILFFLGECLVSWQSIKQQVVALSSCEAEYMAASAASTQALWLARLLSDLLGRDTGAVELRVDSKSALALAKNPVFHERSKHIRVRYHFIRSYLEEGSIKASYINTKDQLADLLTKPLGRIKFLELCSRIGMAQLSHKTAHKT

SEQ ID NO: 20192 - protein, 1409 aa, Oryza sativa
  Clone ID: TF_OSC900345j.C1.p5.fg
MRVRLQVRHMWEAVRYGDVDYDEDRRALDALIAAVPPEMQFSLSQKRTAKEAWDAIAAARIGSDRARKSTLQALRKEWENLAFKPGEDVDDFALRLNTLLQKMVQYGDDTYDEERAVEKLFRCVPEKYRQIARSIESLLDLSTMSIEEALGRLKVVDGDEPRPLSGPITIGGKLHLTREQWEASQGDGRKGESSSPTGGRKPRKARGGVQLRWARRRAEGGARRGAQGVATGNHKPARDDTCRNCGKLGHWAKDCRQPRRGQAHVARVEEEEPALLLAHASIELPPAAPAAAAFLHLDEPKVLVSLCDGSSNDKADGWYLDTGATHHMTGRREFFTEFDSSVRGTVKFGDASGVEIKGVGSVTFTAKSGEHRLLTGVYYIPALRNSIISVGQLDENGSRVLVEDGLMRIWDRRCRLLAKVTRGTNRLYILSAQVAHPVCLAARRDDEAWQWHERFGHLHFEALKQLSAKEMVRGMPCLDHVEQLCDVCVVTKQRRLPFPQQTSFRAKERLGLVHGDLCGPVTPATPGGRRYFLLLVDDLSRYMWVMVLGSKGEAADAIRHAQAAAEAECGRKLRVLRTDNGGEFTAAEFASYCADEGIQRHYTAPYSPQQNGVVERRNQTVVEMARALLKQRGMPAIFWGEAVVTAAYILNRSPTKALDGRTPYEAWHGRKPAVSHLRVFGCLAFTKELGHIGKLDDRSTPGVFIGYAEGSKAYRILDPETQRVRITRDVVFDEGRGWVWDKAVDDGSTPTYDDFTIEYVHFEGAGGVGSSSSPSVSTPVPEPPPTPTPTHPRATTSTTTSSSSTPPQPVSPHAPAPTATPPGTSTPTPARVERSPVEFVTPLSHDGERIDAYHDGEQLRYRTMEDLLGDQPVPGLVPRNLEAQLHLACDDGEPRSFAEAEKHAAWRAAMQSEMDAVQENRTWELADLPRGHRAITLKWVFKLKRDEAGAIVKHKARLVARGFVQQEGIDYDDAFAPVARMESVRLLLALAAQEGWGVHHMDVKSAFLNGDLKEEVYVHQPPGFVIPGKEGKVLRLHKALYGLRQAPRTWNAKLDSTLKGMGFEQSPHEAAIYRRGNGGNALLVGVYVDDLVITGTKDAEVAAFKEEMKATFQMSDLGPLSFYLGIEVHQDNSGITLRQTAYAKRVVELAGLTDCNPALTPMEERLKLSRDSTAEEVDATQYRRLVGSLRYLTHTRPDLAFSVGYVSRFMQRPTTEHQQAVKRIIRYVAGTLDHGLYYPRCPGKAHFVGYSDSDHAGDIDTSKSTSGILFFLGECLVSWQSIKQQVVALSSCEAEYMAASAASTQALWLARLLSDLLGRDTGAVELRVDSKSALALAKNPVFHERSKHIRVRYHFIRSYLEEGSIKASYINTKDQLADLLTKPLGRIKFLELCSRIGMAQLSHKTAHKT

SEQ ID NO: 20193 - protein, 2333 aa, Oryza sativa
  Clone ID: TF_OSC900415j.C1.p7.gm
MGNGVFKKTEVLAAVKHKKSGISGSTNSYNAVVRENAQLRHEVTEQRGMIREQRGMIQEHRGMLKAVYEKLGMDIPEEVLSRWESQREDSELDVDCSEGSEEYEIEEEDEGQSPKFRSLVVDGPPPSGRHNLATLVGGAGAGAASAGKECNSNAASRGQYQNFHEIPPDDADFNNLTIYLKSASPPAAELPSLTDHVNEEVAKLDRTVRRITAVLVDADEREIADETMKLWISELKQVTWEAEGILEDYSYELLRSTTVQEEKEGLCRKESRISRCTSSLLDPLEVYGREDEKKLIISSLLDGCLTFKKRRLKEHEYETCKAGAVRLISIVAMGGMGKTTLARLVYNDARVQNHFDIQAWVWVSEVFDEVRLTKAAIESVTAKPCDLTELEPLQRQLHEEVKGSHMIITTRNENVSTIVQAKKLAGSREKFVIVHDLIHDLAKSIGGKEILVKKCCGSSVGGCNTSANNHLRYLAVLVGTTPFYSDNKLVLVQSQWWYNLEGCLLHSPHLKYLRILDVSSSDQIKLVANSGSGAATLDEIKDINTLQGQLCIMDLQNITHDRIWEPRSANLSKKKLTRLELVWNPLPSYKSVPHDEVVLESLQPHNYIRQLVISGFRGLNFCSWLGDRSLFSLQELELCKCYYTDHLPPLGQLPNLKQLKLTSLWKLRSIGPEFYGDCEAPFQCLETLVVQNLVAWEEWWLPENHPHCVFPLLRTIDIRGSHKLVRLPLSNLHALAGITVSSCSKLETIVGLKERCEVTAGNGGLQAGQTNVLPSLRRVKITACPSLEEPLISMLRRQTEIGFSYWEQSPSTSPTDIADFGKTPWKDSGKDAELAAAEERRRATAQTAAAAARAARLAAAELAAARAEAEAEAAEDAARAAEVEVETLRSSINGSIAGDITADRELEELARGRARERAERWAAAHLHGGGGGPRDRAPADGNPDGRGRAGGSPEPARGPRRRHGSLSPDRRHGHHGVQTVVRDFGPGGGWPTLTKTNYIEWAAVMRVRLQVRHMWEAVRYGDVDYDEDRRALDALIAAVPPEMQFSLSQKRTAKEAWDAIAAARIGSDRARKSTLQALRKEWENLAFKPGEDVDDFALRLNTLLQKMVQYGDDTYDEERAVEKLFRCVPEKYRQIARSIESLLDLSTMSIEEALGRLKVVDGDEPRPLSGPITIGGKLHLTREQWEASQGDGRKGESSSPTGGRKPRKARGGVQLRWARRRAEGGARRGAQGVATGNHKPARDDTCRNCGKLGHWAKDCRQPRRGQAHVARVEEEEPALLLAHASIELPPAAPAAAAFLHLDEPKVLVSLCDGSSNDKADGWYLDTGATHHMTGRREFFTEFDSSVRGTVKFGDASGVEIKGVGSVTFTAKSGEHRLLTGVYYIPALRNSIISVGQLDENGSRVLVEDGLMRIWDRRRRLLAKWHERFGHLHFEALKQLSAKEMVRGMPCLDHVEQLCDVCVVTKQRRLPFPQQTSFRAKERLGLVHGDLCGPVTPATPGGRRYFLLLVDDLSRYMWVMVLGSKGEAADAIRHAQAAAEAECGRKLRVLRTDNGGEFTAAEFASYCADEGIQRHYTAPYSPQQNGVVERRNQTVVGMARALLKQRGMPAIFWGEAVVTAAYILNRSPTKALDGRTPYEAWHGRKPAVSHLRVFGCLAFAKELGHIGKLDDRSTPGVFIGYAEGSKAYRILDPETQRVRITRDVVFDEGRGWVWDKAVDDGSTPTYDDFTIDPRASTDSNTNTPSGHDFDYDELVVDTTPAVEFVTPLSHDGERIDAYHDGEQLRYRTMEDLLGDQPVPGLVPRNLEAQLHLACDDGEPRSFAEAEKHAAWRAAMQSEMDAVQENRTWELADLPRGHRAITLKWVFKLKRDEAGAIVKHKARLVARGFVQQEGIDYDNAFAPVARMESVRLLLALAAQEGWGVHHMDVKSAFLNGDLKEEVYVHQPPGFVIPGKEGKVLRLHKALYGLRQAPRAWNAKLDSTLKGMGFEQSPHEAAIYRRGNGGNALLVGVYVDDLVITGTKDAEVAAFKEEMKATFQMSDLGPLSFYLGIEVHQDNSGITLRQTAYAKRVVELAGLTDCNPALTPMEERLKLSRDSTAEEVDATQYRRLVGSLRYLTHTRPDLAFSVGYVSRFMQRPTTEHQQAVKRIIRYVAGTLDHGLYYPRCPGKAHFVGYSDSDHAGDIDTSKSTSGILFFLGECLVSWQSIKQQVVALSSCEAEYMAASAASTQALWLARLLSDLLGRDTGAVELRVDSKSALALAKNPVFHERSKHIRVRYHFIRSYLEEGSIKASYINTKDQLADLLTKPLGRIKFLELCSRIGMAQLSHKTAHKT

SEQ ID NO: 20194 - protein, 1441 aa, Oryza sativa
  Clone ID: TF_OSC900422j.C1.p3.fg
MADRLAAVGGEGRPGGGWPTLTKTNYIEWAAVMRVRLQVRHMWEAVRYGDVDYDEDRRALDALIAAVPPEMQFSLSQKRTAKEAWDAIAAARIGSDRARKSTLQALRKEWENLAFKPGEDVDDFALRLNTLLQKMVQYGDDTYDEERAVEKLFRCVPEKYRQIARSIESLLDLSTMSIEEALGRLKVVDGDEPRPLSGPITIGGKLHLTREQWEASQGDGRKGESSSPTGGRKPRKARGGVQLRWARRRAEGGARRGAQGVATGNHKPARDDTCRNCGKLGHWAKDCRQPRRGQAHVARVEEEEPALLLAHASIELPPAAPAAAAFLHLDEPKVLVSLCDGSSNDKADGWYLDTGATHHMTGRREFFTEFDSSVRGTVKFGDASGVEIKGVGSVTFTAKSGEHRLLTGVYYIPALRNSIISVGQLDENGSRVLVEDGLMRIWDRRCRLLAKVTRGTNRLYILSAQVAHPVCLAARRDDEAWQWHERFGHLHFEALKQLSAKEMVRGMPCLDHVEQLCDVCVVTKQRRLPFPQQTSFRAKERLGLVHGDLCGPVTPATPGGRRYFLLLVDDLSRYMWVMVLGSKGEAADAIRHAQAAAEAECGRKLRVLRTDNGGEFTAAEFASYCADEGIQRHYTAPYSPQQNGVVERRNQTVVEMARALLKQRGMPAIFWGEAVVTAAYILNRSPTKALDGRTPYEAWHGRKPAVSHLRVFGCLAFTKELGHIGKLDDRSTPGVFIGYAEGSKAYRILDPETQRVRITRDVVFDEGRGWVWDKAVDDGSTPTYDDFTIEYVHFEGAGGVGSSSSPSVSTPVPEPPPTPTPTHPRATTSTTTSSSSTPPQPVSPHAPAPTATPPGTSTPTPARVERSPVEFVTPLSHDGERIDAYHDGEQLRYRTMEDLLGDQPVPGLVPRNLEAQLHLACDDGEPRSFAEAEKHAAWRAAMQSEMDAVQENRTWELADLPRGHRAITLKWVFKLKRDEAGAIVKHKARLVARGFVQQEGIDYDDAFAPVARMESVRLLLALAAQEGWGVHHMDVKSAFLNGDLKEEVYVHQPPGFVIPGKEGKVLRLHKALYGLRQAPRTWNAKLDSTLKGMGFEQSPHEAAIYRRGNGGNALLVGVYVDDLVITGTKDAEVAAFKEEMKATFQMSDLGPLSFYLGIEVHQDNSGITLRQTAYAKRVVELAGLTDCNPALTPMEERLKLSRDSTAEEVDATQYRRLVGSLRYLTHTRPDLAFSVGYVSRFMQRPTTEHQQAVKRIIRYVAGTLDHGLYYPRCPGKAHFVGYSDSDHAGDIDTSKSTSGILFFLGECLVSWQSIKQQVVALSSCEAEYMAASAASTQALWLARLLSDLLGRDTGAVELRVDSKSALALAKNPVFHERSKHIRVRYHFIRSYLEEGSIKASYINTKDQLADLLTKPLGRIKFLELCSRIGMAQLSHKTAHKT

SEQ ID NO: 20195 - protein, 665 aa, Oryza sativa
  Clone ID: TF_OSC400177j.C1.p42.np
MDEVVATMDISEANEGYASCGSVIEMSRQMKTTRVGARAQPWPACPGIPAVGRVGSVLLFTARMGEGLCHIFTTGSKAMECGVKMCLVGWPGLAWDELEPRSGCQFGPNHRRPWVKAVLDGQLCEEEDVVSRLPKLRKTAGSASEAKEAVKPAVKQDKRLRSVKVLSLVSNLSLPFVFPLSLSKPLQQMADNEKGNKVRSQDIGTSSSRVNEAPDTSCVTLVQHLINQNRLLIEILQQHQTPILNLSQIQPQVQLEAVQALTPQVSAPPTSQKAPHAMPHVDPKEASIICFMCDEQGHYARNCPQQKRKAPMRTEDEVRKMIITSTEWPPPGMTKHQRRNSFRGAQQLTEHLLANGGRVSDSEDSDQVSSDDEDAKSPQDFNQNKIELKACSRCGEIGHVASSCAFTCVRCEEDHPPDRCPMSRITCFLCEGTDHVPKDCQLSFLLTKKMADQHAHSNGEKHQGSTNPRQDYSFSLTPVPGQRKQNEKRKCRVREDIRCFNCQGMGHFADKCPKPRNIAAGTSVHATPCNQQLAPQRIVIHASRSSPLARVATTPIPMSALPQGVNAQFQPQPPADKTEASICVVPLEVPIQQLRNQVQDEEPECKKVIVCYNCSEEGHYSKNCPQPRQNRPPHYRQFTRSRHSNRIVVTGANAVPVRPRVNQNP

SEQ ID NO: 20196 - protein, 661 aa, Oryza sativa
  unsure (1)..(661): unsure at all Xaa locations
  Clone ID: TF_OSC407089j.C1.p1.np
MNKVVATMNSEANEGYASCGSVIEMSRQMKTTRVGARAQPWPACPAQPWPACPGIPAVGRVGSVLLFTARMGEGLCHIFTTGSKAMECGVKMCLVGWPGLAWDELEPRSGCQFGPNHRRPWVKAVLVGQLCEEDVVSCLPKLRKTAGSASEVKEAVKPAVKDSKRLRSVKVLSLVSNLSLPFVFPLSLSKPLQQMADNEKGNKVRSQDIGTSSSRVNEAPDTSCVTLVQHLINQNRLLIEILQQHQTPILNLSQIQPQVQLEAVQALTPQVSAPPTSQKAPHAMPHVDPKEASIICFMCDEQGHYARNCPQQKRKAPLRTEDEVRKMIITSTEWPPPGMTKHQRRNSFRGAQXLTEHLLANGGRVSDSEDSDQVSSDDENKIELKACSRCGEIGHVASSCAFTCVRCEEDHPPDRCPMSRITCFLCEGTDHVPKDCQLSFLLTKKMADQHAHSNGEKHQGSTNPRQDYSFSLTPVPGQRKQNEKRKCRVREDIRCFNCQGMGHFADKCPKPRNIAAGTSVHATPCNQQLAPQRIVIHASRSSPLARVATTPIPMSALPQGVNAQFHPQPPADKTEASICVVPLEVPIQQLRNQVQDEEPECKKVIVCYNCSEEGHYSKNCPQPRQNRPPHYRQFTRSRHSNRIVVTGANAVPVRPRVNQDP

SEQ ID NO: 20197 - protein, 634 aa, Oryza sativa
  unsure (1)..(634): unsure at all Xaa locations
  Clone ID: TF_OSC10729j.C1.p1.np
GGHWGVHASGCRGGDSDPGMVHCGELCFARGTVTVPFQGTVVALRRMETCFGAVSCGYSVVYLLCSLLSMSYAHSCNIHSSEEEYFSEEIPGVTSWYQSHVDLRTSQMMSPHPPERLIDVVGFVRGLRMMAFEVGYDVAPEYRQIPHDPNEEQCRVRVTLTSDREDLPSIKFEAGGKKYSHACQEAALVAIGELRHRFDEELESSAFXYHPHKPHGQDYGVHNYPEDEDSTTLKHAVYMLSAMDAIGVEREKAAHDKENXNHGKIYKLESKVYRLQKELAELKGEAQPPAPKLRLTARKRTRPPRHIQLASKTRVVGDAVPDHAEPVIHMVNTRTESSGHNEEDPTLAQVLAQQTQLINLLVQQAQNQQANNNNQPPPPQNKLADFLRVRAPTFSSTTNPVEAGDWLHAVEKKAAAAGKPITWREFTAAFKKTHIPSGVVALKKREFSALNQGSRSVIEYLHDFNRLARYAPEDVRTDRERQEKFLEGLNDELSYALLAMEXRDFQQLVDKAIRQENMYDRMEQKKLARPQCQFYNNNTGNRSNNNRNVVTRPVATPTQNQPVRKEQGSKLGVCFNCGDPGHYANKCPKPRRVKTAPVQNNSNAPAPKARVNHVTAAEAQIDLQACKNEVLSDS

SEQ ID NO: 20198 - protein, 1949 aa, Oryza sativa
  Clone ID: TF_OSC417563j.C1.p1.fg
MAKNPKAAKNRRPTTRRPRAAAAAATASASADIEDLAPPSGCRAAVGLTTAAAAVRAELLRWYDANRRDLPWRRAAEPAGSGSGSGRGEEKRAYAVWVSEVMLQQTRVPVVVDYYSRWMARWPTVDSLAAATQEEVNEMWAGLGYYRRARFLLEGAKQIVEKGEFPRTASALREVRGIGDYTAGAIASIAFNEVVPVVDGNVRVISRLYAIPDNPKESSTVKRFCTRRQQDAELAAAEERRRATARTGAAAARAARLAAAELAAARAEAEAEAAEDAARAAEVEVETLRSSINGSIAGDITADRELEELARGRARERAERWVAAHLHGGGGGPRDRAPADGNPNGRERAGGSPEPARGPRRQHGSLSPDRRHGHHGVQTVVRDFGPGGGWPTLTKTNYIEWAAVMRVRLQVRHVGGSPFSLSQKRTAKEAWDAIAAARIGSDRARKSTLQALRKEWENLAFKPGEDVDDFALRLNTLLQKMVQYGDDTYDEERAVEKLFRCVPEKYRQIARSIESLLDLSTMSIEEALGRLKVVDGDEPQPLSGPITIGGKLHLTREQWEASQGDRRKGESSSPTGGRKPRKARGGVQLRGAQGVATGNHKPARDDACRNCGKLGHWAKDCQQPRRGQAHVARVEEEPALLLAHASIELPPAAPAAAAFLHLDEPKVLVSLCNGSSNDKADGWYLDTGATHHMTGRREFFTEFDSSVRGSVKFGDASGVEIKGVGSVTFTAKSGEHRLLTGVYYIPALRNSIISVGQLDENGSRVMVEDGLMRIWDRRRRLLAKVTRGTNRLYILSAQVAQPVCLAARRDDEAWQWHERFGHLHFEALKQLSAKEMVRGMPCLDHVEQLCDVCVVTKQRRLPFPQQTSFRAKKRLELVHEDLCGPVTPATPGGRRYFLLLVDDLSRYMWVMVLGSKGEAADAIRHAQAAAEAECGRKLRVLRTDNGGEFTAAEFASYCADEGIQRHYTTPYSPQQNGVVERRNQTVVGMARALLKQRGMPAIFWGEVVVTAAYILNRSPTKALDGRTPYEAWHGRKPAVSHLRVFGCLAFAKELGHIGKLDDRSTPGVFIGYAEGSKAYRILDPETQRVRTARDVVFDEGRGWVWDKAVDDGSIPTYDDFTVEYVHFEGAGGVGSSSSPSVSTLAPESPPTPTPTHPRATTSTTTSSSSTPPQPVTPHAPVPTATPPSTSTLTPARVERSPVEFATPLSHDGERIDAYNDGEQLRYRTMEDLLGDQPVPGLVPRDLEAQLHLACDDGEPRSFAEAEKHAAWRAAMQSEMDAVQENRTWELADLPRGHRAITLKWVFKLKRDEAGAIIKHKARLVARGFVQQEGIDYDDAFAPVARMESVRLLLALAAQEGWGVHHMDVKSAFLNGDLKEEVYVHQPPGFVIPGKEGKVLRLHKALYGLQQAPRAWNAKLDSTLKGMGFEQSPHEAAIYRRGNGGNALLVGVYVDDLVITGTKDAEVAAFKEEMKATFQMSDQGPLSFYLGIEVHKDNSGITLRQTAYAKRVVELAGLTDCNPALTPMEERLKLSRDSTAEEVDATQYRRLVGSLRYLTHTRPDLAFSVGYVSRFMQRPTTEHQQAVKRIIRYVAGTLDHGLYYPRCPGKAHFVGYSDSDHAGDIDTSKSTSGILFFLGKCLVSWQSVKQQVVALSSCEAEYMAASAASTQALWLARLLSDLLGRDTGTVELRVDSKSALALAKNPVFTNGASTSGQLTGELVDPSRPGDFNQAIMELGATLCRKTKPGCSQCPVSNHCQALTLSNQSASVKVTDYPRVVPKAKPRSDFAAVCVVQINDNLFLLIKRPEEGLLAGLWEFPSVLVSEEKTDVLNRRKEMDKYLKQVLSIDVKRRSSVILREDVGQHVHIFSHIRLTMFVELMILNLKDDGDKLCMEGQDNSKLRFIDENAVDSIGLISGIRKVYNMVKAFKEKRPKEQSQVPSRKRSRRLK

SEQ ID NO: 20199 - protein, 470 aa, Oryza sativa
  unsure (1)..(470): unsure at all Xaa locations
  Clone ID: TF_OSC900136j.C1.p9.np
MSWHRAGVLLLGGSILPACPGGSGRRGVGSVLLFMARMGWELCHVFRPYTVVMFNREKGKNVRGYASSNSSFQLNPPLASRELTRAHPWSIPSMLLSSQLPLVGSQDQNQYVFDRAFATQINELPMPEEHVPFCHDCREXGHYALNCPWVYAKEAPSFGLTGQTSLNQPPRTKSSLQPSVQSREPNGENPLNPGNCFPPSLSYHVGSRTKQAKGKKSKNQKRKAPMRTEEEVRKMTITSTEWPPAGITIPRRQRGNTFRGARQLTQHLLSHGGRVSDSEGSDQVSSDVEDESPRHLGEEEMESKACTRCGEIGHIASRCLTLCPHCEEDHPPGECPTRKVTCFLCEGTNHVPKDCQLSVLLTKTAEIQRTTLRLSHQLVSSNSNLDDIIHSTNAPPAAPDSAVNHSNNTFNTNHSLHRRPQQRIVVDGRSCVSPRPTPGRAKGNQSQECDTKQKTVICFKXQSEGSFSCE

SEQ ID NO: 20200 - protein, 1991 aa, Oryza sativa
  Clone ID: TF_OSC1745j.C1.p15.fg
MKSGKSKFAVANITSTAWRGRRQGGQRAPPSLNMPSTTPPPPQSSLPPSTGEKQDGNSDVEGNLEAVSPLAQTTHATGFGAKINDNDGHPAASREGEGRRGRRPPVASAREAAILKTKWCCEEGGARRGLDAAWGSRGRNYGLFGFTMNDYLSVGTVISFTTIINFGRVMMALAVDVSRFEGVPMAPPDPILGVSEAFKADQNDLKLNLGVGAYRTEELQPYVLNVVKKAETLMLEKGENKEYLPIEGLAAFNKATAELLFGADNPVLKQGRVATLQSLSGTGSLRLAAAFIQRYFPEAKVLISSPTWGNHKNIFNDAKVPWSEYRYYDPKTVGLDFEGMIADIQAAPDGSFVLLHGCAHNPTGIDPTPEQWEKIADVIQEKKHMPFFDVAYQGFASGSLDEDASSVRLFVQRGLEVFVAQSYSKNLGLYAERIGAINVVCSTPEVANRVKSQLKRLARPMYSNPPIHGARIVANVVGDPTMFGEWKQEMEEMAGRIKNVRQKLYDSLSAKDDSGKDWSFILRQIGMFSYTGLNKTQSDNMTDKWHIYMTKDGRISLAGLSLAKCEYLADAIIDSFHNGPSSHVYVNKDSNTEKVKLPEKIGCQKTSWYQSRPAGGRRRLNPSWPEAWRLEQGRECASAAARKSGASAARRGGRSRAAAGAELLLLLGAELAGRSGSCSVVAGSQHSEDFASLVENQGIEQVMGKLVDMLAKKFSEASTTSNAIIPHTESILKIELMQNEIKLEGVKNYLSWSRRALLILKTKGLEGYVTGEVKEPENTSSVEWKTWSTTNSLVVAWLLTSLIPAIATTVETISSAREMWKTLTKLYSGEGNVMLMVEAQEKISALRQGERSVAEYVVELKSLWSDLDHYDPLGLEHSDCIAKMKKWVERRRVIEFLKGLNPEFEGRRDAMFHQTTLPTLDEAIAAMAQEELKKKVLPSAAPCSPSPTYAIVQGKETRECFNCGEMGHLMRDCHAPRKPTYGRGRGVDRGGTRGGRGYAGRSNRGRGYGYRGDYKANAVTLEEGSSGTTPDNVANFAHSTSGSFNQAFMSMNTSHSSWILDSGASRHVTGMSGEFTSYKPYSFAHKETIQTADGTSCQERRTGKKLGISIRRDGLWYLDRRGTNEDVCALMASTSKEVTEFIRTDNGGEYMNSEFGHFLSLEGILHQTSCPDTPPQNGVAERKNRHLLEIARSLMYTMNVPKFLWSEAVMTAAYLINRTPSRILGMKTPYEMIFGKNEFVVPPRVFGCTCFVRDHRPSIGKLDPRAVKCIFIGYSSNQKGYKCWSPSERRTFVSMDVTFRESVPFYGEKTDISSLFVDLDDLTRGDHDQQKEGEILGLKENEQSKGKIMVGEIPCAIGDPVQEQEWRKPHEEENLQVYTRRMRLPTTQQVEVDDQVSDDLTHVQVSSESGGEQIEIREEESNLPIAIRKGMRSNAGKPPQRYGFEIGDESGDENDIANYVSYTSLSSTYKAFVASLNSAIIPKDWKEAKQDPRWHQAMLDELEALEKNKTWDLVSYPNGKKVVNCKWVYAVKQNPDGKVERYKARLVAKEYSQTYGIDYDETFAPVAKMSTVRTIISCAVNFDWPLHQLDVKNAFLHGDLQEEVYMEIPPGFATLQTKGKVLRLKKSLYGLKQSPRAWFDRFRRAMCAMGYKQCNGDHTVFYHHSGDHITILAVYVDDMIITGNDCSEITRLKQNLSKEFEVKDLGQLKYFLGIEIARSPRGIVLSQRKYALDLLSDTGMLGCRPASTPVDQNHKLCAESGNPVNKERYQRLVGRLIYLCHTRPDITYAVSMVSRYMHDPRSGHMDAVYRILRYLKGSPGKGLWFKKNGHLEVEGYCDADWASCPDDRRSTSGYCVFVGGNLVSWRSKKQPVVSRSTAEAEYRAMSVSLSELLWLRNLLSELMLPVDTPMKLWCDNKSAISIANNPVQHDRTKHVELDRFFIKEKLDEGVLELEFVMSGGQVADCFTKGLGVKKCNSSCDKMGMIDIYHPS

SEQ ID NO: 20201 - protein, 1237 aa, Oryza sativa
  Clone ID: TF_OSC401213j.C1.p23.fg
MAENQGIEQVMGKLVDMLAKKFSEASTTSNAIIPHTESILKIELMQNEIKLGVKNYLSWSRRALLILKTKGLEGYVTGEVKEPENTSSVEWKTWSTTNSLVVAWLLTSLIPAIATTVETISSASEMWKTLTKLYSGEGNVMLMVEAQEKISALRQGERSVAEYVAELKSLWSDLDHYDPLGLEHSDCIAKMKKWVERRRVIEFLKGLNPEFEGRRDAMFHQTTLPTLDEAIAAMAQEELKKKVLPSAAPCSPSPTYAIVQGKETRECFNCGEMGHLMRDCHAPRKPTYGRGRGVDRGGTRGGRGYAGRSNRGRGYGYRGDYKANAVTLEEGSSGTTPDNVANFAHSTPGSFNQAFMSMNTSHSSWILDSGASRHVTGMSGEFTSYKPYSFAHKETIQTADGTSCQERRTGKKLGIGIMRDGLWYLDRRGTNEDVCALMASTSKEVTENGVAERKNRHLLEIARSLMYTMNVPKFLWSEAVMTAAYLINRTPSRILGMKTPYEMIFGKNEFVVPPRVFGCTCFVRDHRPSIGKLDPRAVKCIFIGYSSSQKGYKCWSPSERRTFVSMDVTFRESVHSMEGEILGLKENEQSKGKIVVGEIPCAIGDPVQEQEWRKPHEEENLQVYTRRMRLPTTQQVEVDDQVSDDLTHVQVSSESGGEQIEIREEESNLPIAIRKGMRSNAGKPPQRYGFEIGDESGDENDIANYVSYTSLSSTYKAFVASLNSAIIPKDWKEAKQDPRWHQAMLDELEALEKNKTWDLVSYPNGKKVVNCKWVYAVKQNPDGKVERYKARLVAKGYSQTYGIDYDETFAPVAKMSTVRTIISCAVNFDWPLHQLDVKNAFLHGDLQEEVYMEIPPGFATLQTKGKVLRLKKSLYGLKQSPRAWFDRFRRAMCAMGYKQCNGDHTVFYHHSGDHITILAVYVDDMIITGNDCSEITRLKQNLSKEFEVKDLGQLKYFLGIEIARSPRGIVLSQRKYALDLLSDTGMLGCRPASTPVDQNHKLCAESGNPVNKERYQRLVGRLIYLCHTRPDITYAVSMVSRYMHDPRSGHMDAVYRILRYLKGSPGKGLWFKKNGHLEVEGYCDADWASCPDDRRSTSGYCVFVGGNLVSWRSKKQPVVSRSTAEAEYRAMSVSLSELLWLRNLLSELMLPVDTPMKLWCDNKSAISIANNPVQHDRTKHVELDRFFIKEKLDEGVLELEFVMSGGQVADCFTKGLGVKECNSSCDKMGMIDIYHPS

SEQ ID NO: 20202 - protein, 1299 aa, Oryza sativa
  Clone ID: TF_OSC401669j.C1.p18.fg
MAENQGIEQVMGKLVDMLAKKFSEASTTSNAIIPHTESILKIELMQNEIKLEGVKNYLSWSRRALLILKTKGLEGYVTGEVKEPENTSSVEWKTWSTTNSLVVAWLLTSLIPAIATTVETISSASEMWKTLTKLYSGEGNVMLMVEAQEKISALRQGERSVAEYVAELKSLWSDLDHYDPLGLEHSDCIAKMKKWVERRRVIEFLKGLNPEFEGRRDAMFHQTTLPTLDEAIAAMAQEELKKKVLPSAAPCSPSPTYAIVQGKETRECFNCGEMGHLMRDCHAPRKPTYGRGRGVDRGGTRGGRGYAGRSNRGRGYGYRGDYKANAVTLEEGSSGTTPDNVANFAHSTSGSFNQAFMSMNTSHSSWILDSGASRHVTGMSGEFTSYKPYSFAHKETIQTADGTSCQERRTGKKLGIGIRRDGLWYLDRRGTNEDVCALMASTSKEVTEFIRTDNGGEYMNSEFGHFLSLEGILHQTSCPDTPPQNGVAERKNRHLLEIARSLMYTMNVPKFLWSEAVMTAAYLINRTPSRILGMKTPYEMIFGKNEFVVPPRVFGCTCFVRDHRPSIGKLDPRAVKCIFIGYSSSQKGYKCWSPSERRTFVSMDVTFRESVPFYGEKTDISSLFVDLDDLTRGDHDQQKEGEILGLKENEQSKGKIVVGEIPCAIGDPVQEQEWRKPHEEENLQVYTRRMRLPTTQQVEVDDQVSDDLTHVQVSSESGGEQIEIREEESNLPIAIRKGMRSNAGKPPQRYGFEIGDESGDENDIANYVSYTSLSSTYKAFVASLNSAIIPKDWKEAKQDPRWHQAMLDELEALEKNKTWDLVSYPNGKKVVNCKWVYAVKQNPDGKVERYKARLVAKGYSQTYGIDYDETFAPVAKMSTVRTIISCAVNFDWPLHQLDVKNAFLHGDLQEEVYMEIPPGFATLQTKGKVLRLKKSLYGLKQSPRAWFDRFRRAMCAMGYKQCNGDHTVFYHHSGDHITILAVYVDDMIITGNDCSEITRLKQNLSKEFEVKDLGQLKYFLGIEIARSPRGIVLSQRKYALDLLSDTGMLGCRPASTPVDQNHKLCAESGNPVNKERYQRLVGRLIYLCHTRPDITYAVSMVSRYMHDPRSGHMDAVYRILRYLKGSPGKGLWFKKNGHLEVEGYCDADWASCPDDRRSTSGYCVFVGGNLVSWRSKKQPVVSRSTAEAEYRAMSVSLSELLWLRNLLSELMLPVDTPMKLWCDNKSAISIANNPVQHDRTKHVELDRFFIKEKLDEGVLELEFVMSGGQVADCFTKGLGVKECNSSCDKMGMIDIYHPS

SEQ ID NO: 20203 - protein, 489 aa, Oryza sativa
  Clone ID: TF_OSC900020j.C1.p11.fg
MSNSAATSTYAESVASCRAPAPATPRAPPRRREAPLRLRRRRRRYMLDFLDACVYFLKHARVHEERNANILFGVEKLIFVQMPQPAYMSHPKPNPHVFSSPCSPVVFNSPSNHLAGSTTPTPNNLQVFNGPRNPHVSNSPSNHLAGSTTPTPNNLQVFNAPGNLHVSNSPNNHRSGATTPVNANPPGSRSSDKQPICHCRAGKCKVETIKGQKYYVCCIQKGQGACPYQVPVNAFVEESPQAGNSVPLEDNRGNYSPVKVEANNDNGSINPDQPEYDEWPFDIVNNDVVCSGFLPTAEPTLRDGIVAGESPSTQHLSNATTEAKTPTKSPIMPPPHGSGSPFTPRSNPCYRCGEDGHWSRNCPKPASSPLNSPCYNCGKLGHWRARGGLLRCLSIICFVNHFLHECKVQTCYCYNCYFAPFFFSMMNWKAIGCRSLNLSLKFFLESFFQRWSSPLPFIRSETETWDDDRCRDLTRTYEDKKKNTNRWMD

SEQ ID NO: 20204 - protein, 545 aa, Oryza sativa
  unsure (1)..(545): unsure at all Xaa locations
  Clone ID: TF_OSC13693j.C1.p1.np
LVLDGQLCEEEDVASGLPKFXKAAGSTSEAKEAVKPDVKQEEKIRSVKVLSLVSDLFLPPIFSFPLSKPCQMADNEKGSVRNQNKGAPSRVNEAPDTSCVTVVXHLINXNELLIELPQQHQMPILDPSQMQPQVQVEAVQSLTPQVSAPPASQQAHRAMPHVDSKEARIICFIYVEQGHYARNCPXQKKKAPMRTEDEVRKMTITGTEWPPPGMTKRQRRNFFRGAPXLTEHLLANGGRVSDSEDSDQVSSRVEDEKSLQGFNQNKKEHMACSRCGEIGHFASSCVTTCVHCEEDHPPDECPTSRITYFLCEXADHVRKDCQFSFLLMKKMANQPASYNRQKHQGNPNPRQDYSFSLTPMPGQRNQNGKRKCRVWKDICCFNCQEVGHFADKCSKPRNIFTNTSVHATPRNQKLAPXQIGIHASXSSPIAQVAIAPTPMSALPQGVNAQFQPQPPVDKTEASIVGPLDGPGQQPRNQQDEEPESKKVIVCYNWKEPGHNSRTCPXPRKKNRPPHFRQFTRNRHANRQVVTEKNGPPPKKGVFKNP

SEQ ID NO: 20205 - protein, 1214 aa, Oryza sativa
  Clone ID: TF_OSC900382j.C1.p4.fg
MAGFADALRTDKFTDVHFKRWQIRVTLWLTAMKCFWVSTGKPMGVLNADQQKEFDEATTLFVGCILSVLGDRLVEVYMHMTDAKELWDALNTKFGATDASNDLYIMEQFHDYKMADNRSVVKQAHEIQTMAKELELLKCVLPNKFVVGCIIAKLPPSWRGFGTALKHKRQEYSIEGLIASLDVEEKAREKDAASKGDGGQSTANVVHKAQNKSKGKYKAQQTTNFKKKKNNNNPNQDERTCFVCSQPGHLARKCPQRKGMKAPAGQTSKSANVTIGNTGDGSGYGNLPTVFSVNQSTNWWVDTGANVHVCADISLFSSYQVARGYTVLVGNGSHASVHGVGTVDLKFTSGKIVQLKNVQHAPSIDRNLVSGSRLTRDGFKLVFESNKVVVSKHGYFIGKDYECGGLFRFSLSDFCNKSVNHICGSVDDEANVWHSRLCYINFGLMSRLSSMCLIPKFSIVKGSKCHSCVQSKQPRKPHKAAEERNLAPLELLHSDHCEMNWVLTKGGKRYFMTLIDDATRFCYMYLLKMKDEALDYFKIYKAEVENQLDRKIKRLRSDRGGEFFSNEFDLFCEEHGIIHERTPPYSPESNGIAERKNRTLTDLVNAMLDTAGLPKACIAYRFLIFKSEVPDMHVGTIMESRDATFFESFFPMKDTHSSSSQTSEIIPNSITPPEQTEHTHEHVTEEDDSEAPRRSKRQRTAKSFGDDFTVYLVDDTPKSISEAYASPDVDYWKEAEMTERPYGCKPVGCKWVFKKKLRPDGTIEKYNARLVAKGYTQKEGEDFFDTYSPVARLTTIRVLLSLAASHGLLVHQMDVKTAFLNGELDEEIYMDQPDGFVVEGQEGKICKLLKSLYGLKQAPKQWHEKFDRTLTSAGFAVNEADKCVYYRHGGGEGVILCLYVDDILIFGTNLEVINEVKSFLSQKFDMKDLGVADVILNIKLIRGENGITLLQSHYVEKILNRFGYFDSKPSPTPYDPSLLLRKNKRIARNQLEYSKIIGSLMYLASATRPDISFAVSKLSRFTSNPGDDHWRALERVMHYLKGTMELGLHYSGYPVVLEGYSDSNWISDVDEIKATSGYIFTLGGGAVSWRSCKQTILTRSTMKAELTALDTATVEAEWLRDLLMDLPIVEKPVPAIFMNYDNQTVIVKVNSSKDNMKSSRHVKRRLKSIRKLRNSGVITLDYIQTARNLADPFTKGLSQNVIDNASKEMGLRPM

SEQ ID NO: 20206 - protein, 361 aa, Oryza sativa
  Clone ID: TF_OSC31099j.C1.p1.fg
MPCHMLTQKKQGHYARNCPQQKRKAPMRTEDEVRKMIITSTEWPPPGMTKCQRRNSSRGAQQLTEHLLANGGRVSGSEDSDQVSSDDEDAKSPQGFNQNKIELKACSRCGEIGHVASSCAFTCVRCEEDHPPDRCPMSRITCFLCEGTDHVPKDCQLSFLLTKKMADQHAHSNGEKHQGNTNPRQHYSFSLTPVPGQRNQNEKRKCRVREDICCFNCQGMGHFADKCPKPRNIAAGTSVHATPCNQKLAPQRIVIHASRSSPIARVATAPIPMSALPQGVNAQFQPQPPAGKTEASICVVPLEVPIHQLRNQVQDEEPELKKGITPKTVPNQGKIGLHITANLHEADIPIVLWSLEQTPCP

SEQ ID NO: 20207 - protein, 1073 aa, Oryza sativa
  Clone ID: TF_OSC400545j.C1.p30.fg
MADQGHYVADSYEMLLAFLAIVWNEVYMHMTDAKELWDALNTKFGATDASNDLYIMEEFHDYRMVDNRSVVEQAHEIQTMAKELELLKSFGTALKHKRQEYSIEGLIASLDVEEKAREKDAASKGDGGQSSANVVHKAQNKSKGKYKAQQTTNFKKQKKNNNNPNQDERTCFVCGQPSHLARKCPQRKGMKAPAGQTSKSANVTIGNTGDGSGYGNLPTVFSVNQSTNWWVDTGANVARGSTVLMGNGSHAPVHGVGTVDLKFTSGKIVQLKNVQHVPSIDRNLVSGSRLTRDGFKLVFESNKVVVSKHGYFIGKGYECGGLFRFSLSDFYNKSVNHICGSVDDEANVWHSRLCHINFGLMSRLSSMCLISKFSIVKGFKCHSCVQSKQPRKPHKAAEERNLAPLELLHSDLCEMNGVLTKGGKRYFMTLIDDATRFCYVYLLKMKDEALDYFKIYKAEVENQIDRKIKKLRSDRGGEFFSNEFDLFCEEHGIIHERTPPYSPESNGIAERKNRTLTDLVNAMLDTAGLPKAWWGEALLTSNHVLNRVPNRNKDKTPYEIWIGRKPSLCYLRTWGCLAKVNVPITKKRKLGPKTVDCVFLGYAHHSIAYRFLIVKSEVPDMHVGTIMETRDATFFESFFPMKDTHSSSSQPSEIIPSSITPPEQTEYTHEHVTEEDGSEAPRRSKRQRTAKSFGDDFTVYFVDDTPKSISEAYASPDADYWKEAVPSEMDSIIANGTWEVTERPYGCKPLGCKWVFKKKLRPDGTIEKYKARLVAKGYTQKEGEDFFDTYSPVARLTTIRVLLSLAASHGLLVHQMDVKTTFLNGELDEEIYMDQPDGFVVEGQEGKVINEVKSFLSQNFDMKDLGVADVILNIKLIRGENGITLLQSHYVEKILNRFGYIDSKPSPAPYDPSLLLRKNKRIARNQLEYSQIIGSLMYLASATRPDISFAVSKLSRFTSNLGDDHWRALERVMRYLKGTMALGLHYTGYPAILEGYSDSNWISDVDEIKATSGYVFTLGGGAVSWRSCKQTILTRSTMEAELTALHTATVEAEWLRDLLMDLPIVEKMVPAIF

SEQ ID NO: 20208 - protein, 369 aa, Oryza sativa
  Clone ID: TF_OSC415186j.C1.p1.fg
MVNSRTNGSGNNNNEGNPTLAQVLAQQTQLMNMMIQQMQNQLNQGNNNAPPPQNKLTDFLRVRPPTFSSTTNLVEAGDWLHAVEKKLELLQCTDQEKVVFASHQLQGPASEWWDHFRMNRADGQPITWAEFTEAFKKTHIPVGVVALKKREFRALKQKDHTVAEYLHEFNRLARYAPEDVRTDEERQEKFLEGLKDELSVTLISHDYVDFQQLVDKAIRLEDKKNMMDNRKRKMTVFHEAQGSSQRQRIKPLQIGESSSAGQGQSQQLNIGGEIKSETNGSNEVNIEQANQPVPVQQDQSQENNSSGREQQVCFNCYNPGHFARECPKPKHQQSQVNNIVVTGANAVSVASSRVASSSVTAQPPVSRQQ

SEQ ID NO: 20209 - protein, 1421 aa, Oryza sativa
  Clone ID: TF_OSC900086j.C1.p11.gm
MPERSCRFPRGDATPPPPPAAASTCGRLGAGTRTSPAGGACAGSGRFVCISPRKGMKAPAGQTSKFANVTIGNTRDGSGYGNLPTVARGSTVLMGNGSHASVHGVGTVDLKFTSGKIVQLKNVQHVPSIDRNHVSGSRLTRDGFKLVFESNKVVVCKHGYFIGKGYECGGLFRFSLSDFCNKSVNHICGSVDNEANKRKLGPKTVDCVFLGYAHHSIAYRFLIVKSEVPDMHVGTIMESLDATFFESFFPMKDTHSGSSQPSEIIPSSITPPEQIEHTHEHVSEEDVCEAPRRSKRQRTAKSFGDDFTVYLVDDTPKSISEAYASPDADYWKEAVRSEMDSIIANGTWEVTERPYGCEPVGCKWVFKKKLRPDGTIEKYKARLVAKGYTQKEGEDFFDTYSPVARLTTIRVLLSLAASHGLLVHQMDVKTAFLNGELDEEIYMDQPDGFVVEGFAVNEADKCVYYRHGGGEGVILCLYVDDILIFGTNLEVINESHYVEKILNRFGYIDSKPSPTPYDPSLLLRKNKRIARNQLEYSQIIGSLMYLASATRPNISFAVSKLSRFTSNPGDDHWRALERIMRYLKGTMELGLHYIGYPAVLEGYSDSNWISNVDEIKATSGYIFTLGGGAVSWSILGDRLVEVYMHMTDAKELWDALNTKFGATDASNDLYIMEQFHDYKMADNRSVVEQAHEIQTMAKELELLKCVLPDKFVAGCIIAKLPPSWRSFGTALKHKRQEYSVEGLIASLDVEEKARKKDAASKGDGGQSSANVVHKAQNKSKGKYKAQQTTNFKKQKKNNNNPNQDERTCFVCGQVGHLVRKCPQRKGMKAPAGQTSKSANVTIGNTRDGSGYGNLPTVARGSTVLIGNGSHASVHGVGTVDLKFTSGKIVQLKNMQHVPSIDRNLVSGSRLTRDGFKLVFESNKVVVSKHVYFIGKGYECGGLFRFSLSDFCNNMCLIPKFSIVKGSKCHSCVQSKQPRKPHKAAEEINLAPLELLHSDLCEMNGVLTKEVENQLDRKIKRLRSDRGGEFFSNEFDLFCEKHGIIHERTPPYSPESNGIGERKNRTLTDLVNAMLDTAGLPKACEAPRRSKRQRTAKSFGDDFIVYLVDDTPKSISEAYASPDADYWKEAVRSEMDSIIANGTWEVTERPYGCKPVGCKWVFKKKLRPDASHGLLVHQMDVKTAFLNGELDEEIYMDQPDGFVVEGQEGKASQSMRQINVCTIAMVESHYVEKILNRFGYIDSKPSPTPYDPSLLLRKNKRIARNQLEYSQIVGSLMYLASATRPDISFAVSKLSRFTSNPGDNHWCALERVMRYLKGTVELGLHYTGYPAVLEGYSDSNWISDVDEIKATSGYVFTLGGGAVSWRSCKQTILTRSTMEAELTALDTATIEVSGTSAFDILHRLVFLSARVLRDFVDARNRE

SEQ ID NO: 20210 - protein, 1372 aa, Oryza sativa
  Clone ID: TF_OSC900219j.C1.p7.fg
MACHIGRTVYMYRSNDAFMLVFICNVMIYLWNRLNHYTSIISTIQKPYYRHCDFTMAGFADALRPDKFTGVHFKRWQIRVTLWLTAMKCFWVSTGKPEGVLTAEQQKQFEEATTLFVGCILSILGDRLVEVYMHMTDAKELWDALNTKFGATDASNDLYIMEQFHDYKMADNRSVVEQAHEIQTMAKELELLKCVLPDKFVAGCIIAKLPPSWRSFGTALKHKRQEYSVEGLIASLDVEEKARKKDAASKGDGGQSSANVVHKAQNKSKGKYKAQQTTNFKKQKKNNNNPNQDERTCFVCGQVGHLVRKCPQRKGMKAPAGQTSKSANVTIGNTGDGSGYGNLPTVFSVNQSTNWWVDTGANVHVCADISLFSSYQVARGSTVLMGNGSHASVHGVGTVDLKFTSGKIVQLKNVQHVPSIDRNLVSGSRLTRDGFKLVFESNKVVVSKHGYFIGKGYECEGLFRFSLSDFCNKSVNHICGSVDDEANVWHSRLCHINFGLMSRLSSMCLIPKFSIVKGSKCHSCVQSKQPRKPHKAAEERNLAPLELLHSDLCEMNGVLTKGGKRYFMTLIDDATRFCYVYLLKTKDEALDYFKIYKAEVENQLDRKIKRLRSDRGGEFFSNEFDLFCEEHGIIHERTPPYSPESNGIAERKNRTLTDLVNAMLDTAGLPKAWWGEALLTSNHVLNRVPNRNKDKTPYEIWIGRKPSLSYLRTWGCLAKVNVPITKKRKLGPKTVDCVFLGYAHHSIAYRFLIVKSEVPDMHVGTIMESRDATFFESFFPMKDTHSGSNQPSEIIPSSITPPEQTEHTHELVSEEDVSEAPRRSKRQRTAKSFGDDFTVYLVDDTPKSISEAYASPDADYWKEAVRSEMDSIIANGTWEVTERPYGCKPVGCKWVFKKKLRPDGTIEKYKARLVAKGYTQKEGEDFFDTYSPVARLTTIRVLLSLAASHGLLVHQMDVKTAFLNGELDEEIYIDQPDGFVVEGQEGKVCKLLKSLYGLKQAPKQWHEKFDKTLISAGFAVNEADKCVYYRHGGGEGVILCLYVDDILIFGTNLEVINEVKSFLSQNFDMKDLGVADVILNIKLIRGENGITLLQSHYVEKILNRFGYIDSKPSPTPYDPSLLLRKNKRIARNQLEYSQIIGSLMYLASATRPDISFAGYSDSNWISDVDEIKATSGYVFTLGGGAVSWKSCKQTILTRSTMEAELTALDTATVEAEWLRDLLMDLPVVEKPVPAILMNCDNQTTCEKTIEVCQEIKKLRSYNVGLHPNSEKPGRSLHEGTITKCDRQCIEGDGFETHWRQRGRVAAATGGAKGEGGMVEGVDQGRIYRQRPRGAMARLGASGAWWQQPRGGGGLVQILRPQRRQQRMAQGSQ

SEQ ID NO: 20211 - protein, 796 aa, Oryza sativa
  Clone ID: TF_OSC900421j.C1.p3.gm
MELSRGRHIQLGVAGPRSPAGPLRARPLNRRSHPHAKARTRDRGRWHQRRRNTSAISSEAAAPAGRLRALPLPSRDAHARRRGAAAESRGDYSIPLAGVHRRSGEQVSGTSTFNVLHREKAAIRVTLWLTAMKCFWVSTGKPEGVLTAEQQKQFEEATTLFVGCILSVLGDRLVEVYMHMTDAKKLWDALNTKFGATDASNDLYIMEQFYDYKMADNRSVVEQAHEIQTMAKELELLKCVLPDKFVAGCIIVKLPPSWRSFGTALKHKRQEYSVEGLIASLDVEEKAREKDAASKGDGGQSSANVVHKAQNKSKGKYKAQQTTNFKKQKKNNNNPNQDERTCFVCGQVGHLVRKCPQRKGMKAPAGQTSKSANVTIGNTGDGSGYGNLPTVARGSTVLMGNGSHASVHGVGTVDLKFTSGKIVQLKNVQHVPSIDRNLVSGSRLTRDGFKLVFESNKVVVSKHGYFIGKGYECGGLFRFSLSDFCNKSVNHICGSVDDEANVWHSHYWKEAVCSEMDSIIANGTWEVTERPYGCKPVGCKWVFKKKLRPDASHGLLVHQMDVKTAFLNGELDEEIYVDQPDGFVVEGFAVNEADKCVYYRHGGGEGVILCLYVDDILIFGTNLEVINESHYVEKILNRFGYINSKPSPTPYDPSLLLRKNKRIARNQLEYSQIIGSLMYLASATRPDISFAVSKLSRFTSNPGDDHCEDVVLQSILERTHLCELDCWSQSMKILDYSIPLAGVHWRSGEQVSGTSTFDVLHREKAAIRFLGSASRDCSLFVRDGSPSSSLACFVPS

SEQ ID NO: 20212 - protein, 318 aa, Oryza sativa
  Clone ID: TF_OSC400972j.C1.p1.fg
MGINQPMLLFEDPPQASRNKGRVQASLKPEDYTINLNHLKQYSSNERCHLTPAKRRINVTCYRCGEEGHCALDCPKKKLGNGQVRNIPRHPKRKMRAGIPPKPMPHSLYPKPMYQQFRRQGTTPHWWKGKRKRKASSRITYAELNLSKMGIEIGDLPEDVEELQLWQRKRDGCCFSCGQFGHYAIGCTQDTNEEQETLPSQIGPEKDRVPDPSKEVSKIKACSRCGEIGHYGSNCITQCPYCDEDHPNGECPTTKITCFLCEKTDHVPQDCQLSPLLTKTAEVQRVSLRFAHRLMTSRSHEDPGFPTFDLHVCLSNNI

SEQ ID NO: 20213 - protein, 212 aa, Oryza sativa
  Clone ID: TF_OSC900146j.C1.p24.fg
MWNGWPGLAWDELGPRSGCQFGLNHRRPWVKAGLKRLCNNMANNEKGNKVRSQDKGTSSSRLNEAPDTSCVAVVQHLINQNRLLKELLQQHQTPILNPSQMQPQVQLEAVQALTPQPQQPVDKTEASICVVPLDVPAQQPRNQVQDEEPECKKVIVCYNCSEEGHYSRNCPQPKRNPRHHSGHYARRRHDHNIRVTGANAEPVKPSASQKQS

SEQ ID NO: 20214 - protein, 324 aa, Oryza sativa
  Clone ID: TF_OSC400299j.C1.p12.fg
MAAAVPTGCYKCGRPGHWSRDCPSEPAGAGAASTDNPNPNPNPKPSASRFAPYPRPRFGKSAAAAAAAEGEDGSGGQAQGKKKKKERATRPKLTPDLLLSDDGLGFVLRYFPKAFKPRARPGHEVEDLGNLIKLYTDWHSRLIPYYSFDQFVRKVEKVGASNRVRRCVSELRDRVARGGDPTLLHEPPVEVIPEGEPDGATAEDPIFGTEVPATENHGVDQVQEDIDIPVESNDVDPMQEDLLNEIYNKEADEPQIPAVGGTAEETTPAMAPKEAKPQDDPPREAQNQPGKIQLTEEQRARMEANRLRALERAAAARARASQPA

SEQ ID NO: 20215 - protein, 355 aa, Oryza sativa
  Clone ID: TF_OSC10205j.C1.p1.fg
MADNKKGSMVRNQDVGTSSSRVNEAPDTSCMAVVQHLINQNKLLIEILQQHQTPILNPSQMQPQVQLEAVQALTPQVSAPPASQQAHRAMPLVDSKEARIICFICVEQGHYARNRPQQKRKAPMRTEDEVRKMTITGTEWPPPGMTKRQRRNFFRGAPQLTEHLLANGGRVSDSEDSDQVSSRDEDEKSLQGFNQNKKEHKACSRCGEIGHFASSCVTTCVPCEEDHPPDECPTSRITCFLCEGTNHVPKDCQFSFLLTKKMANQPASYNGEKHQGNPNPRQDYSFSLTPVPRQRNQNGKRKCQVWKDICCFNCQEVGHFADMCPKPRNIFASTSVHATPLNQKLAPQRIVIHAS

SEQ ID NO: 20216 - protein, 504 aa, Oryza sativa
  unsure (1)..(504): unsure at all Xaa locations
  Clone ID: TF_OSC12275j.C1.p1.np
LKTEPPTFAIAIDPMEASDWLRTVEKKLGLIQCTDQERVGFATHQLVGPASEWWNSYEASRPEGHTITWNEFQSCYFHGSIHHGVPSGNITLRKREFRYLKQGDLTVTEYLHEFYRLAHYAPEDVETDEDKQEKFLQGLKDEAVQLLLEDYEDFEKLVDKAMQLESEHNRMTNCKRRIVNIPVFPCGNQRQRTEPLQITGSSVVHQEFPRQEDGHNADNNISNTNDDDVTTNNHASCPNSDHSNQACNVNIIHQDVDDSINDGTQNDNPSNWDSEKDSDGDSNYGTTDANVSKDFQPPIPTPSQNDRPQTDSSAKKTLICYNCKEPGHYSRDCLQPRQSRPPHYRQFTRSRHPNRIVVTGANAVPVSLKGSRLKYHIVTRSIHNSRSEEYLVDKVDAKDMNYAKSGTEAPSSGAATQSKSAKGSTRDKSGEEKIPSATGDRAKQSRVEKFCXASLLXKTRRKKSTKKRRPPNLSSCXPPESRGRDSCKGGGFVTSXXIHPKIKN

SEQ ID NO: 20217 - protein, 265 aa, Oryza sativa
  Clone ID: TF_OSC13326j.C1.p2.gm
YLHEFYRLAHYAPEDVETDEDKQEKFLQGLKDELAVQLLLEDYENFEKLVDKAMQLESEHNRMTNCKRRMVNNPVFPGGNQRQRTEPLQITGSSVVYQEFLPQEDERNADNNNSTTNADNTTNHHGSCPIHDHLDQACNVNSIHQDIDDSINEGTQNDNPSNFDSEKDSNGDSNYGTTDANVSKDFQPPTPTPSQNDRPQTDSSAKKTLICYNCKEPGHYSRDCLQPRQNRPPHYRQFTRSRHSNRIVVTGANAVPVRPRVNQNP

SEQ ID NO: 20218 - protein, 501 aa, Oryza sativa
  Clone ID: TF_OSC14131j.C1.p1.np
VIWQRVGALLLGAQFRLPVPGIPAVGGIGSVLLSKARMGWKLCHVFRPYTVVMDNTGNKGYGNDGSDDSRTQANGNERSINETSPELIQVVVNQTNMLATAFQLLQNWNNPAGATNVQVPTVQQQCKLSEFLKTEPPTFAIAVDPMEASDWLRTIEKKLGLIQCTDQERVGFATHQLVGPASEWWDSYEASRPEGHTITWNEFSSVFRRSHVPAGMITLRKREFRYLKQGDLTVTEYLHEFYRLAHYAPEDVETDEDKQEKFLQGLKDELAVQLLLEDYEDFEKLVDKAMQLESEHNRMTNCKRRIVNIPVIPCGNQRQRTEPLQITGSSVVHQEFLLQEDGRDADNNTSNTNDDDTTNNHGSCPISDHSNKACNVSSIHQDVNDSINVGTQNDNLSNFDTEKDSNGDSNYGTTDANVSKDWQPPIPTPSQNDRPQTDSSAKKTLICYNCKEPGHYSRDCLQPRQNRPPHYRQFTRIRHPNPIGGTGANTVPVRPCGNQKP

SEQ ID NO: 20219 - protein, 446 aa, Oryza sativa
  Clone ID: TF_OSC15236j.C1.p1.fg
MDNTGNKGYGNDGSDDSRTQANGNEKSINETSPELIQIVVNQTNMLATAFQLLQNRKNPAGATNVQVPTVQRQCKLSEFLKTDPPTFAIAVDPMEACDWLRTVEKKLGLIQCTDQERVVFATHQLVRPASEWWDSYEASRPEGHTITWDEFSAVFKRSHVPVGMITQRKREFRYLKQEDLTVTEYLHEFYCLAHYAPEDVETDEDKQEKFLHGLKDEIAVQLLLEEYEDFEKLVDKAIQLESEHNRMKNCKRRIVSIPVFPCGNQRQRTEPLQITGSSVAHQEFLPQEDGHNADNNISNTNDDDTTNNHASCPISDHSNQACNVNIIHQGVDDSINDGTQNDNPSNCDSEKDSNGDSNYGTTDANVSKDFQPPIPTPSQNDRPQTDSSAKKTLICYNCKEPGHYSRDCLQPRQSRPPHYRQFTRSRHPNRIVVTGANAVPVRPRVN

SEQ ID NO: 20220 - protein, 787 aa, Oryza sativa
  Clone ID: TF_OSC15753j.C1.p3.np
MDNTGNKGYGNDGSDDSRTQANGNERSINETSPELIQVVVNQTNMLATAFQLLQNWNNPAGATNVQVPTVQQQCKLSEFLKTEPPTFAIAVDPMEASDWLRTIEKKLGLIQCTDQERVGFATHQLVGPASEWWDSYEASRPEGHTITWNEFSSVFRRSHVPAGMITLRKREFRYLKQGDLTVTEYLHEFYRLAHYAPEDVETDEDKQEKFLQGLKDELAVQLLLEDYEDFEKLVDKAMQLESEHNRMTNCKRRIVNIPVIPCGNQRQRTEPLQITGSSVVHQEFLLQEDGRDADNNTSNTNDDDTTNNHGSCPISDHSNKACNVSSIHQDVNDSINVGTQNDNLSNFDTEKDSNGDSNYGTTDANVSKDFQPPIPTPSQNDRPQTDSSAKKTLICYNCKEPGHYSRDCLQPRQNRPPHYRQFTRIRHPNRIVVTGANTVPVSLKGSKPKDLIVPRSVRNPRHEVGNLYEVDSKDMNYESSGTESPSSSAATQSKSAKGSTRDKSGEEKIPSAPRARAPLTGGPARPLTGGTHLSSPSPAAPAAARALAPPPPPNPPLPAFPARHKEGRITPRVSLSRFPLFSLSLSLGFVRFESRNHRRRLQWRPRSPRAIPSSPAPSLPSDAIKSSLVLRSSVSAARRSSRRRFRARPCSSLSAVAAELRFAAVVAPVLLPTRPTSIGFPSGCRPRPPLRFARRAGAPSSSSSRTARRFPPLRPPFSSSSLSRGEPDRRSLSPFPPLSRAPLHRAESPAVTIGARARRSRRPCRRVGFSPLLLLGLLGPFPLLRVF

SEQ ID NO: 20221 - protein, 798 aa, Oryza sativa
  Clone ID: TF_OSC16364j.C1.p1.np
MDNTGNKGYGNDGSDDSRTQANGNERSINETSPELIQVVVNQTNMLATAFQLLQNWNNPAGATNVQVPTVQQQCKLSEFLKTGPPTFAMAVDPMEASDWLRTIEKKLGLIQCTDQERVGFATHQLVGPASEWWDSYEASRPEGHTITWNEFSSVFKRSHVPAGMITLRKREFRYLKQGDLTVTEYLHEFYRLAHYAPEDVETDEDKQEKFLQGLKDELAVQLLLEDYENFEKLVDKAMQLESEHNRMTNCKRRIVNIPVFPCGNQGQRTEPLQITGSSVAHQEFPPQEDGHNADNNISNTNDDDVTTNNHASCPNSDHSNQACNVNIIHQDVDDSINDGTQNDNPSNWDSGKDSDGDSNYGTTDANVSKEFQPPIPTPSQNDCPQTDSSAKKTLICYNCKEPGHYSRDCLQPRQSRPPHYRQFTRSRHPNRIVVTGANAVPVSLKGSKPKDLIVPRSVRNPHKEYHLLEVDAKDMNYEKSGTEVPSSSATIQSKSARGATREKSGEEKIPSATPARAPLTGGPARPLTGGAHPSSPPRAAPAARPCPRPPPPPNPPHPAVPARHKEGEITPRDSLSLPPFFPLSLSLGFVWNLSRNPRRRHLEPRSPRRFPSHPAALSPSRRYIIVPRASLLRPPLAALSLRRNRARRRPLSPPSPTSSGSPPPSLRTSSPLGVASFVAASSSTPSAPPFRPPTAGTSPSSSINRAAAPPLRSSFPPSSSSRGEPRTAFASLFPPLSRPRSAAPLAAATIGARVRRLPSAVPARPPSGAPRGCQVGPAVSRPRPRVRLTRGTHGAGRR

SEQ ID NO: 20222 - protein, 449 aa, Oryza sativa
  Clone ID: TF_OSC23023j.C1.p1.fg
MDNTGNKGYGNDGSDDSRTQANGNEKSINETSPELIQIVVNQTNMLATAFQLLQNWNNPAGATNVQVPTVQQQCKLSEFLKTEPPTFAIAVDPMEASDWLRTIEKKLGLIQCTDQERVGFATHQLVGPASEWWDRYEASRPEGHTITWNEFSSVFRRSHVPAGTITLRKREFRYLKQGDLTVTEYLHEFYRLAHYAPEDVETDEDKQEKFLQGLKDELAVQLLLEDYENFEKLVDKAMQLESEHNRMTNCKRRMVNNPVFPGGNQRQRTEPLQITGSSVVYQEFLPQEDERNADNNNSTTNADNTTNHHGSCPIHDHLDQACNVNSIHQDIDDSINEGTQNDNPSNFDSEKDSNGDSNYGTTDANVSKDFQPPTPTPSQNDRPQTDSSAKKTLICYNCKEPGHYSRDCLQPRQNRPPHYRQFTRSRHSNRIVVTGANAVPVRPRVNQNP

SEQ ID NO: 20223 - protein, 520 aa, Oryza sativa
  Clone ID: TF_OSC28035j.C1.p1.fg
MDISRTNEGYTSCGPVVEMSWHRAGVLLLGAHSCLPVPEVPAVGGVGSVLLFMARMGWELCHVFRPYTVVMDNTGNKGYGNDGSDDSRTQASGNEKSINETSPELIQIVVNQTNMLATAFQLLQNWNNPAGATNVQVPTVQQQCKLSEFLKTEPPTFAIAVDPMEASDWLRTVEKKLGLIQCTDQERVGFATHQLVGPASEWWDSYEASRPEGHTITWNEFSSVFKRSHVPAGMITLRKREFRYLKQGDLTVTEYLHEFYRLAHYAPEDVETDEDKQEQFLQGLKDELAVQLLLEDYEDFEKLVDKAMQLESEHNRMTNCKRRMVNIPVFPCGNQGQRTEPLQITGSSVAHQEFPPQEDGHNADNNISNTNDDDVTTNNHASCPNSDHSNQACNVNIIHQDVDDSINDGTQNDNPSNWDSEKDSDGDSNYGTTDANVSKDFQPPIPTPSQNDRPQTDSSAKKTLICYNCKEPGHYSRDCLQPRQSRPPHYRQFTRSRHPNRIVVTGANAVPVRPRVNQNP

SEQ ID NO: 20224 - protein, 316 aa, Oryza sativa
  Clone ID: TF_OSC28035j.C1.p3.gm
MDISRTNEGYTSCGPVVEMSWHRAGVLLLGAHSCLPVPEVPAQGDLTVTEYLHEFYRLAHYAPEDVETDEDKQEQFLQGLKDELAVQLLLEDYEDFEKLVDKAMQLESEHNRMTNCKRRMVNIPVFPCGNQGQRTEPLQITGSSVAHQEFPPQEDGHNADNNISNTNDDDVTTNNHASCPNSDHSNQACNVNIIHQDVDDSINDGTQNDNPSNWDSEKDSDGDSNYGTTDANVSKDFQPPIPTPSQNDRPQTDSSAKKTLICYNCKEPGHYSRDCLQPRQSRPPHYRQFTRSRHPNRIVVTGANAVPVRPRVNQNP

SEQ ID NO: 20225 - protein, 266 aa, Oryza sativa
  Clone ID: TF_OSC32072j.C1.p1.fg
YLHEFYRLAHYAPEDVETDEDKQEKFLQGLKDELAVQLLLEDYEDFEKLVDKAMQLKSEHNRMTNCKRRIVNIPVFPGGSQRQRTEPLQITGSSVVHQEFLPQEDERNADNNTSNTNDDDTTNNHGSCPISDHSNKACNVSSIHQDVNDSINVGTQNDNLSNFDTEKDSNGDSNYGTTDANVSKDFQPPIPTPSQNDRPQTDSSAKKTLICYNCKEPGHYSRDCLQPRQNRPPHYRQFTRSRHPNRIVVTGANAVPVKPSASQKQP

SEQ ID NO: 20226 - protein, 1073 aa, Oryza sativa
  Clone ID: TF_OSC400220j.C1.p47.fg
MARGSAPLDGSVLPPSRIVSERQAGLPRRFMPESATGREIVSLGEGCPAPHYPGRSVFFLPFAMAWLVPPFSFFFMDVLEFYDLQMAHLTPNAVMTLAIFAHLCEMFIGVQPVSPPSVVGGCYFQLRGPVLNRYIPCVLRKKWDDWKSDWFYTPLADEARLRLPSQPLAQAYSWRVPVDLGDGYDAVLDRLAGLRSQGLTGAMEYTGSEDCMRTHQGVRWDWAPEDFKIVVQRVLNLSSMETSLIPQGVLPLCSDPDRASILTIMQAVGASEERAPRGHDGAGGSRRGEQSTPGGGRASGPRDGGPGSGRPADTRGKRKQEGTPPPSPPRGGGAARASSRRPEVATPTSQPEGERKKKRLRKMGGTEPSRGNLISPPRWSFNRPPRSEIPSRPSRHSKSGQSKAEDPATTEARRRESDRREAADRLREAEEAAQQLVDKAIRLEDKKNRMDNRKRKIIVFQEAQDSSQRQRIKPLQIGESFSAGQEQSQQLGMNGEINSETNASNEDNDEQATQSVSFQQDQSREDNSNGREQRVCFNCYKPGHFVRECPKPKHQQPQVNNIVVTGANAVPVASSRVASSSVTAQLPVSKQHEFPGVTATTSEAARDEAAGASLGPTPSGDAQDKPGPGDIPESGTSIGGPSRAASSPRRLFPTPSVAPLSAEPLLQALAVANTTVLDGLSAQVEALQAERAELDAAWARVEEGRRSVEAMVEVGRKAHRRHVSELEARRKVLGEIAKEVEEERGAALIATTVMNEAQDTLRLQYRSWEAELGKKLDAARMVLDAAAARERRAAETEVASRRREEALEARAMALEERACAVERDLADREAAVAIREVTLAVHEAACAEEESALRLREDALTERERALEEAEAAAQRLADSLSLREAAQEEQARRNLESARAERAALNQRAAELEAQARELDARARSGGAATGDSDLAARLAAAEHTIADLQGALDSSTGEVEALRLAGEIGPSMLRDAVSRLDRAGRQAGLWGGRTVKYAANQGGLAQRLSEMAGTLQRLPEELEGTIKSSSRDLARGAVELVLASYQARDPDFSPWTALDEFPPGTEDGARA

SEQ ID NO: 20227 - protein, 502 aa, Oryza sativa
  Clone ID: TF_OSC401338j.C1.p7.fg
MSWQRVGALLLGAQSCLPVPGVPAVGGIGSVLLSMARMGWKLCHVFRLYTVVMNNTGNKGYGNDGSDDSRTQANGNERSINETSPELIQVVVNQTNMLATAFQLLQNWNNPARATNVQVPTVQQQCKLSEFLKTGPPTFAMAVDPMEASDWLRTVEKKLGLIQCTDQERVGFATHQLVGPASEWWDSYEASRPEGHTITWNEFSSVFKRSHVPAGMITLRKREFRYLKQGDLTVTEYLHEFYRLAHYAPEDVETDEDKQEKFLQGLKDELAVQLLLEDYEDFEKLVDKAMQLKSEHNRMTNCKRRIVNIPVFPGGSQRQRTEPLQITGSSVVHQEFLPQEDERNADNNTSNTNDDDTTNNHGSCPISDHSNKACNVSSIHQDVNDSINVGTQNDNLSNFDTEKDSNGDSNYGTTDANVSKDFQPPIPTPSQNDRPQTDSSAKKTLICYNCKEPGHYSRDCLQPRQNRPPHYRQFTRSRHPNRIVVTGANAVPVKPSASQKQP

SEQ ID NO: 20228 - protein, 1069 aa, Oryza sativa
  Clone ID: TF_OSC401835j.C1.p9.fg
MAGFADALRPDKFTGVYFKRWQIRVTLWLTAMKCFWVSTGKPMGVLNVDQQKEFDEATTLFVGCILSMLGDRLVEVYMHMTDAKELWNALNTKFGATDASNDLYIMEQFHDYKMADNRSVVEQAHEIQTMAKELELLKCVLPDKFVAGCIIAKLPPSWRGFGTALKHKTQEYSVEGLIASLDVKEKSREKDAASKGDGGQSTANVVHKAQNKSKGKYKAQQATNFKKKNNSNNPNQDEMTCFVCGQPGHLVRKCPQRKGMKAPAGQTSKSANVTIGNTGDGSGYGANVHVCADISLFSSYQVARGSTVLLGNGLHASVHGVGTVDLKFTSGKIVQLKNVQHVPSIDRNLVSGSRLTRDGFKLVFESNKVVVSKHGYFIGKDYECRGLFRFSLSDFYNKSMNHICGSVGDEANAAEERNLAPLELLHSDLCEMNRVLTKGGKRYFMMLIDDATRFCYVYLLKTKDEALDYFKIYKAEVENQLDRKIKRLRSDRGGEFFLNEFDLFCEEHGIIHERTPPYSPESNGIAERKNRTLTDLVNAMLDTAGLPKAWWGEALLTSNHVLNRVPNRNKDKTPYEIWIGRKPSLSYLRTWGCLVKVNVPITKKRKLGPKTVDCVFLGYAHHSIAYRFLIVKSESISEAYASPDADYWKEAVRSEMDSIIANGTCEVIERLYRCKPVGCKWVFKKKLRPDGTIEKYKARLVAKGYTQKEGEDFFDTYSPVARLTTIRVLLSLVASHGLLVHQMDVKTAFLNGELDEEIYMDQPDGFVVEDQEGKVCKLLKSLYGLKQAPKQWHEKFDKTLTSAGFAVNEADKCVYYRHGGGEGVIMCLYVDDILIFGTNLEVINEVKSFLSQNFDMKDLGVADVILNIKLISGENGITLLQSHYVEKILNHFGYIDSTMELGLHYSGYPAVLEGYSDSNWISDVDEIKATSGYVFTLGGGAVSWRSCKQTILTRSTMEAELTALDTATVEAEWLHDLLMDLPIVEKPVPAILMNCDNQTVIVKVNSSKDNMKSSRHVKRRLKSVRKLRNSGVITLDYIQTARNLADPFMKGLSRNVIDNASKEMGLRLV

SEQ ID NO: 20229 - protein, 527 aa, Oryza sativa
  Clone ID: TF_OSC401912j.C1.p1.fg
MDEVGGRWTFSRANEGYTSCGPVVEMSWHRVGALLLGAQSCLPVPEVPAVGGIGSVLLCMARMGWKLCHVFRLYTVVMDNTGNKGYGNDGSDDSRTQANGNERSINETSPELIQVVVNQTNMLATAFQLLQNWNNPAGATNVQVPTVQQQCKLSEFLKTGPPTFAMAVDPMEASDWLRTIEKKLGLIQCTDQERVGFATHQLVGPASEWWDSYEASRPEGHTITWNEFSSVFKRSHVPAGMITLRKREFRYLKQGDLTVTEYLHEFYRLAHYAPEDVETDEDKQEKFLQGLKDELAVQLLLEDYENFEKLVDKAMQLESEHNRMTNCKRRIVNIPVFPCGNQGQRTEPLQITGSSVAHQEFPPQEDGHNADNNISNTNDDDVTTNNHASCPNSDHSNQACNVNIIHQDVDDSINDGTQNDNPSNWDSGKDSDGDSNYGTTDANVSKEFQPPIPTPSQNDCPQTDSSAKKTLICYNCKEPGHYSRDCLQPRQSRPPHYRQFTRSRHPNRIVVTGANAVPVRPRVNQNP

SEQ ID NO: 20230 - protein, 644 aa, Oryza sativa
  Clone ID: TF_OSC401952j.C1.p2.fg
MYTSDQSKSIRIAEPSDMGKPSNVPKSVFQFLKFAQQLKCGMVGLGWLGTSWDPGSGCQFGLNHRRPWVKAGLKRLCNNMDNTGNKGYGNDGSDDSRTQANGNERSTNETSPELIQVVVNQTNMLATAFQLLQNWSSPAGATNVQVPTVQQQCKLSEFLKTEPPIFAIAVDPMEASDWLRTIEKKLGLIQCTDQERVGFATHQLVGPASEWWDSYEASRPEGHTITWNEFSSVFRRSHVPAGMITLRKREFRYLKQGDLTVTEYLHEFYRLARYAPEDVETDEDKQEKFLQGLKDELAVQLLLEDYEDFEKLVDKAMQLESEHNRMTNCKRRIVNIPVIPCGNQRQRTEPLQITGSSVVHQEFLPQEDGRNADNNTSNTNDDDTTNNHGSCPISDHSNKACNVSSIHQDVNDSINVGTQNDNLSNFDTEKDSNGDSNYGTTDANVSKDFQPPIPTPSQNDRPQTDSSAKKTLICYNCKEPGHYSRDCLQPRQNRPPHYRQFTRSRHSNCIVVTGANAVPAKSEIFNSVSDATRSEKCKHRLPGNAMTWEDDPMGKNTSSGNLSEVDSEDMNHEKFWNGSITELPQPSLSQPKGAPWSKLGEEKIPSATGGQAKQFRVVKFCWKFVKTQRKKSDKKRRPPNLSSC

SEQ ID NO: 20231 - protein, 538 aa, Oryza sativa
  Clone ID: TF_OSC401984j.C1.p8.fg
MSWQRVGALLLGGSVLPACPGCPGRRGIGSVLLFMARMGWELCHVFRPYTVVMDNTGNKGYGNDGSDDSRTQANGNEKSINETSPELIQIVVNQTNMLATAFQLLQNRNNPAGATNVQVPTVQQQCKLSEFLKTGPPTFAMAVDPMEASDWLRTIEKKLGLIQCTDQERVGFATHQLVGPASEWWDSYEASRPEGHTITWNEFSSVFKRSHVPAGMITLRKREFRYLKQGDLTVTEYLHEFYRLAHYAPEDVETDEDKQEKFLQGLKDELAVQLLLEDYEDFEKLVDKAMQLESEHNRMTNCKRRIVNIPVFPGGNQRQRTEPLQITGSSVAHQEFPPQEDGRNTDNNTSNTNDDDTTNNHGSCPISDHSNKACNVSSIHQDVNDSINVGTQNDNLSNFDTEKDSNGDSNYGTTDANVSKDSQPPIPTPSQNDRPQMDSSVKKTLICYNCKEPGHYSRDCLQPRQSRPPHYRQFTRSRHPNRIVVTGANAVPVDAKDMNYEKSGTEVPSSSATIQSKSARGATREKSGEEKIPSATGD

SEQ ID NO: 20232 - protein, 514 aa, Oryza sativa
  Clone ID: TF_OSC407179j.C1.p2.np
MDNTGNKGYGNDGSDDSRTQANGNERSTNETSPELIQVVVNQTNMLATAFQLLQNWNNPAGATNVQVPTVQQQCKLSEFLKTEPPTFAIAVDPMEASDWLRTIEKKLGLIQCTDQERVGFATHQLVGPASEWWDSYEASRPEGHTITWNEFSSVFRRSHVPAGMITLRKREFRYLKQGDLTVTEYLHEFYRLARYAPEDVETDEDKQEKFLQGLKDELAVQLLLEDYEDFEKLVDKAMQLESEHNRMTNCKRRIVNIPVIPCGNQRQRTEPLQITGSSVVHQEFLPQEDGRNADNNTSNTNDDDTTNNHGSCPISDHSDKACNVSSIHQDVNDSINVGTQNDNLSNFDTEKDSNGDSNCGTGDANVSKDFQPPIPTPSRNDRPQMDSSAKKTLICYNCKEPGHYSRDCLQPRQNRPPHYRQFTRIRHPNRIVVTGANAVPVSPKGSKPKDLIVPRSVRNPHKEYHLLEVDSEDMNHEKFGNGSITELPQPSLSQPKGAPWSKSGEEKIPSATGG

SEQ ID NO: 20233 - protein, 203 aa, Oryza sativa
  Clone ID: TF_OSC413099j.C1.p8.hg
MKNCKRRIVSIPVFPCGNQRQRTEPLQITGSSVAHQEFPPQEDGHNADNNISNTNDDDTTNNHASCPISDHSNQACNVNIIHQGVDDSINDGTQNDNPSNCDSKKDSNGDSNYGTTDANVSKDFQPPIPTPSQNDRPQTDSSAKKTLICYNCKEPGHYSRDCLQPRQSRPPHYRQFTRSRHPNRIVVTGANAVPVRPRVNQNP

SEQ ID NO: 20234 - protein, 264 aa, Oryza sativa
  Clone ID: TF_OSC900009j.C1.p8.fg
MPKPPLSPEEEAKFEAADCLFCGALISVLTDNIVDVYMHMPLGKNMWDALEAKFGLSDAGSELYIMEQFYDYKMMLAKELENNNCELPDKFVAEGIIAKLPPSCSDFATSLKHKRQGFSVTDLIGFLGVEEKGRAKDNRGKVIEGGSTANLVQKTNPHASYNNKKKVKPDVKPKATTNFKKKGKGKAKSDCFVCGKPGHWVKNCPERKDKKSANMVISEGGETLGYGACLATMTQVGPYPLSFSLGLGSKLVSRQGFPNPGVRT

SEQ ID NO: 20235 - protein, 371 aa, Oryza sativa
  Clone ID: TF_OSC101565j.C1.p1.fg
MVNTRASGSENNNNEGNPTLAQVLAQQTQLMNMMIQQMQNQLNQGNNNAPLPQNKLADFLLVRPPTFSSTTNPVEAGDWLHTIEKKLELLQCTDQEKVVFASHQLQGPASEWWDHFRMNRAEGQPITWEEFTEGFKKTHIPVGVVALKKREFRALKQKDHTVAEYLHEFNRLARYAPEDVRTDEERQEKFLEGLKDELSVTLISHDYVDFQQLVDKAIRLEDKKNRMDNRKRKMTVFQEAQGSSQRQRIKPLQIGESFPAGPGQSQQLNIGGEIKLETNESKEVNIEQANQPVLVQQGQSQENNSSGREQQVCFNCYKPGHFARECPKPKHQQPQGQVNNIVVTGANAVPVASSRVVSSSVTTQPPVSKRQ

SEQ ID NO: 20236 - protein, 394 aa, Oryza sativa
  Clone ID: TF_OSC14497j.C1.p1.fg
VACLINLNNIMNYTHQISGNLVKMVNTRASGSGNNNNEENPTFAQVLAQQTQLINLLVQQMQNQQGNNNVNPPPPQNKLVDFLRVKPPTFSSTTNPVEAGDWLHAVEKKLELLQCTDQEKVVFASHQLQGSASEWWDHFRMNRAEGQPITWAEFTEAFKKTHIPAGVVALKKREFRALKQKDRTVTEYLHEFNRLARYAPEDVRTDEERQEKFLEGLKDELSVMLISHDYEDFQELVDKAIRLEDKKNRMDNRKRKMTVFQEAQGSRQRQRIEPLQIGESFSAGQGQSQQLNIGGEIESETNESNEVNIEQANQPVPVQQDQSQENNSSGREQQVCFNCYKPGHFARECPKSKHQQPQGQVNNIVVTGANAVPVASSRVAFSRDTAQPPVSKQQ

SEQ ID NO: 20237 - protein, 371 aa, Oryza sativa
  Clone ID: TF_OSC14970j.C1.p1.fg
MVNTRASRSGNNNNEGNPTLAQVLAQQTQLMNMMIQQMQNQLNQGNNNAPPPQNKLADFLRVRPPTFSSTTNPVEAGDWLHAIEKKLELLQCTDQEKVVFASHQLQGPASEWWDHFRMNRAEGQPITWAEFTEAFKKTHIPAGVVALKKREFRALKQKDRTVTEYLHEFNRLARYAPEDVRTDEERQEKFLEGLKDELSVMLISHDYEDFQELVDKAIRLEDKKNRMDNRKRKMTVFQEAQGSSQRQRIKPLQIGEPFSAGQGQSQQLNIGGEIKSETNESNEVNIKQANQPVPVQQDQSQENNSSGRKQQVCFNCYKPGHFARECPKPKHQQPQGQVNNIVVTGANAVPVASSRVVSSSVAAQPPVSKQQ

SEQ ID NO: 20238 - protein, 371 aa, Oryza sativa
  Clone ID: TF_OSC15152j.C1.p2.fg
MVNTRASGSGNNNNEENPTFAQVLAQQTQLINLLVQQMQNQQGNNNVNPPPPQNKLVDFLRVKPPTFSSTTNPVEAGDWLHAVEKKLELLQCTDQEKVVFASHQLQGSASEWWDHFRMNRAEGQPITWAEFTEAFKKTHIPAGVVALKKREFRALKQKDRTVTEYLHEFNRLARYAPEDVRTDEERQEKFLEGLKDELSVMLISHDYEDFQELVDKAIRLEDKKNRMDNRKRKMTVFQEAQGSRQRQRIEPLQIGESFSAGQGQSQQLNIGGEIESETNESNEVNIEQANQPVPVQQDQSQENNSSGREQQVCFNCYKPGHFARECPKSKHQQPQGQVNNIVVTGANAVPVASSRVAFSRDTAQPPVSKQQ

SEQ ID NO: 20239 - protein, 371 aa, Oryza sativa
  Clone ID: TF_OSC23005j.C1.p1.fg
MVNTRASGSGNNNNEENPTLAQVLAQQTQLINMLVQQMQNQQGNNNVNPPPPQNKLADFLRVRPPTFSSTTNPVEAGDWLHAVEKKLELLQCTDQKKVVFASHQLQGSASEWWDHIRMNRAEGQPITWAEFTEAFKKTHIPAGVVALKKREFRALKQKDHTVAEYLHEFNRLARYAPEDVRTDEERQEKFLEGLKDELSVMLISHDYEDFQELVDKAIRLEDKKNRMDNRKRGRIVFQEAQDSSQRQRIKPLQIGESFSTGQGQSQQLNIGGEIKSETNESNEVNIEQANQPVPVQQDQSQENNSSGREQQVCFNCYKPGHFARECPKPKHQQPQGQINNIVVTGANAVPVASSRVASSSVTAQPPVSKQQ

SEQ ID NO: 20240 - protein, 371 aa, Oryza sativa
  Clone ID: TF_OSC28072j.C1.p3.fg
MVNTRANGSGNNNNEGNPTLAQVLAQQTQLMNMMIQQMQNQLNQGNNNAPPPQNKLTDFLRVRPPTFSSTTNPVEAGDWLHTIEKKLELLQCTDQEKVVFASHQLQGPASEWWDHFRMNKAEGQPITWAEFTEAFKKTHIPAGVVALKKREFRALKQKDRTVTEYLHEFNRLARYAPEDVRTDEERQEKFLEGLKDELSVMLISHDYEDFQELVDKAIRLEDKKNRMDNRKRRMTVFQEAQGSSQRQCIKPLQIGESSSAGQGQSQQLNIGGEIKSETNESNEVNIEQANQPVPVQQDQSQENNSSGRKQQVCFNCYKPGHFARECPKPKHQQPQGQVNNIVVTGANAVPVASSRVVSSSVTTQPPVSRQQ

SEQ ID NO: 20241 - protein, 371 aa, Oryza sativa
  Clone ID: TF_OSC29458j.C1.p6.np
MVNTRASGSGNNNNEGNPTLAQVLAQQTQLMNMMIQQMQNQLNQWNNNAPPPQNKLADFLRVRPPTFSSTTNPVEAGDWLHAIEKKLELLQCTDQEKVVFASHQLQGPASEWWDHFRMNRAEGQPITWADFTEAFKKTHIPTGVVSLKKREFRALKQKDQTVAEYLHEFNRLARYAPEDVRTDEERQEKFLEGLKDELSVTLISHDYADFQQLVDKAIRLEDKKNRMDNRKRKMTVFQEAQGSSQRQRIKQLQIGESSSAGQGQSQQLNIGGEIKTETNESNEVNIEQANQLVPVQQDQSQENNSSGREQQVCFNCYKPGHFARECPKPKHQRPQGQVNNIVVTGANAVPVASSRVVSSSVTTQPPVSKQQ

SEQ ID NO: 20242 - protein, 343 aa, Oryza sativa
  Clone ID: TF_OSC400483j.C1.p11.fg
MVNTRASGSGNNNNEGNPTLAQVLAQQTQLMNMMIQQMQNQLNQGNNNAPPPQNKLTDFLRVRPPTFSSTTNPVEAGDWLHAVEKKLELLQCTDQEKVVFASHQLQGPASEWWDHFRMNRAEGQPITWEEFTEGFKKTHIPVGVVALKKQDVRTDEERQEKFLEGLKDELSVTLISHDYVDFQQLVDKAIRLEDKKNRMDNRKRKMIVFQEAQGSSQRQRIKPLQIGESSSAGQGQSQQLNIAGEIKSETNESNEVNIEQINQPMPVQQDQSRENNSSRREQQVCFNCYKPGHFARECPKPKHQQPQGQVNNIVVTGANAVPVVSSRVASSSVTAQPLVSKRQ

SEQ ID NO: 20243 - protein, 371 aa, Oryza sativa
  Clone ID: TF_OSC400718j.C1.p68.fg
MVNTRASGSGNNNNEGNPTLAQVLAQQTQLMNMMIQQMQNQLNQGNNNAPPPQNKLADFLRVRPPTFSSTTNPVEAGDWLHAVEKKLELLQCTDQEKVVFASHQLQGPASEWWDHFRMNRAEGQPITWADFTEAFEKTHIPTGVVSLKKREFRALKQRDHTVAEYLHEFNRLARYAPEDVRTDEERQEKFLEGLKDELSVTLISHDYVDFQQLVDKAIRLEDKKNRMDNRKRKMTVFQEAQGSSQRQRIKPLQIGESFSTGQGQSQPLNIGGEIKSKTNESNEVNIEQANQPVPVQQDQSQVNNSSGREQQVCFNCYKPGHFARECPKPKHQQPQGQVNNIVVTGANAVPVASSRVVSSSVTTQPPVSRQQ

SEQ ID NO: 20244 - protein, 367 aa, Oryza sativa
  Clone ID: TF_OSC401076j.C1.p10.fg
MVNTRASGSGNNNNEGNPTLAQVLAQQTQLMNMMIQQMQNQLNQGNNNAPPPQNKLTDFLRVRPPTFSSTTNPVEAGDWLHTIEKKLELLQCTDQEKVVFASHQLQGPASEWWDHFRMNRAEGHPKFTEAFKKTHIPAGVVALKKREFRALKQKDRTVTEYLHEFNRLARYAPEDVRTDEERQEKFLEGLKDELSVTLISHDYEDFQELVDKAIRLEDKKNRMDNRKRRMTVFQEAQGSSQRQCIKPLQIGESFSAGQGQSQQLNIGGEIKSETNESTEVNIEQANQPVPVQQDQSQENNSSGREQQVCFNCYKPGHFARECPKPKHPQPQGQVNNIVVIGANAVSVASSRVVSSSVTAQPPVSRQQ

SEQ ID NO: 20245 - protein, 734 aa, Oryza sativa
  unsure (1)..(734): unsure at all Xaa locations
  Clone ID: TF_OSC401130j.C1.p19.np
ALVAAVVAVGSAAPRRRCSRRRRSPSPPSGAKSSPSPSTASPPPKTVGAPSPSSTRRASPLPPRPAVRWSSAAVLVTGEFAASSSTXAHGGRWGVHALFYKGDYDPGMVRCGGLCYARGTVTAPFRGTVVVLRHMVTXCGAVSCGYSVAYLLCGLLSMSYAHCNNQSTSVETSCEGEDVWLIPQLSCLWEWSRSFARFYFSAAIFFLVRTKCLISKYLSFVNLMNLYIKLSICVPRLIPGRGFYAQISSEITSEFPGVTSWYRAISTVGXAKWSNLKDXFSENMMCEFSFLPSLEFSINHFIILSPPAFNLSSLKLVVETRRCXXGLLMEVSQVDRGRTEVPSGQDGMKFGSYLRTYAAKVSLKNSXXGRTLVACLCVGMVAFPSLEXFIDECVTILGNPNPSPPISSYLQXMVNTRANGSGNNNNEGNPTLAQVLAQQTQLMNMMIQQMQNQLNQGNYNAPPPQNKLTDFLRVRPPTFSSTTNPVEAGDWLHAIEKKAEGQPITWAEFTEAFKKTHIPAGVVALKKREFRALKQKDRTVMEYLHEFNRLARYAPEDVRTDEERQEKFLEGLKDELSVMLISHDYEDFQELVDKAIRLEDKKNRMDNRKRRMTVFQEAQGSSQRQSNDELNIEQANQLVPVQQDQSQVNNSSGREQQVCFNCYKPGHFARECPKPKHQQLQGQVNNIEVKTPKAKAKSATHEIDSIALVDRKLDATPTWRANCRNMNSAIIKGV

SEQ ID NO: 20246 - protein, 377 aa, Oryza sativa
  Clone ID: TF_OSC401143j.C1.p24.fg
MVNTRASGSGNNNNEGNPTLAQVLAQQTQLMNMMIQQMQNQLNQGNNNAPPPQNKLADFLRVRPPTFSSTTNPVEAGDWLHTIEKKLELLQCTDQEKVVFASHQLQGPASEWWDHFRMNRAEGQPITWEEFTEGFKKTHIPVGVVALKKREFRALKQKDHTVAEYLHEFNRLARYAPEDVRTDEERQEKFLEGLKDELSVTLISHDYADFQQLVDKAIRLEDKKNRMDNRKRRMTVFQEAQGSSQRQCIKPLQIGEPSSAGQGQSQQLNIGGEIKSETNESNKVNIEQANQPVPVQQDQSQENNSSGREQQVCFNCYKPGHFARECPKPKHQQPQGQVNNIVVTGANAVPVASSRVASSSVAAQPPVSKRQQFSLKP

SEQ ID NO: 20247 - protein, 398 aa, Oryza sativa
  Clone ID: TF_OSC401827j.C1.p24.fg
MEFFANHFIILSPPAFNLSSSKTLELEDANEVYLWSGNNNNEGNPTLAQVLAQQTQLMNMMIQQMQNQLNQGNNNAPPPQNKLADFLRVRPPTFSSTTNPVEAGDWLHAIEKKLELLQCTDQEKVVFASHQLQGPASEWWDHFRMNRAEGQPITWAEFTEAFKKTHIPAGVVALKKREFRALKQKDRTVTEYLHEFNRLARYAPEDVCTDEERQEKFLEGLKDELSVTLISHDYVDFQQLVDKAIRLEDKKNRMDNRKRKMTVFQEAQGSSQRQCIKPLQIGESSSAGQGQSQQLNIGGEIKSETNESKEVNIEQANQPVPVQQGQFQENNSSGREQQVCFNCYKPGHFARECPKPKHQQPQGQVNNIVVTGANAVPVASSRVVSSSVTAQPPVSKRQ

SEQ ID NO: 20248 - protein, 371 aa, Oryza sativa
  Clone ID: TF_OSC408811j.C1.p16.fg
MVNTRASGSGNNNNEGNPILAQVLAQQTQLMNMMIQQMQNQLNQGNNNAPPPQNKLADFLRVRPPTFSSTTNPVEAGDWLHTIEKKLELLQCTDQEKVVFASHQLQGPASEWWDHFRMNRAEGQPITWVEFTEAFKKTHIPVGVVSLKKREFRTLKQKDHTVAEYLHEFNRLARYAPEDVRTDEERQEKFLEGLKDELSVTLISHDYVDFQQLVDKAIRLEDKKNRMDNRKRRMTVFQEAQGSSQRQHIRPLQIGESSSAGQGQSQQLNIAGEIKSETNESNDVNIEQANQPVPVQQDQSQENNTSGREQQVCFNCYKPGHFARECPKPKRQQPQGQVNNIVVTGANAVPVASSRVASSSVTAQPLVSKQQ

SEQ ID NO: 20249 - protein, 371 aa, Oryza sativa
  Clone ID: TF_OSC411778j.C1.p1.fg
MVNTHANKSGNNNNEGNPTLAQVLAQQTQLMNMMVQQMQNQLNQGNNNAPPPQNKLTDFLRVKPPTFSSTTNPVEAGDWLHTIEKKLELLQCTDQEKVVFASHQLQGPASEWWDHFRMNRAERQPITWAEFTEAFKKTHIPVGVVALKKGEFRALKQKDHTVAEYLREFNRLARYAPEDVRTDEERQEKFLEGLKDELSVTLISHDYVDFQQLVDKAIRLEDKKNRMDNRKRKMTVFQEAQGSSQRQRIKPLQIGEPSSAGQGQSQQLNIGGEIKSETNESNEVNIEQANQPVPVQQDQSQVNNSSRREQQVCFNCYKPGHFARECPKPKHQQPQGQVNNIVVTGANAVPVASSRVVSSSVTAQPPVSKRQ

SEQ ID NO: 20250 - protein, 872 aa, Oryza sativa
  unsure (1)..(872): unsure at all Xaa locations
  Clone ID: TF_OSC4124j.C1.p4.np
VQPLPAALVASSPAPVVVVVILSSFPVVVAFPSVKPFSFVVLVPSCRSPVIVFVLASASPSIAPAASRLRPRIDAEVVPSPFVSVIPGRLRRPFVVVVPTPRCMVVSPLPRCPVLVLSVSPVPVVRLSAPSSGQSRAARAVPCAVAASSVKSRLPVAPFSNLVEGKYSSYPPLSLPPKNRSXSLSILSKSNSFSSLSPKPSFXWIDFLREERSLQSKAINRTPXSSSFVCPLSRGLPCLVALPPRAPPRRRRRPSSIRVAPPSVVAAGRRTAVRCAEVWRSPASCPPSSPATGAPPPARSEPPPPFTSSPVTVGRRLARGXVPVIICLAPGLELDLYSRDGCSEWLGLCNMGVLFSVDXNFGAEAIARSLFRCCFLFFCKYVTLIKMDFYIKLSVCVPRLILGRGFYAQISSEITSEFPGVTSWYQSHLDCRISQIVKPRTNFPETXFVKISPSSLSRILHKSFCRSLLFSLFQLEXLLNLMEKLEDVDVVNFCKSSGSRNKKMIVESKCSAVKIEXSLEPSLEPMPPKCLXRIVSRVERLLFFVCRYGCIPIIGVVHQRNNNVNPPPPQNKLADFLRVRPPTFSITTNPVEAGDWLHAVEKKLELLQCTDQEKVVFASHQLQGPASEWWDHFRMNRAEGQPITWAEFTEAFKKTHIPAGVVALKKREFRALKQKDRTVTEYLHEFNRLARYAPEDVRTDEERQEKFLEGLKDEVSVMLISHDYEDFQGLVDKAIRLEDKKNRMDNRKRGRIVFQETQGSSQRQRIKPNNEVNIEQANQPVLVQQDQSQENNSNGRGQQVCFNCYKPGHFARECPKSKHQQPQGQINNIVVTGANASSSSSGQSRAARAVPCAAAAFSVNLASPLLLFHLVE

SEQ ID NO: 20251 - protein, 371 aa, Oryza sativa
  Clone ID: TF_OSC415853j.C1.p8.fg
MVNTRASGSGNNNNEGNPTLAQVLAQQTQLMNMMIQQMQNQLNQGNNNAPPPQNKLADFLRVRPPTFSSTTNPVEAGDWLHAIEKKLELLQCTDQEKVVFASHQLQGPASEWWDHFRMNRAEGQPITWAEFTEAFKKTHIPVGVVASKKREFRALKQKDHTVAEYLHEFNRLARYAPEDVRTDEERQEKFLEGLKDELSVTLISHDYADFQQLVDKAIRLEDKKNRMDNRKRKMTVFQEAQGSSQRQRIKPLQIGEPFSAGQGHSQQLNIGGEIKSETNESKEVNIEQANQPVPVQQDQSQVNNSSGREQQVCFNCYKPGHFARECPKPKHQQPQGQVNNIVVTGANAVPVASSRVVSSSVTTQPPVSKKQ

SEQ ID NO: 20252 - protein, 784 aa, Oryza sativa
  Clone ID: TF_OSC408811j.C1.p3.fg
MASLLTLPSLSLSNPSASAAAAGAGAAPSLRLRAAFRCWALRRAGGGRWAAAGAIASPNSVLSEHAFKRLQLSDEEEEEEEGAYGSDEEGVEAVGGGEGDEDELAIARLGLPEQLVSTLEKRGITHLFPIQVSVLGGDSEGIGVSVGFVGGMSSWTVRAVLIPALDGRDLIARAKTGTGKTLAFGIPMIKQLMEEDDGRSVRRGRIPRVLVLAPTRELAKQVEKEIKESAPKLSTVCVYGGVSYNVQQNALSRGVDVVVGTPGRIIDLINGGSLQLGEVKYLVLDEADQMLAVGFEEDVETILQQLPAERQSMLFSATMPGWVKKLSRRYLNNPLTIDLVGDQDEKLAEGIKLYAIPLTSTSKRTVLSDLITVYAKGGKTIVFTKTKRDADEVSLALTNSIASEALHGDISQHQRERTLNGFRQGKFTVLVATDVAARGLDIPNVDLIIHYELPNDPETFVHRSGRTGRAGKAGTAILMFTNSQRRTVRSLERDVGCRFDFISPPAIEDVLESSAEHVIATLRGVHTESIQYFIPAAERLQEELGPNALASALAHLSGFSQPPSSRSLISHEQGWVTLQLTRDPGYGRGFFSPRSVTGFLSDVSSAAADEVGKIFLTADEKVQGAVFDLPEEIARDLLSMELPPGNTITKVTKLPALQDDGPATDSYGRFSNSDRGFRNRRSRGGGSRGGRGGWDSDGEDRFRRGGRSFRSDNDSWSDDDFGGGRRSNRSSSFGGRGSSYGSRSSSSFGGRSSSFGSRDSSRSFSGACFNCGESGHRASDCPNK

SEQ ID NO: 20253 - protein, 588 aa, Oryza sativa
  Clone ID: TF_OSC401920j.C1.p6.fg
MPLGELRRLPFRLLRSFSPLPGRPLARWADAAITVVVVVLPASGFNTQNSLEIWVKFLGVTKWYQSQLDFVKPWRINRQLRVCSEVKSSIKLHAAKSGKQMVSVRGNFNGSGSRQFHGSTQLNSISFPRQPLKDQPQSQVMANQTQTVEELLQQMRRRYQIYLMQQMQRQCQEPRQVHQPQMQVQVPARNLNQSQEFPISAPKTPVKMMSRSPKITSANSPSDQRKISATCYDCGEQGHYVRNCPWKVFARSPEKDEKQCPGSNQAPSQSTDKKDGTLQRNSGANRTVIWKMDNGRTMIITGSEFTPEDAARIPKRRRGRNTFRGARQLTRHLIKYGPPRPEDDESGERFSADDNDDNDDDNDDNDDATLDSFRERELKCKACARCGIVGHTASLCLPTCRCGEYTHYSDACPLRKVTCFLCEGTDHVPKDCQLNAVLAMTKKEQGATVQPIRQPMVVDNNSLNPSTLSPTTAPVEANLGRSNVARDVHESLCVPVSAAKVHNQKPAPRDPASRFCRNCRKPGHRFSDCPLPRAAKAVRRDSQVTSTAHDTNRHLNVQPPPQRIIVKGTVKGHIVPPAIVSSLQHQHQ

SEQ ID NO: 20254 - protein, 914 aa, Oryza sativa
  Clone ID: TF_OSC404332j.C1.p20.fg
MAQRWRSRARRDPDVDDEEGSPPERRRRGARSGSDDEEAGNEDLSLEIVARAARRRRRREASAGFAADAFSSGDEIDEDAVVELGEADPSSRKRRKEKKKRRKEKRKQRKGAPPEGSPSTAAADKESQVAGTQEGQTGTAQSVLTEDGPDVPLSDNIVLRKLLRIPRYFDPGETLLETCFNCGEEGHVAVNCPMEKRKRPCFVCGLFGHNSKQCTQVGLPSSKALLLGDLDRFQTSSSLITHIYLPLPMLLACVAWPANFRNQTFVNHFCRVKTVSSAKKEVILRKTALKSTIGILNSLLFVYDVENQVMICLDVPMIIHAMMLRKVIYVAPTSLIFVQKKLVVIIVPNLVILVWDVPSNVGKLVPRQLQLCVTNVARKATSHVGAQRTPSRKKGKGKKDFGTRSAPHDARKTSKRKSPLFEERRNSSHFKSKARGGWIADDADDQPYKKCKPNVWASPSTPKKQYNNHQFSSGGDYSTPQSSRWQKHGFASPSATYSPNTRKHSFSSSRFASNTHVRLHGQPTLELFAASNLTSPNDGSQCSLIASETEEMCVSGCIIELELYGLLALEAEERHASGHRVGEVGLKGELTSSVASSYGPRNSASERAAAHTCGLRLFAAADDFEIDWLFESSNRLRFVSSLRYDAPPPRTLRLRSHTTAATVAQGLSRRAVQPADGVFREEAAGDRAVPRGRVREGRGRQRRHRGFIALWASTAAPSPAPSAVGPTPAAAAAELLRRVAAPGVDPCPALRPVGGGAAETVASVLRRRGKGDDDDGGVEAVEAAVRVLAVLATSDCIEEENRRRVVAALAAGGAAPSVAASLARVMRSGSGLEARVDAARLVESLLRDGGEDDEVRRDGRRGGGGVRAVGGVPPVQGPARGGGGGGVQGRADEAAPADAERVLAGGEADGLGVP

SEQ ID NO: 20255 - protein, 497 aa, Oryza sativa
  Clone ID: TF_OSC10946j.C1.p3.fg
MEMDEVGGRWTFSRTNEGYTSCGPVVEMSWHRVGALLLGAQSCLPVPGVPAVGGIGSVLLSMARMGWKLCHSFRLYTVVMFNREKGKNVSGYDSSNSSFQLNLPLASRELTRAHPWSIPSMLLSSQLPLVGSQDQNQYVFDRAFATQVNELPMPEEQVPFCHDCREQGHYALNCPWVYVKEAPSLGLAGRTSLNQPPHTKSSLQPSVQSRELNGENPLNPGKCFPPSLSYHVGSHTKQAKGKKSKNQKRKAPMRTEEEVRKMTITSTEWPPAGITIPRRQRGNTFRGARQLTQHLLSRGGRVSDSEGSDQVSSDEEDESPRHLGEEEMESKACPRCGEIGHVASMCLTLCPHCEEDHPPGECPTRKVTCFLCEGTNHVPKDCQLSVLLTKTAEIQRTTLRLSHQLVSSNSNIDDIIHSTNAPPAAPDSAINHSDNTFSTNHSLHRQPQQRIVIDGRSCVSPRPTPGRAKGNQPPEGDTKQKTVIRLNQQPEGNFSCE

SEQ ID NO: 20256 - protein, 366 aa, Oryza sativa
  Clone ID: TF_OSC13029j.C1.p1.fg
MVNTHASGSGNNNNEENPTLAQVLAQQTQLINMMMQQMQNHLNQGNNNAPPPQNKLADFLCVKPPTFSSTINLVEAGDWLHTIEKKLELLQCTDQEKVVFASHQLHGYASEWWDHFRMNRAEGQPITWEEFTEGLKKTHIPAGVVALKKREFRTLKQKDRTVTKFLYEFNRLARYAPEDVCTDEERQEKILEGLKDELSVTLISHDYADFHELVDKAIQLEDKKNRMDNRKRRMTVFQEAQGSSQRQHIKPSQVGESSLTSQEQSQQLNIGGEINSETNASNEVNIKQATLSEPVQQDQSQENNSSGREQQVCFNCYEPGHFARKCPKPKHQQPQGQVNNIVVTGANAVPVASSSVTAQPPVSKQQ

SEQ ID NO: 20257 - protein, 470 aa, Oryza sativa
  Clone ID: TF_OSC17330j.C1.p2.fg
MSWHRTGVLLLGAQSCLPVPGVPGVGGVGSVLFSMARMGWKLCHVFRPYTVVMFNREKGKNVSGYDSSNSSFQLNLPLASRELTRAHPWSIPSMLLSSQLPLVGSQDQNQYVFDRAFATQVNELPMPEEQVPFCHDCREQGHYALNCPWVYVKEAPSLGLAGRTSLNQPPHTKSSLQPSVQSRELNGENPLNPGKCFPPSLSYHVGSHTKQAKGKKSKNQKRKAPMRTEEEVRKMTITSTEWPPAGITIPRRQRGNTFRGARQLTQHLLSRGGRVSDSEGSDQVSSDEEDESPRHLGEEEMESKACPRCGEIGHVASMCLTLCPHCEEDHPPGECPTRKVTCFLCEGTNHVPKDCQLSVLLTKTAEIQRTTLRLSHQLVSSNSNIDDIIHSTNAPPAAPDSAINHSDNTFSTNHSLHRQPQQRIVIDGRSCVSPRPTPGRAKGNQPPEGDTKQKTVIRLNQQPEGNFSCE

SEQ ID NO: 20258 - protein, 2157 aa, Oryza sativa
  Clone ID: TF_OSC29926j.C1.p1.fg
MSDLGGKNGENGNEDGASSKETPSPKGATIPFGYRKHTIPPHNFVSVPSGRAPQFDGTHYAAWKHKMKLHLISLYLSIWKVVCKGVDVPHDDMELTSEQEQLIHRNAQASNAILSALSPEEFNKVDGLEEAKEIWDTLQLAHEGSPAVREAKIDLLEGRLGRFVMDDKETPQEKYDRTMILVNKIKGLGSEDMTNHFVLKRLLRALGPRNPTLVSMIRERKDFKRLTPSDILGRIVSHEMQEEEARERFKHFLRNSGYGKGRKDDDKGKRQSKRACFNCGEYGHFVANCPKSNEAKAKGGKKKPEHAHVAEAHMAEVFYSGDEEDPEVKPKPKPKDKVEGEGGVATVAFKSSSSSKKRLFNNLSDDDDDFYHYSCFMAQGRKVMTQKRSHTSLDVDSSDEESDNELDDVLKSFRKPAMQHLAKLMRALDSKEQSLERQEELLILEKKRNLALEESLAKECAKNEQLANELNLANGSLASLSDVNETLQEKFASLDKSHKDLEVQFDTLWNSTSQPNVVSNSSNPSTSNGCARCYNIDLNSHTTNVDAMQALKKENERLGTLVKYGCMKTYHSKDALYKTINHLNMDGHGLGFSGGSPVSKRVMAYSSGGSSWVVDSGCTNHMTGERSMFTSLDEGAGSRENIVFGDDGKGKVMDLGKIAISKNQSLSNVLLVNSLRVNPEACLIAKSSMGWLWHRRLAHVGMRNLASLLKGEHILGLYNVSFEKDCVCSACQAGKQVGSPHPIKNIMTTTRPLELLHMDLFGPVAYISIGGNKYGFVIVDDFSRFTWVYFLHDKSEDQDVFKRFAKQAQNLYDLTIKRVQSDNGGEFKNTQMEEFLDEEGIKHEFSAPYDPPQNGIVERKNRTLIEATRAMLDEYKTSNVFWAEAVSTACHAINRLYLHKILKKTSYELLSGKKPNVSYFRVFGSKCFILSKRPRSSKFSPKVDEGFLLSYESNAHAYCVFNKTSGIVEVTRDVTFDESNGSQGEQVVVHVVGGVDPNQAIGTKAIGDIRPVETQDDQEDRDQPPSPASNSPTSVVSAESEIPGPIDRNLRTSLGPEVPGSIVRNLWISGSEDMPTAQVDGIDAEGTLEHSDQAQVPPVHHPRIHHTVQREHPVDNILGDIRKGVTTRSRITSFCQHFSFVSSLEPTRVEDVLGDPDWVMAMQEELNNFTRNQVWTLVERPKQNVIATKWIFRNKQDEHGVVVRNKARLFQMDVKSAFLNGPISELVYVEQPPGFEDPKLPNHVYKLHKALYGLKQAPRAWYECLRDFLLKNGFEIGKADTTIFTKKFKSDSFICQIYVDDIIFGSTNASFCEEFSSIMTKRFEMSMMGELTFFLGLQVKQAQEGTFISQTKYVKDILKKFGMEDAKPIKTPMPTNGHLDLDHNGKCVDQKVYRSMIGSLLYLCASRLDIMLSVCMCARFQAEPKECHLIAVKRILRYLVHTPNLGLWYPKGCGFELLGYSDSDYAGCKVDRKSTTGTCQFLGWSLVSWSSKKQNSIALSTAEAEYVAADSCCAQLLWMRQTLKDFGYNFTKIPLLCDNESAIKIANNPVQHSRTKHIDIRHHFLRDHETKGDICLTHVTTESQLADIFTKPLDEKRFCELRSELNILDSRNIRLEVPVTPVRNFRGSGGINTQGEPEPVVIMPREKRQKLSQDIPADSSPPIPIHSRRAGSIVIRDAPRSPSPTASESDDGGNEDEPGSESNPLRLYKTRAVDPDPKRPRVNYLKNLLKCGKDRMVSPDTLPADSQDDRFRTLVQVDWYNSVIMGRSHPVVEMKWLDWKYMSSKNNIVFNEVRKVCEHKHAADLLALQYSWNEEVIGQFYSTAFFGTTKKGLDFVKWTIQGQQYRVSMAQFVAALGLDDDDLSRPHIFVEDALSPTSTTFMYEKDAPKDCLGTTRGLHPYYRVLYSIFRWSLLPKVGDATALPGRHALLLSRMRYNKPDFSIMKLIWSEIYETVCEPKRGCIYAPYIMKMIEAKTGICYFKDNQYKPFRPHAPTTSATPTTRVTSASTSAAPSFSAAPQRSESSSPIKKALKAIFCMCAKTAKKVKKIERRQKEDWIAVGKDVSDISDDEEFVDPFAAYETAQDIGSGEGPSGTSRFFNEESCHSEESSDDEESDAPTENVPTDPDEAVDAAGQDIDSPHSGDTEIIPSDGDIDEA

SEQ ID NO: 20259 - protein, 1425 aa, Oryza sativa
  Clone ID: TF_OSC400458j.C1.p45.fg
MSYTPPGRRGGGGGGGSGNGRGGASGSGGGNGADGALLPLVSQGRDASHTARLPVLSRTNYPDWALLMRVNLQAQGLWTAIDPGYAEFREDRAALSAILQAVPREMLRGLAKHDTAKAAWDAIKTMRVGVDRVREAKEQGFRRQFESMRFKERETPEEFAMRLTAVVADIRDMGGVMEDEHVNKKLLRVVPKKYKPVAISLEQLLDVKTMALEELVGRLSTVDSYSDDEEGSNGGKLYLTEEQWQARVKQREQEGSGNSGNKGRGAPGAQNHRGKPGGSPKGKEAATGANSSRDISRVKCFNCDEFGHYARQCRKPRRQRRGEANLVQAAEEEPTLLMAHVVGVSLAGEATLGRTPSGQEVHLTEKKVILDHEDGGEEEVTGDWFLDTGATNHMTGVRSAFAELDTGVVGTVKFGDGSVIEIQGRGTVVFRCKNGDHRSLDAVYYIPKLRKNIISVGRLDARGYDAHIWGGVCTLRDPNGLLLAKVKRDINYLYILKLHIANPVCMAASGGDTAWRWHARFGHLNFQSLRRLAQGNMVRGLPTIDHTDQLCDGCLAGKQRRLPFPEEAKFRAQEALELVHGDLCGPITPATPGGRKYFLLLVDDMSRHMWIRLLSGKHEAATAIKQFQAGVELESGRKLRALRTDRGGEFTSVEFMDYCTDRGMRRELTAPYSPQQNRVVERRNQTVVAAARSMLKAAGLPARFWGEAVVAAVYVLNRSPTKALDGVTPYEAWHGRRPSVEHLRVFGCVGYVKTVKPNLRKLDDRGTRMVFIGYEQGSKAYRMYDPVAQRVCVSRDVVFDETATWAWRDPEDAATEEEEFTVDFFVSPVAPSVADAGEQTGTPVQAGVSPVSTGVLSSPPRAPNGEFCTPPTSVTPETDGGPVRYRRVQDILSTTEPVLDFDYSDQCLIATEEPTSFVEAEKHECWRRAMVEELRSVEENQTWSLAELPAGHKAIGLKWVYKLKKDPSGAIVKHKARLVAKGYVQQQGVDFDEVFAPVARMETVRLLVALAAQKGWEIHHMDVKSAFLNGELEEEVYVVQPPGFDDKTNASKVLKLRKALYGLRQAPRAWNAKLDNTLLSLKFNKSATESAVYVRGVGDSKLIVGVYVDDLIITGSQKKEIDAFKLQMKQRFNMSDLGFLSYYLGMEVVQKGEGIFLSQSAYAGKILEKTGMEGCNPTQVPMEARLKLSKEGTGECVDPTEYRSIVGSLRYLVNTRPDLAYSVGYVSRFMEKPTSEHWAAVKHILRYISGTIKTGCWYGREEVGNAKLVGFSDSDMAGDLDDRKSTTGVLFRYGGSLISWQSQKQKVVALSSCEAEYIAATTAACQGIWLSRLIAELLDAEPGQTTLMIDNKSAINLCKNPVFHDRSKHIDTRYHFIRECVEKKQIAVEYVCSEDQLADLLTKPVGRVRFKELRRKMGLDRTLQD

SEQ ID NO: 20260 - protein, 1544 aa, Oryza sativa
  Clone ID: TF_OSC401327j.C1.p24.fg
MATCINGGELQVRVVSRRLVQASDESLRPHVLAVSNLDLLPQSIQVSMICIYPNPPTSAGGFHDVVAAFAAGLPSLLNHFFPLADRIAVNPCSGLPEIHCYNQGAELVVGEADVALASLDYGRVGESIQKILLPYAGDVALSVQYWNDPAMSYTPPGRRGGGGGGGSGNGRGGASGSGGGNGADGALLPLVSQGRDASHTARLPVLSRTNYPDWALLMRVNLQAQGLWTAIDPGYAEFREDWAALSAILQAVPREMLRGLAKHDTAKAAWDAIKTMRVGVDRVREAKEQGFRRQFESMRFKERETPEEFAMRLTAVVADIRDMGGVMEDEHVNKKLLRVVPKKYKPVAISLEQLLDVKTMALEELVGRLSTVDSYSDDEEGSDGGKLYLTEEQWQARVKQREQEGSGNSGNKGRGAPGTQNHRGKPGGSPKGKEAATGANSSRDISRVKCFNCDEFGHYARQCRKPRRQRRGEANLVQAAEEEPTLLMAHVVGVSLAGEATLGRTPGGQEVHLTEKKVILDHEDGGEEEVTRDWFLDTGATNHMTGVRSAFAELDTGVVGTVKFGDGSVIEIQGRGTVVFRCKNGDHRSLDTVYYIPKLRKNIISVGRLDARGYDAHIWGGVCTLRDPDGLLLAKVKRDINYLYILKLHIANPVCMAASGGDTAWRWHARFGHLNFQSLRRLAQGNMVRGLPIIDHTDQLCDGCLAGKQRRLPFPEEAKFRAQEALELVHGDLCGPITPATPGGRKYFLLLVDDMSRHMWIRLLSGKHEAATAIKQFQVGVELESGRKLRALRTDRGGEFTSVEFMDYCADHGMRRELTAPYSPQQNGVVERRNQTVVAAARSMLKAAGMPACFWGEAVVAAVYVLNRSPTKALNGVTPHEAWHGRRPSVEHLRVFGCVGYVKTVKPNLRKLDDRGTRMVFIGYEQGSKAYRMYDPVVRRVCVSRDVVFDEAATWAWRDPETEATEEEEFTVDFFVNPVDSVVADLGEQASTPVQGGTYPASTATPPSPPEVPAGVEFCSPPNSVTPGTNEGPIRYRRVQDILSATEPVLDFDYSDQCLLASEEPMSLAEAEQQLCWRQAMQEELKSIEDNQTWSFAELPVGHKAIGLKWVYKVKKDPSGVVVKHKARLVAKGYVQQQGIDFEEVFAPVARMETVRLLIAVAANKGWEIHHMDVKSAFLNGDLEEEVYVVQPPGFIEKGKEGQVLRLKKALYGLKQAPRAWNAKLHNTLISLNFIKSETESAVYEEMKKKFRMSDLGLLSYYLGMEVVQKDDGVFLSQTAYAAKILEKTGMEGCNSTQVPMEARLKLKRESGGEGVDSTMYRSTVGSLRYLVNTRPDLAYSVGYVSRFMEKPTSEHWAAVKHILRYIAGTLDVGCWFGRREKGELRLIGFSDSDMAGDLDDRKSTTGVLYMLGDSLISWQSQKQKVVALSSCEAEYIAATTGACQGIWLNRLLAELLGEDPGQTVMKVDNKSAINLCKNPVLHDRSKHIDTRFHFIRECVEKKQIAVEYVRTEDQLADILTKPVGRVRFLELRKKMGLEQAHQD

SEQ ID NO: 20261 - protein, 1426 aa, Oryza sativa
  Clone ID: TF_OSC401947j.C1.p42.fg
MSYTPPGRRGGGGGGGSGNGRGGASGSGGGNGADGALLPLVSQGRDASHTARLPVLSRTNYPDWALLMRVNLQAQGLWTAIDPGYAEFREDRAALSAILQAVPREMLRGLAKHDTAKAAWDAIKTMRVGVDRVREAKEKGFRRQFESMRFKERETPEEFAMRLTAVVADIRDMGGVMEDEHVNKKLLRVVPKKYKPVAISLEQLLDVKTMALEELVGRLSTVDSYSDDEEGSDGGKLYLTEEQWQARVKQREQEGSGNSGNKGRGAPGTQNHRGKPGGSPKGKEAATGANSSRDISRVKCFNCDEFGHYARQCRKPRRQRRGEANLVQAAEEEPTLLMAHVVGVSLAGEATLGRTPGGQEVHLTEKKVILDHEDGGEEEVTRDWFLDTGATNHMTGVRSAFAELDTGVVGTVKFGDGSVIEIQGRGTVVFRCKNSDHRSLDTVYYIPKLRKNIISVGRLDARGYDAHIWGGVCTLRDPDGLLLAKVKRDINYLYILKLHIANPVCMAASGGDMAWRWHARFGHLNFQSLRRLAQGNMVRGLPIIDHTDQLCDGCLAGKQRRLPFPEEAKFRAQEALELVHGDLCGPITPATPGGRKYFLLLVDDMSRHMWIRLLSGKHEAATAIKQFQVGVELESGRKLRALRTDRGGEFTSVEFMDYCADHGMRRELTAPYSPQQNGVVERRNQTVVAAARSMLKAAGMPACFWGEAVVAAVYVLNRSPTKALNGVTPHEAWHGRRPSVEHLRVFGCVGYVKTVKPNLRKLDDRGTRMVFIGYEQGSKAYRMYDPVARRVCVSRDVVFDEAATWAWRDPETEATEEEEFTVDFFVNPVDSVVADLGEQASTPVQGGTYPASTATPPSPPEVPAGVEFCSPPNSVTPGTNEGPIRYRRVQDILSATEPVLDFDYSDQCLLASEEPMSLAEAEQQLCWRQAMQEELKSIEDNQTWSFAELPVGHKAIGLKWVYKVKKDPSGVVVKHKARLVAKGYVQQQGIDFEEVFAPVARMETVRLLIAVAANKGWEIHHMDVKSAFLNGDLEEEVYVVQPPGFIEKGKEGQVLRLKKALYGLKQAPRAWNAKLHNTLISLNFIKSETESAVYVRGTGSSRLIVGVYVDDLIISGAQASEIDFFKEEMKKKFRMSDLGLLSYYLGMEVVQKDDGVFLSQTAYAAKILEKTGMEGCNSTQVPMEARLKLKRESGGEGVDSTMYRSTVGSLRYLVNTRPDLAYSVGYVSRFMEKPTSEHWAAVKHILRYIAGTLDVGCWFGRREKGELRLIGFSDSDMAGDLDDRKSTTGVLYMLGDSLISWQSQKQKVVALSSCEAEYIAATTGACQGIWLNRLLAELLGEDPGQTVMKVDNKSAINLCKNPVLHDRSKHIDTRFHFIRECVEKKQIAVEYVRTEDQLADILTKPVGRVRFLELRKKMGLEQAHQD

SEQ ID NO: 20262 - protein, 2102 aa, Oryza sativa
  Clone ID: TF_OSC408405j.C1.p8.fg
MSDLGGKNGENGNEDGASSKETPSPKGATIPFGYRKHTIPPHNFVSVPSGRAPQFDGTHYAAWKHKMKLHLISLYLSIWKVVCKGVDVPHDDMELTSEQEQLIHRNAQASNAILSALSPEEFNKVDGLEEAKEIWDTLQLAHEGSPAVREAKIDLLEGRLGRFVMDDKETPQEKYDRTMILVNKIKGLGSEDMTNHFVLKRLLRALGPRNPTLVSMIRERKDFKRLTPSDILGRIVSHEMQEEEARERFKHFLRNSGYGKGRKDDDKGKRQSKRACFNCGEYGHFVANCPKSNEAKAKGGKKKPEHAHVAEAHMAEVFYSGDEEDPEVKPKPKPKDKVEGEGGVATVAFKSSSSSKKRLFNNLSDDDDDFYHYSCFMAQGRKVMTQKRSHTSLDVDSSDEESDNELDDVLKSFRKPAMQHLAKLMRALDSKEQSLERQEELLILEKKRNLALEESLAKECAKNEQLANELNLANGSLASLSDVNETLQEKFASLDKSHKDLEVQFDTLWNSTSQPNVVSNSSNPSTSNGCARCYNIDLNSHTTNVDAMQALKKENERLGTLVKYGCMKTYHSKDALYKTINHLNMDGHGLGFSGGSPVSKRVMAYSSGGSSWVVDSGCTNHMTGERSMFTSLDEGAGSRENIVFGDDGKGKVMDLGKIAISKNQSLSNVLLVNSLRVNPEACLIAKSSMGWLWHRRLAHVGMRNLASLLKGEHILGLYNVSFEKDCVCSACQAGKQVGSPHPIKNIMTTTRPLELLHMDLFGPVAYISIGGNKYGFVIVDDFSRFTWVYFLHDKSEDQDVFKRFAKQAQNLYDLTIKRVQSDNGGEFKNTQMEEFLDEEGIKHEFSAPYDPPQNGIVERKNRTLIEATRAMLDEYKTSNVFWAEAVSTACHAINRLYLHKILKKTSYELLSGKKPNVSYFRVFGSKCFILSKRPRSSKFSPKVDEGFLLSYESNAHAYCVFNKTSGIVEVTRDVTFDESNGSQGEQVVVHVVGGVDPNQAIGTKAIGDIRPVETQDDQEDRDQPPSPASNSPTSVVSAESEIPGPIDRNLRTSLGPEVPGSIVRNLWISGSEDMPTAQVDGIDAEGTLEHSDQAQVPPVHHPRIHHTVQREHPVDNILGDIRKGVTTRSRITSFCQHFSFVSSLEPTRVEDVLGDPDWVMAMQEELNNFTRNQVWTLVERPKQNVIATKWIFRNKQDEHGVVVRNKARLFQMDVKSAFLNGPISELVYVEQPPGFEDPKLPNHVYKLHKALYGLKQAPRACSIMTKRFEMSMMGELTFFLGLQVKQALEGTFISQTKYVKDILKKFGMEDAKPIKTPMPTNGHLDLDHNGKCVDQKVYRSMIGSLLYLCASRLDIMLSVCMCARFQAEPKECHLIAVKRILRYLVHTPNLGLWYPKGCGFELLGYSDSDYAGCKVDRKSTTGTCQFLGWSLVSWSSKKQNSIALSTAEAEYVAADSCCAQLLWMRQTLKDFGYNFTKIPLLCDNESAIKIANNPVQHSRTKHIDIRHHFLRDHETKGDICLTHVTTESQLADIFTKPLDEKRFCELRSELNILDSRNIRLEVPVTPVRNFRGSGGINTQGEPEPVVIMPREKRQKLSQDIPADSSPPIPIHSRRAGSIVIRDAPRSPSPTASESDDGGNEDEPGSESNPLRLYKTRAVDPDPKRPRVNYLKNLLKCGKDRMVSPDTLPADSQDDRFRTLVQVDWYNSVIMGRSHPVVEMKWLDWKYMSSKNNIVFNEVRKVCEHKHAADLLALQYSWNEEVIGQFYSTAFFGTTKKGLDFVKWTIQGQQYRVSMAQFVAALGLDDDDLSRPHIFVEDALSPTSTTFMYEKDAPKDCLGTTRGLHPYYRVLYSIFRWSLLPKVGDATALPGRHALLLSRMRYNKPDFSIMKLIWSEIYETVCEPKRGCIYAPYIMKMIEAKTGICYFKDNQYKPFRPHAPTTSATPTTRVTSASTSAAPSFSAAPQRSESSSPIKKALKAIFCMCAKTAKKVKKIERRQKEDWIAVGKDVSDISDDEEFVDPFAAYETAQDIGSGEGPSGTSRFFNEESCHSEESSDDEESDAPTENVPTDPDEAVDAAGQDIDSPHSGDTEIIPSDGDIDEA

SEQ ID NO: 20263 - protein, 480 aa, Oryza sativa
  Clone ID: TF_OSC900201j.C1.p3.fg
MAQGWCPAARGLNPACLSRGFRPCAFCIMFVRCTPAFPGTGINTLAFGKRISETNNTSTRRVSSFKVLSLVLMFNREKGKNVSGYASSNSSFQLNPPLASRELTRAHPWSIPSMLLSSQRPLVGSRDQNQYVFDRAFATQVNELPMPEEHVPFCHDCREQGHYALNCPWVYAKEAPSFGLAGQTSLNQPPRTKSSLQPSVQRREPIRENPLNPGKCFPPSLSYHVGSRTKQAKGKKSKNQKRKAPMRTEEEVRKMTITSTEWPPAGITIPRRQRGNTFRGARQLTQHLLSHGGRVSDSEGSDQVSSDYEDESLRHLGEEEMESKACPRCGEIGHVASMCLTLCPHCEEDHPPGGCPTRKVTCFLCEGTNHVPKDCQLSVLLTKTAEIQRTTLRLSHQLVSSNINIDDIIPSTNAPPAAPDSAVNHSNNTFNTNHSLHRRPQQRIVVDGRSCVSPRPTPGRAKGNQSQECDTKQKTVICFK

SEQ ID NO: 20264 - protein, 610 aa, Oryza sativa
  unsure (1)..(610): unsure at all Xaa locations
  Clone ID: TF_OSC401021j.C1.p3.np
AYKLISMCVVHDMRTWEVFVFKIFTIPSAPCHRHEEYKKRKSNHQXNSSRGAPRPRYGQPMQYHQSVTQANCQPGYAPRPQMNRPAPRPQQRAPSGTTAPNSVTSFKSPQGPSAVQCFRCNQMGHYARECPQNPTNTNSGHANGSTARTPTPAAAQSRPSSQASGQGSRASNSFGRGRVNHIQAETAQDAPDIVMGMFSVNSIPAIVLFDSGASHSFISQAFVKRNGWKTQNLRVPMIVHSPGRNIRATQICPEVNLRTEEVDFLAKPIVLDSQNLDIILGMDWLAKHKGQIDCAEKSITLQGPGGKQVRFTSNTPTASRSILTCLQVTSLESVPVVCEYPDVFPEELTSMPPDREIEFAIELAPGTAPIAKRPYQMAANELAEVKRQIEELESKGYVRPSSSPWGAPVLLVKKKDGSERMVIDCRALNEVTINNKYPLPRIDDLFDQLKGARVFSKIDLRLGYHQLEIRSEDIPKTTFSTRYGLYEFTVMSFGLTNAPAFFMNLMNKIFMEYLDQFVVVFIDDILIYSKNEEEHAEHLRLIMEKLRDHQLLAKFSKCEFWLDRVAFLGHMISSNGVEVDPSKVKAVLAWNPPKNVSEIRSFLGLAGYYR

SEQ ID NO: 20265 - protein, 1214 aa, Oryza sativa
  Clone ID: TF_OSC900048j.C1.p16.fg
MQYHQSVTQANCQPGYAPRPQMNRPAPRPQQRAPSGTTAPNSVTSFKSPQGPSAVQCFRCNQMGHYARECPQNPTNTNSGHANGSTARTPTPAAAQSRPSSQASGQGSRASNSFGRGRVNHIQAETAQDAPDIVMGMFSVNSIPAIVLFDSGASHSFISQAFVKRNGWKTQNLRVPMIVHSPGRNIRATQICPEVNLRTEEVDFLAKPIVLDSQNLDIILRMDWLAKHKGQIDCAEKSITLQGPGGKQVRFTSNTPTASRSILTCLQVTSLESVPVVCEYPDVFPEELTSMPPDREIEFAIELAPGTAPIAKRPYQMAANELAEVKRQIEELESKGYVRPSSSPWGAPVLLVKKKDGSERMVIDCRALNEVTINNKYPLPRIDDLFDQLKGARVFSKIDLRLGYHQLEIRSEDIPKTTFSTRYGLYEFTVMSFGLTNAPAFFMNLMNKIFMEYLDQFVVVFIDDILIYSKNEEEHAEHLRLIMEKLRDHQLLAKFSKCEFWLDRVAFLGHMISSNGVEVDPSKVKAVLAWNPPKNVSEIRSFLGLAGYYRRFIEGFSKLARPMTELLKKEKKFQWSAACEGSFQEMKKRLTTAPVLTLPDIRKDFEIFCDASRQGLGCVLMQERKVVAYASRQLRPHEVNYPTHDLELAAVVHALKIWRHYLIGNRCEVYTDHKSLKYIFTQTELNMRQRRWLELIKDYDLGIHYHPGKANVVADALSRKAYCNVAQIRPDQDRLCRELEKLRLTVVQSGVPASLTVQPTLESQIREAQKDDEGIKELIKRIQEKKDTNFSIDDQGTVWCGPRICVPAKKELRDLILKEAHESAYSIHPGSTKMYQDIKAYFWWAGMKRDVTEYVALCDICQRVKAEHQRPAGLLQPLPIPEWKWEEIGMDLITGLPRTPSGYDSIWVIVDRLTKSAHFVAVKTTFDGKKLAELYMTHVVCRFGCPKKIVSDRGTQFTSRFWKQLHEALGTDLNFSTAYHPQTDGQTERVNQILEDMLRACALDFEGTWDRCLPYAEFSYNNSYQASIQMSPNEAMFGRKCHTPLCWNEVGEALVFGPDILKAAKEQVKLIRERLKTAQNRQKNYADNRRRDLEFGKGDHVYLRVSPLRGMRRFGMSGKLAPRYIGPYLITARRGEVAYQLELPEEEQVSLGNIELEKNLTYKERLIKVLEEAERQTRRKTIKFYKVQWSNHSEDEATWEREDLLRAEFPELLP

SEQ ID NO: 20266 - protein, 382 aa, Oryza sativa
  Clone ID: TF_OSC415688j.C1.p7.fg
MASTRNDKTSEKKYLPRCTTVDRAPLANGGRVSDSEDSDQVSSDDEDEMERKACSRCGEIGHVASSCATTCVHCEEDHPPDRCPTSRITCFFCEGTDHVSKDCQFSFLLTKKMANQLASSNGEKHQGNTNPRQDYSFSLNPVPGQRNQNEKRKCRVREDICCFNCQGMGHFADKCPKPRNVAASTSVHATPCNQKLAPQRIVIHASRSSPIARVATAPTPASALPQGVNAQFQPQPSVDKTEVSIGIVPLDVPAQQPRNQVQDEEPEPPTILCTDSLSKELSSMEEVVSLPDLLQAEQRAINLRRAIPSRRPSSASNSNQKEASPMNDSNMQSYHIITEPIKDDAVTRTMPAISLQNQNEQPRLWFSVRYLSLCNRKFAAIM

SEQ ID NO: 20267 - protein, 419 aa, Oryza sativa
  Clone ID: TF_OSC411239j.C1.p1.fg
MADNEKGNKVRSQDIGTSSSRVNEAPDTSCVTLVQHLINQNRLLIEILQQHQTPILNLSQIQPQVQLEAVPALTPQVSMPPASRRTHGEVPHVDSKEASIICFMCDEHGHYARECPQQKRKTPMRTEDEVRKMIITSTEWPPLGMTKRQRRNTFRGAPQLTEHLLANGGRVSDSEDSDQVSSDDEDEMERKACSRCGEIGHVASSCATTCVHCEEDHPPDRCPTSRITCFFCEGTDHVPKDCQFSFLLMKKMANQPASSNGEKHQGNTNPRQDYSFLLTPVPGQRNQNEKRKCRVREDICCFNCQGMGHFADKCPKPRNIAAGTSVHATPCNQKLAPQRIVIHASRSSPIARVATAPTPASALPQGVNAQFQPQPSVDKTEASIGIVPLDVPAQQPRNQVQDEEPEREKVIVCYNCSTC

SEQ ID NO: 20268 - protein, 338 aa, Oryza sativa
  Clone ID: TF_OSC421348j.C1.p2.fg
MSRYVDPNDRYEPRGRNSRLYVGHISLRTRAEDLENLFSRYGRVRFVDLKNEYGFVEFSDPRDANDARLDLDGRKYDGSDIIVQFARGVERGLGGSRGYKARPAHGSDHCFNCGMEGHWHRNCTAGDWTNRCYGCGERGHILRECKNSPKDLKQERGYSRSRSPRRRRSPSYGKSGPPSHWGSHGADREERLHSRRDGRGYSRSPRRHDSPSNQRNHSPRRYALPSNERYDGTRRYASPSYGRDRSPGGNALPANGRSHNLTSDGMNPSPRERDDQNGSHRRGDNDYLPSKRDDQNGSYRRGDSDYLSRERDDYLSRGRDDQNGSHRRGDSDYLSRDR

SEQ ID NO: 20269 - protein, 305 aa, Oryza sativa
  Clone ID: TF_OSC401685j.C1.p63.fg
MPRYDDRDRYDDRYGGNTRLYVGRLSSRTRTRDLEDLFGRYGRVRYVDMKHEFAFVEFSDARDADEARYNLDGRDFDGSRMIVEFAKGVPRGPGGSREYMGRGPPPGSGRCFNCGIDGHWARDCKAGDWKNRCYRRGRSYSRSPSPRRGRSRGRSYSRSRSRSYSRSQSPRRDSRNERRSRSPRDSRSPRGSPRDSRSPRGSPRDSRSPKGSPRDTQSPRGSPRDSRSPRRSASPPNGRNRSPTPNASRSPAPRDSRSPMRADSRSPADHERRDMSTAANGRSPSPRDYEDNGNHRASPRGSASP

SEQ ID NO: 20270 - protein, 68 aa, Oryza sativa
  Clone ID: TF_OSC900030j.C1.p15.fg
MAGMLMESRILVEFAKGVPRGAAGGSREYMGRGPPPGTGRCFNCGIDGHWARDCKAGDWHDAYAAHPA

SEQ ID NO: 20271 - protein, 350 aa, Oryza sativa
  Clone ID: TF_OSC401054j.C1.p14.fg
MPLSSQLPLVGSQDQNQYVFDRAFATQVNELPMPEEDVPFCHDCREPGHYALNCPWVYAKETPSFGLAGQTSLNQPPHTKTSLQPSVQSREPNGENPWNPGNCFPPSLSYHVGSRTKQAKGKKSKNQKRKAPMRTEEEVRKMAISSTEWPPAGITIPRRQRGNTFRGARQLTQHLLSHGGRVSDSEGSDQVSSNDEDESPRHLGEEEMESKACTRCGEIGHVASMCLTLCTHCEEDHPPGECPTRKVTCFLCEGMGHFADKCPRPRNIAASTSVHATPCNQKLAPQRIVIHASRSSPIDRVATAPTLASALPQGVNAQFQPQPSVDKTEASIGIVPLDVPAQQPKKSSTR

SEQ ID NO: 20272 - protein, 477 aa, Oryza sativa
  Clone ID: TF_OSC26158j.C1.p1.fg
MADNEKGNKVRSQDIGTSNSRVNEAPDTSCVAVVQHLINQNKLLIEILQQHRMPILNPSQMQPQVQLEAVQALTPQVSAPPTSQKAPHAMPHVDPKEASIICFMCDEQGHYARNCPQQKRKAPMRTEDEVRKMIITSTEWPPPGMTKHQRRNSFRGAQQLTEHLLANGGRVSDSEDSDQVSSDDEGAKPPQGFNQNKIELKACSRCGEIGHVASSCASICVHCEEDHPPDRCPTSRITCFFCEGTDHVPKDCRFSFLLTKKMANQPASSNGEKHQGNTNPRQDSSFSLTPVPGQRNQNEKRKCRVREDICCFNCQGMGHFADKCPKPRNVAASTSVHANPRNQKLAPQRIVIHASRSSPIARVATAPTPMSALPQGVNAQFQPQPPADKTEASICVVPLEVPIQQLRNQVQDEEPECKKVIVCYNCNEEGHYSKNCPQPRQNRPPHYRQFTRSRHSNRIVVTGANAVPVRPRVNQNP

SEQ ID NO: 20273 - protein, 665 aa, Oryza sativa
  Clone ID: TF_OSC405314j.C1.p1.np
MDEVVATMDISEANEGYASCGSVIEMSRQMKTTRVGARAQPWPACPGIPAVGRVGSVLLFTARMGEGLCHIFTTGSKAMECGVKMCLVGWPGLAWDELEPRSGCQFGLNHRRPWVKAVLDGQVSEEEDIVSCLPKLQKTAGSASEVEEAVKPAVKQDKRLRSVKVLSLVSNLSLPFVFPLSLSKPLQQMADNEKGNKVRSQDIGTSNSRVNEAPDTSCVAVVQHLINQNKLLIEILQQHRMPILNPSQMQPQVQLEAVQALTPQVSAPPTSQKAPHAMPHVDPKEASIICFMCDEQGHYARNCPQQKRKAPMRTEDEVRKMIITSTEWPPPGMTKHQRRNSFRGAQQLTEHLLANGGRVSDSEDSDQVSSDDEGAKPPQGFNQNKIELKACSRCGEIGHVASSCASICVHCEEDHPPDRCPTSRITCFFCEGTDHVPKDCRFSFLLTKKMANQPASSNGEKHQGNTNPRQDSSFSLTPVPGQRNQNEKRKCRVREDICCFNCQGMGHFADKCPKPRNVAASTSVHANPRNQKLAPQRIVIHASRSSPIARVATAPTPMSALPQGVNAQFQPQPPADKTEASICVVPLEVPIQQLRNQVQDEEPECKKVIVCYNCNEEGHYSKNCPQPRQNRPPHYRQFTRSRHSNRIVVTGANAVPVRPRVNQNP

SEQ ID NO: 20274 - protein, 1801 aa, Oryza sativa
  Clone ID: TF_OSC400710j.C1.p4.fg
MEGVPAAGANASRSPQHRGRRHSLSPTPRRGRGRGAAVREVVVQRTVREVGGAAAFPTLTRTNYTEWSLLMKVMLQARGLWDAVEHGECDEQEDRMAMEAILRAVPSEMISLLATKDSAKDAWDAIKVMRVGVDRVRKAKAQQLHREYESISFHDGESIDDFALRLTSLVSQLGTLGERIEEQNVIEKFLRVVPERFSQIAVSIETLLDLSTLTIEDVTGRLKEQWLARQKERQKGERSSKQSQGGARQRPRSHRKKRGFGGGVGGEKGNTNRDTAPNRCHNCGRLGHWAKDCRQPKKEAAHLAQGDDDDDVLLLSRACELEDDDATLLMAHACELNDGPIIAPSPVSLVEPRVQVSLGATDAEDKEAWYLDTGATNHMTGRGDVFAELDRSVTGTVKFGDSSIVDIKGAGNVIFTGKNGEHKVLSGVYYIPRLKSSIISIGQLDESGTRVLVEDGIMRIWDRRRRLLAKIKRGRSRLYVLRLEVARPICLATRHDDVAWRWHERFGHIHFGSLEKMGRQELVRGLPRLEHVEQLCDTCVITKHRRAAFPKAAKYRAQEPLDLVHGDICGPITPATPGGRRYFLLLVDDATRYMWVALLAAKSNAPDAIKRIQMAAKTHCGRKLCVFRTDNGGEFTSLEFATYCTDEGIQRHFFAPYAPQQNGVVERRNQTVVSMARALLKQKGMPAEFWGEAVSTAVFLLNHAPTKSLTGKTPYEAWHGKKPMVSFLRTFGCLAYVKELNDVRKLDDRSTPGVFIGYEEGVKAYRVLDPRTRRVRLARDVIFDESRGWDWTAASSTDARPSSDFAIEYHVEKTTGHPIPSVGGGVVTPSASPTPLQETSPATPATPAPSPSVAPTEFVSPPSHDEERIDAAHSNTPVRYRTVDNLIGENAPAPGIAQRELEEASLLLAGPGEPCSFAEAEGDDAWRAAMREEMDAVNRNGIWELVDLPHGHRPIGLKWVYKLKKNEAGKVVKHKARLVARGFVQQPGIDFDEVFAPVARMESIRLLLAVAAQKGWHVHHMDVKSAFLNGDLAEEVYVKQPPGFVVAGEEDKVLRLRKALYGLRQAPRAWNAKLDCTLKELGFDQSKHEHAMYRRNNGGSALLVGVYVDDLVITGPSTRAIEQFKEEMKAKFQMSDLGLLSFYLGIEVKQGDDGISLNQGRYAQRIVESAGLKDCNPCATPMEERLKLSRDSTAPPVDATKYRRLVGSLRYLVHTRPDLAFAVGFVSRFMERPTEEHMVAVKRILRYVAGTMEYGLHYKREKEEQRLIGYSDSDLAGDIDTRRSTSGMLFFLGSSLVSWQSIKQRVVALSSCEAEYVAATNAATQGIWLARLLGELLGKQPKAIELKVDSKSALALAKNPVFHERSKHIDLRYHFIRSCLEEGSISASFITTMDQLADILTKALGRVRFHELVARIGVILNRQVVKSDSATIKIPELDFEIPPEAQRGSLSTVEGIIMRAVDELQALQDERKKVDPQKAEAIDKFLAKLRSLGLGEAAFTFVLDDPAGNSFIENQNAPSSDPLLSVRFYERMREQQAALGFLVEPSTEEPGDQPVNHASTVEGNSEVLQEPHGSVGAVAGRRAIAQGNPDEVAAALCRYSAPEECLVFDLWLEIPYFREVIVMATTCDMCGYRNSELKPGGEIPAKGKKITLRVQNGKDLTRDVIKSDSAGVKVPELELELASGTLGGIVTTVEGLIVKICEALQRVHGFHLGDSTLEWKKKKWEDFNDRLSKLLSLQEPWTLIIDDGLAASFVAPATDSLEDDNQLTIEEYVRSWEQNEELGLNDMDTSSADAAYNTTNP

SEQ ID NO: 20275 - protein, 1450 aa, Oryza sativa
  Clone ID: TF_OSC401728j.C1.p22.fg
MEGVPAAGANASRSPQHRGRHHSLSPTPRRGRGRGAAVREVVVQRTVREVGGAAAFPTLTRTNYTEWSLLMKVMLQARGLWDAVEHGECDEQEDRMAMEAILRAVPSEMISLLATKDSAKDAWDAIKVMRVGVDRVRKAKAQQLHREYESISFHDGESIDDFALRLTSLVSQLGTLGERIEEQNVIEKFLRVVPERFSQIAVSIETLLDLSTLTIEDVTGRLKVAEERRPAPTSTTTPAGGQLLLTEEQWLARQKERQKGERSSKQSQGGARQRPRSHRKKRGFGGGVGGEKGNTNRDTAPNRCHNCGRLGHWAKDCRQPKKEAAHLAQGDDDDDVLLLSRACELEDDDATLLMAHACELNDGPIIAPSPVSLVEPRVQVSLGATDAEDKEAWYLDTGATNHMTGRGDVFAELDRSITGTVKFGDSSIVDIKGAGNVIFTGKNGEHKVLSGVYYIPRLKSSIISIGQLDESGTRVLVEDGIMRIWDRRRRRRLLAKIKRGRSRLYVLRLEVARPICLATRHDDVAWRWHERFGHIHFGSLEKMGRQELVRGLPRLEHVEQLCDTCVITKHRRAAFPKAAKYRAQEPLDLVHGDICGPITPATPSGRRYFLLLVDDATRYMWVALLAAKSNAPDAIKKIQMAAETHCGRKLCVFRTDNGGEFTSLEFATYCTDEGIQRHFSAPYAPQQNGVVERRNQTVVSMARALLKQRGMPAEFWGEAVSTAVFLLNRAPTKSLTGKTPYEAWHGKKPMVSFLRTFGCLAYVKELNDVRKLDDRSTPGVFIGYEEGVKAYRVLDPRTRRVRLARDVIFDESRGWDWTAASGIDARPSSDFAIEYHVEKTTGHPIPSVGGGVVTPSASPTPLQETSPATPATPAPSPSVAPTEFVSPPSHDEERIDAAHSNTPVRYRTVDNLIGENAPAPGIAKRELEEASLLLAGPGEPCSFAEAEGDDAWRAAMREEMDAVNRNGIWELVDLPHGHRPIGLKWVYKLKKNEAGKVVKHKARLVARGFVQQPGIDFDEVFAPVARMESIRLLLAVAAQKGWHVHHMDVKSAFLNGDLAEEVYVKQPPGFVVAGEEDKVLRLRKALYGLRQAPRAWNAKLDCTLKELGFDQSKHEHAMYRRNNGGSALLVGVYVDDLVITGPSTRAIEQFKEEMKAKFQMSDLGLLSFYLGIEVKQGDDGISLNQGRYAQRIVESAGLKDCNPCATPMEERLKLSRDSTAPPVDATKYRRLVGSLRYLVHTRPDLAFAVGFVSRFMERPTEEHMVAVKRILRYVAGTMEYGLHYKREKEEQRLIGYSDSDLAGDIDTRRSTSGMLFFLGSSLVSWQSIKQRVVALSSCEAEYVAATNAATQGIWLARLLGELLGKQPKAIELKVDSKSALALAKNPVFHERSKHIDLRYHFIRSCLEEGSISASFITTMDQLADILTKALGRVRFHELVARIGVVKISSE

SEQ ID NO: 20276 - protein, 749 aa, Oryza sativa
  Clone ID: TF_OSC401048j.C1.p45.np
HLPTLSYQLRLPVDRHSVPHSPGGADMDLADIAQSLAPIKTTIAPPPPRIPPHPAVPARIKEGEIIPRVSLPRFPRFPLSLSLGSVRIHPVILAGDIYGARDPRAFPSSPAAFSPSRCYIIAPRAPLFRFRRSPLALAVGSVLAPCSSLSAVAADLRFAADVAPVLRPTRRHLHPLRRIAVDLVRASVSLADRRSAAVIVIPSRAAAFLHSVRRLRRPCLGVSRGPPFRFPLLSALSGAAPPRRWSPAVTIGARARRSRRPCRRGRLRARPRGCQVGPAVSRPRPRVRLTRGTHGADRRQPRAPGPPWTERLTRGPHFPWTRANEGYTSCGPMADNEKGNKVRSQDIGTSSSRVDEAPDTSCVTLVQHLINQNRLLIEILQQHQTPILNLSQTQPQVQLEAVQALTPQVSMPPASRRTHGDVPHVDPKGASNICFMCDEQGHYARERPQQKRKTPMRTEDEVRKMIITSTEWPPPGMTRRQRRNTFRGAPQLTEHLLANGGRVSDSEDSDQVSSDDEDEMERKACSRCGEIGHVASSCATICVHCEEDHPPDRCPTSRITCFFCEGTDHVPKDCQFSFLLTKKMANQPASSNGEKHQGNTNPRQDYSFSLTPVPGQRNQNEKRKCRVREDICCFNCQGMGHFADKCPKPRNIAAGTSVHAAPCNQKLAPQRIVIHASQSSPMARVATAPTPASALPQGVNAHFQPQQRIVVDGRSCVSPRPTPGQAKGDTKQKTVIRFNQQSEGSFSCE

SEQ ID NO: 20277 - protein, 417 aa, Oryza sativa
  Clone ID: TF_OSC401054j.C1.p18.fg
MADNEKGNKVRSQDIGTSSSRVDEAPDTSCVTLVQHLINQNRLLIEILQQHQTPILNLSQTQPQVQLEAVQALTPQVSMPPASRRTHGDVPHVDPKGASNICFMCDEQGHYARERPQQKRKTPMRTEDEVRKMIITSTEWPPPGMTRRQRRNTFRGAPQLTEHLLANGGRVSDSEDSDQVSSDDEDEMERKACSRCGEIGHVASSCATMCVHCEEDHPPDRCPTSRITCFFCEGTDHVPKDCQFSFLLTKKMANQPASSNGEKHQGNTNPRQDYSFSLTPVPGQRNQNEKRKCRVREDICCFNCQGMGHFADKCPKPRNIAAGTSVHAAPCNQKLAPQRIVIHASQSSPMARVATAPTPASALPQGVNAHFQPQQRIVVDGRSCVSPRPTPGQAKGDTKQKTVIRFNQQSEGSFSCE

SEQ ID NO: 20278 - protein, 605 aa, Oryza sativa
  Clone ID: TF_OSC900056j.C1.p3.fg
MADNEKGNKVRSQDIGTSSSRVNEAPDTSCVTLVQHLINQNRLLIEILQQHQTPILNLSQIQPQVQLEAVQALTPQVSMPPASRRTHGDVPHVDPKEASNICFMCDEQGHYARERPQQKRKTPMRTEDEVRKMIITSTEWPPPGMTRRQRRNTFRGAPQLTEHLLANGGRVSDSEDSDQVSSDDEDEMERKACSRCGEIGHVASSCATICVHCEEDHPPDRCPTSRITCFFCEGTDHVPKDCQFSFLLTKKMANQPASSNGEKPQGNTNPRQDYSLSLKPVPGQRNQNEKRKCRVREDICCFNCQGMGHFADKCPKPRNIAASTSVHATPCNRKLAPQRIDIHASRSSPIARVATAPTPASALPQGVNAQFQPQPSVDKTEASIGIVPLDVPAQQPRNQVQDEEPKPLTILCTDSLSKELSSMKEVVSLPDLLQAKQRAINLRRAIPSRRPSSASNSNQKEASPVNDSIMQSYHIITEPIKDAVTRTMPAISLQNQNEQPRLWFSVRYLSLCSRKFAAITGNLSEVDSEDMNHEKFWNGSITELPQPSLSQPKGAPWSKSGEEKIPSATGGQAKQFRVVKFCWKFVKTQRKKSDKKRRPPNLSSC

SEQ ID NO: 20279 - protein, 1051 aa, Oryza sativa
  Clone ID: TF_OSC11569j.C1.p3.fg
MRKEKIPHQAPFAIQAAQLLGRAIGAGLFAITPAGERGMCCKAIKLGNARVFPVTTFEPPVSPEEKVKFEALDCLFRGALISVLADNIVDVYMHIPSRKDMWNALEAKFGVSDAGSELYVMEQFYDYKMVDDRSVVEQAHEIQMLAKELENNKCELPDKFGAGGIIAKLPPSWSDFATSLRHKRQEFRVSDLIGSLGVEEKARAKDNRGKKVEGGSSANMVQKKNTHASHNSKKVKSDVKPKARTNFKKKGKGKAKGDCFVCGKSGHWAEDCPERKDRKSANMVISEGGGTSGYGKILPTVLSVFHSPDWWIDTGANIHVGRGSSLLMGNGSLANIHVWVVHGVGTVDLKFTSGKTVQLKNVQHVPSIKKNLVSGSLLCREGFRLVFESNKCVVSKYGTFIGKGYDSGGLFHFSLDDMRNNNNVVNHISENDESNVWHSRPCHVNFGCMTRLANMSLIPKFTLVKGSKCHTCVQSKQPRKPHKASEARDLAPLELLHSNLCEMNGVLTKGGKKYFMTLIDDCTRFCYVYLLKTKDEALHYFKTYKAKVENQLERKIKRLRSDRGGEYFSNEFTSFCEEFGIIHERTPPYSPQSNGVTERKNRTLTEMVNAMLDTARLSQEWWGEAVLTACHVLNKIPMKHKEVTPFEEWERKRLNLSYLRTWGCLAKVNVPIAKKRKLGPNTVDCVFLGYAIHSVGYRFLVVNSEVPDMRVGTIIESRDATFFENEFPMKNTPSTSNHETVIPHKHFAPIEHNDQTPEGNPEEDNIVDTRKSKRQRVAKSFGDDYIVYLVDDTPRTIEKAYSSPDADYWKEAKKLRPDGTIEKYKTRLVARVIPKKKARIFFDTYLPVARLITIRVLLVRAASHGLLVHQMDVKTAFLNGELEEEIYMDQQDRYVLEGQVGMVCKLLKSLYGLKQAPKQWHEKFDTTLTSTGFVVNEADKCVYYRYGGGEGVILCLYVDDILIFGISLNVIEEVKDFLSKSFEMKDLGDADVILNIKLLRGDEGGIAQSHYVDKVLSRFGYSDYKPAPTPYDPSMLLRKNRRIARDQLRYS

SEQ ID NO: 20280 - protein, 470 aa, Oryza sativa
  Clone ID: TF_OSC28694j.C1.p1.fg
MSWHRAGVLLLGAQSCLPIPGVPAVGGVGSVLLFMARMGWELCHVFRPYTVVMFNREKGKNVSGYAPSNSSFQLDQPLASRELTRAHPWSIPSMLLSSQLPLVGSQDQNQYMFDRAFATHVNELPMPEEDVPFCHDCREQGHYALNCPWVYAKEAPSFGLTGQTSLNQPPRTKSSLQPIVQSREPNGENPLNPGKCFPPSLSYHVGSRTKQAKGKKSKNQKRKAPMRTEGEVCKMAISSTEWPPAGITIPRRQRGNTFRGARQLTQHLLSHGGRVSDSEGSDQVSSDYEDESLRHLGEEEMESKACPRCGEIGHVASMCFTLCPHCEEDHPPGECPTRKVTCFLCEGTNHVPKDCQLSVLLTKTAEIQRTTLRLSRQLVSSNSNIDDIIHSTNAPLAAPDSAINHSNNTFSTNHSLHRRPQQRIVVDGRSCVSPRPTPGRAKGNQPQEDDTKQKTVIRFNQQSEGSFSCE

SEQ ID NO: 20281 - protein, 741 aa, Oryza sativa
  Clone ID: TF_OSC400381j.C1.p11.fg
MRPGRRWGYRRVAVALAVCVHAAVLLSAVVYLSSVLSAAGPGASSSSLQETEMMRLTAKLEQIIGRPPHNRAHLPSHAFAPSKSGLATAIQALDWGTDAEEDEDDVIAPELHQRSAETFNPQTAKARKAASPSPASKAFHQEINARSQEEELDITAERGEGQSAITPPPEKAQEEDAEKKAREKATLKSIIVAPARATSKSQIEAEEQDLSSKWQAVKPKFWWRKRQNPSSSTSQVVFNRPATSFNPLNLREKFKEILHGKCFRCFASDHQAAACRDPIRCYTCRRSGHISFRCPNKSKQPIHSRLTFPKQAPSIQSRLIFPPLPSKNQQQPTTTRPGSVFHRLHKPAVTMDHIPGLPNQRPAVGYATVPMTELMQHELERLHYHGALISAEVEGQETSPREVARALTQQVGIPISDLRVTRHHPEDFFVFFDFPEGQAAAARRGFITLDGGRFTITPWSADRHVHHPNWWFRVRLCLEGLPQYAWNRAGLEGVMVLSTFFPPGAGRVTSGITPPLPDEIALPPRGRLPHVIVHLDEMEDWTPGPPRSPSFGVSGLPSSDLSDSGGPIPTVRTFQWYLGCADGTQPPRRRAAARRGCRAPPQRREDPEDDEDDDGRRRHAEDIPPRRRSLRDVIIGRGRSVESRAAEGVRHRSRTPHPSGRQRAHGDGRQGRSQTRHSSRCSCRYRSRRTRSPSSLTPRDQDGTGDAGCATTKVVAVSGQADGDQQCSARSVVAPSGKTIS

SEQ ID NO: 20282 - protein, 497 aa, Oryza sativa
  Clone ID: TF_OSC401054j.C1.p53.fg
MEVDEVGGRWTFSRANEGYTSCGPVVEMSWQRVGALLLGGSVLPACPGCPGRRGIGSVLLFMARMGWELCHVFRPYTVVMFNREKGKNVSGYASSNSSFQLNPPLSSRELTRAHPWSIPSMLLSSQLPLVGSQDQNQYVFDRAFATQVNELPMPEEDVPFCHDCREQGHYALNCPWVYAKEAPSFGLAGQTSLNQPPHTKSSLQPSVQSREPNGENPWNPGKCFPPSLSYHVESRTKQAKGKKSKNQKRKAPMRTEEEVRKMTITSTEWPPAGITIPRRQRGNTFRGARQLTQHLLSHGGRVSDSEGSDQVSSDYEDESPRHLGEEEMESKACPRCGEIGHVASMCFTLCPHCEEDHPPGECPTRKVTCFLCEGTNHVPKDCQLSVLLTKTTEIQRTTIRLSHQLVSSNSNIDDIIHSTNAPPAAPDSAINHSNNTFSPNHSLHRQPQQRIVVDGRSCVSPRPTPSRAKGNQPQEGDTKQKTVICFKQQSEGSFSRE

SEQ ID NO: 20283 - protein, 1019 aa, Oryza sativa
  Clone ID: TF_OSC900220j.C1.p13.fg
MARRALRLRLSLSLSFCNGPESNPTEPPVSPEEKVKFEALDCLFRGALISVLADNIVDVYMHIPSRKDMWNALEAKFGVSDAGSELYVMEQFYDYKMVDDRSVVEQAHEIQMLAKELENNKCELPDKFVAGGIIAKLPPSWSDFATSLRHKRQEFRVSDLIGSLGVEEKARAKDNRGKKVEGGSSANMVQKKNTHASHNSKKVKSDVKPKARTNFKKKGKGKAKGDCFVCGKSGHWAEDCPERKDRKSANMVISEGGGTSGYGKILPTVLSVFHSPDWWIDTGANIHVGRGSSLLMGNGSLANIHVWVVHGVGTVDLKFTSGKTVQLKNVQHVPSIKKNLVSGSLLCREGFRLVFESNKCVVSKYGTFIGKGYDSGGLFHFSLDDMRNNNNVVNHISENDESNVWHSRPCHVNFGCMTRLANMSLIPKFTLVKGSKCHTCVQSKQPRKPHKASEARDLAPLELLHSNLCEMNGVLTKGGKKYFMTLIDDCTRFCYVYLLKTKDEALHYFKTYKAKVENQLERKIKRLRSDRGGEYFSNEFTSFCEEFGIIHERTPPYSPQSNGVTERKNRTLTEMVNAMLDTARLSQEWWGEAVLTACHVLNKIPMKHKEVTPFEEWERKRLNLSYLRTWGCLAKVNVPIAKKRKLGPNTVDCVFLGYAIHSVGYRFLVVNSEVPDMRVGTIIESRDATFFENEFPMKNTPSTSNHETVIPHKHFAPIEHNDQTPEGNPEEDNIVDTRKSKRQRVAKSFGDDYIVYLVDDTPRTIEKAYSSPDADYWKEAKKLRPDGTIEKYKTRLVARVIPKKKARIFFDTYLPVARLITIRVLLVRAASHGLLVHQMDVKTAFLNGELEEEIYMDQQDRYVLEGQVGMVCKLLKSLYGLKQAPKQWHEKFDTTLTSTGFVVNEADKCVYYRYGGGEGVILCLYVDDILIFGISLNVIEEVKDFLSKSFEMKDLGDADVILNIKLLRGDEGGIAQSHYVDKVLSRFGYSDYKPAPTPYDPSMLLRKNRRIARDQLRYS

SEQ ID NO: 20284 - protein, 670 aa, Oryza sativa
  Clone ID: TF_OSC900403j.C1.p14.fg
MLDEYKTSDRFWAEAVNTACHAINRLYLHRLLKKTPYELLIGNKPNVSYFRVFGSKCYILTKKARSSKFAPKVDEGFLLGYGSNECAYRVFNKTSGIVGIARDVTFDETNGSQVEQVDSHVLGEEEDPSVAIKRCEKAPSSTGLSTSWYTWSNHWASRIRSIPTTCTSSTRRSTGSSRMMTKRFEMSMMGELKFFLGLQIKQLKEGTFICQTKYLKDMLKKFGMENAKPIHTPMPSNCHLDLNEQGKDVDQKMFNREKGKNVRGYASSNSSFQLNPPLASRELTRAHPWSIPSMLLSSQLPLVGSQDQNQCVFDRAFATQVNELPMPEEHVPFCHDCREQGHYALNCPWVYAKEAPSFGLAGQTSLNQPPRTKSSLQPSVQRREPIGENPLNPGKCFPPSLSYHVGSRTKQAKGKKSKNQKRKAPMRTEEEVRKMTITSTEWPPAGITIPRRQRGNTFRGARQLTQHLLSHGGRVSDSEGSDQVSSDYEDESPRHLGEEEMESKACPRCGEIGHVASMCFTLCPHCEEDHPPGECPTRKVTCFLCEGTNHVPKDCQLSVLLTKTAEIQRTTLRLSRQLVSSNSNIDDIIHSTNAPLAAPDSAINHSNNTFSTNHSLHRRPQQRIVVDGRSCVSPRPTPGRAKGNQPQEDDTKQKTVIRFNQQSEGSFSCE

SEQ ID NO: 20285 - protein, 910 aa, Oryza sativa
  Clone ID: TF_OSC101630j.C1.p12.fg
MEFGWALRRPMRLPDSPRHERGLPAALRGVGVKPEGRSAITPPPEKAQEEDAEKKARGKATLKSIIVAPARATSKFQIEAEEQYLSSKWQAVKPKFWWRKRQNPSSSTSQAVFNRPAASFNPLNLREKFKEILHGKCFRCLASDHQAAACRDPIRCYTCRRSGHISFRCPNKSKQPIHSRLTFPKQAPSIQSQLIFPPLPSKNQQQPTTTRPGSVFHRLHKPTVTMDHIPGLPNQRPAVGYATVPMTELMQHELERLRFHGALISAEVEGQETSPREVARALTQQVGIPISDLRVTRHHPEDFFVFFDFPEGQAAATRRGFITLDGGRFTITPWSADRHVHHPNWWFRVRLCLEGLPQYAWNRAGLEGVMGPICLFDRIEHESVQRQNMAIFSCWMWMRNPDLLPRIVISTFFPPEAGRVTSGITPPLPDEIAPPPRGRLPHVIVHLDEMEDWTPGPPHPPCSPSSGVSGLPSSDSSDSGGPIPTVRTFQWYLGCADGTQPPRQRAAVRRGCRALPQRREDPEDDEDDNGRRRHAEDIPPRRRSLRDVIIGRDWSVESRAAEGARHWSRTPHPSGRQRAHGDGCQGRSRTRHSSRCSCRCRSRRTRSPSSLTPRGQDGTGDAGGATTKVVAVSGQADGDQQPVDALVSLPDPLIKILCSSPLLPFSDDQGDHDPMLPLLAEIAPKSSREAENETKRTGGEEPILGEDKVASAAELGQEKMGHLVPDAQQAPKMDLLAQSTGDDEAQASTGDQPTLVQQADCEEQHQATVQTQPIHGGEGEREKVVLSPLFSQLQPPIILQAPLELAPPGAAKTKGCGRKVVQMPSRRSGRKARFSSVPVSKRAEVRLMEEMGLLTPGEPVVDAVVEAYAKSFDTPLPLHVIAGLRALTLLDGVHDMPVPGEKGTTATAVV

SEQ ID NO: 20286 - protein, 369 aa, Oryza sativa
  Clone ID: TF_OSC11448j.C1.p1.fg
MEAELTALDTATVEAEWLRELLVDLPVVEKPVPAILMNCDNQTVIIKVNSSKDNMKSSRHVKRRLKSVRKQKNSGVIALDYVQTAKKLADQFTKGLPRKRSEPPLSHEEEAKFEASDCLFRGALFSVLADNIVDVYMHMPSGKDMWDALEAKFGVSDAGSELYVMEQFYDYKMELENNNCELPDKFVAGGIIAKLPPFLSDFATSLKHKRQEFSVNDLIGSLGVEEKARAKDNRGKKIEGGSSANMVQKKNPHASHNNKKVKPDVKPKATTNFKKKGKGKAKGDCFVYGKPGHWAKDCPERNDKKSANIVISEGGGTSGYGRERFLLVDGKRVACGYSWCWYGRSEVYFGKDRAAEERATCPFNKEESS

SEQ ID NO: 20287 - protein, 639 aa, Oryza sativa
  Clone ID: TF_OSC900186j.C1.p18.fg
MPPQVSLQLVVMAADEGSQIWWLVVMSDESGISQADGGKRSEPPLSHEEEAKFEASDCLFRGALFSVLADNIVDVYMHMPSGKDMWDALEAKFGVSDAGSELYVMEQFYDYKMELENNNCELPDKFVAGGIIAKLPPFLSDFATSLKHKRQEFSVNDLIGSLGVEEKARAKDNRGKKIEGGSSANMVQKKNPHASHNNKKVKPDVKPKATTNFKKKGKGKAKGDCFVYGKPGHWAKDCPERNDKKSANIVISEGGGTSGYGKFLPTVLSVFHSPDWWVDTGANIHVGRGSSLLMGNGSLAAIHGVGSKCHTCVQLKQPRKPHKASEARNLAPLELVHSDLCEMNGVLTKGGKKFFMTLIDDCTRFCYLYLLKTKDEALHYFKIYKAEVENQLERKIKRLRSDRGGEYFSNEFTSFCKEFGIIHERTSPYSPQSNGVAERKNRTLTEMVNAMLDTAGLPKEWWGEAILTACHVLNKIPMKHKEITPFEQWERKKLNLSYLRTWGCLAKEAVRSEIDSIMFNGTCEVVERPYGCKPVGCKWVFKKKLRPANGFSTKSLGLMMDVKTAFLNGELEEEIYMDQPDGYALEGQEGMVCKQLKSLYGLKQAPKQWHEKFDTTLTSAGFVVNEADKCVYYRYGGGE

SEQ ID NO: 20288 - protein, 245 aa, Oryza sativa
  Clone ID: TF_OSC15136j.C1.p2.hg
MRTEEEVRKMTITSTEWPPAGITIPRRQRGNTFRGARQLTQHLLSHDGRVSDSEGSDQVSSDYEDESLRHLGEEEMESKACPRCGEIGHIASMCLTLCTHCEEDHPPGECLTRKVTCFLCEGTNHVPKDCQLSVLLTKTVEIQRTTLRLSHQLVSSNSNIDDIIHSTNAPPAAPDSAVNHSDNTFSTNHSLHRQPQQRIVVDGRSCVSPRPTPGQAKGNQPQEGDTKQKTVIHFKQQSEGSFSCE

SEQ ID NO: 20289 - protein, 727 aa, Oryza sativa
  Clone ID: TF_OSC25727j.C1.p1.fg
MKCFWVSTGKPMEVLNADQQKEFDEATTLFVGCILSVLGDRLVEVYIHMTDAKELWDALIAKFGATDASNNLYIMELFHDYKMADNRSVVEQAHVIQTMAKKLEQAHEYSVEGLIASLDVEEKTREKDSASKGDGGQSSANVVHKAQNKSKGKYKAQQTTNLKKKKNNNPNQDERTCFVCGLPGHLARKCPQRKGMKALAGQTSKSANVTIGNTRDGSGYDNLPSGFSVNQSTNWWIDIGANVARGSTVLIGNGSHASVHGVGTVDLKFTSGKIVQLKNVQHIPTIDRNLVSGSRLTRDGFKLVFESNKIVLSKHGYFIGKCYECGGLFRFSLSDFLQVPNRNKDKTPYEIWIGRKPSLSYLRTWGCLAKVNVPITKKRKLGPKTVDCVFLGYAHHSIAYRFLIVKSEVPDMHVGTIMESRDATFFVNFFLMKDTHSSSSQPSEIIPSSITSPEQTEHTHEHVTEENDSEGPRRSNRQRTAKSFGDDFIVYLVDDTSKSISKAYASPDADYWKEAVRSEMDSIITNGTWEVIERPYGCKPVGCKWVFKKKLRPDGTIEKYKARLVAKCYTQKEELDEEIYMDQPDEFVVDGQEGKKQAPKQWHEKFDKTLTSAGFAINEKILNRIGYIDKLTALDTATVEAEWVRDLLMHLPIVEKSVPAILMNCDNQTKAGKSLHEGTITKCDRQCIEGDGFETHSILERTYLCELDCWSQSMKMLGESSRKLTKD

SEQ ID NO: 20290 - protein, 245 aa, Oryza sativa
  Clone ID: TF_OSC26403j.C1.p1.fg
MELFHDYKMADNRSVVEQAHVIQTMAKKLEQAHEYSVEGLIASLDVEEKTREKDSASKGDGGQSSANVVHKAQNKSKGKYKAQQTTNLKKKKNNNPNQDERTCFVCGLPGHLARKCPQRKGMKALAGQTSKSANVTIGNTRDGSGYDNLPSGFSVNQSTNWWIDIGANVARGSTVLIGNGSHASVHGVGTVDLKFTSGKIVQLKNVQHIPTIDRNLGSGSRLTRDGFKLVFESNKIVLSKHGYLI

SEQ ID NO: 20291 - protein, 448 aa, Oryza sativa
  unsure (1)..(448): unsure at all Xaa locations
  Clone ID: TF_OSC401381j.C1.p2.np
PSXPLEACEVERRGGTHGRTRLALLGRAGGARARRTFEWSEKLVPYPCADVDEATTLFMGYILSVLGDCLVEVYMHMTLRSCGMWDALNTKFGATDASNDLYVMQFHDYRMADNRFVVEQAHEIQTMAKELVAVSXLQDGXQPFCSXAGYRPWLKNSYTALKHNRQEYTVEGLIASLDVEEKAHEKDFAPKGDGGQSSANVVHKAQNKSKGKYKAQQTTNFKKQKKNNNNPNQDERTCFVCGLPGHLARKCPQRKGMKAPAGXTSKSANVTIGNTREGTTYGNLPTIFSVNQSTNWWIDTGANVHVCADISLFSSYQVARDSTVLMGNGSHASIHGVGTVDLKTSGKIVQLKNVQHVPTINRNFVSGSRLTRDRFKLVFESNKVVVVKSFHYGRKFLAMGEFLKLILKVFVLSEIVYIVAKISKEMMFWHCKLGYIVFIIMDRSSWMY

SEQ ID NO: 20292 - protein, 470 aa, Oryza sativa
  Clone ID: TF_OSC406456j.C1.p1.fg
MSWQRVGALLLGAQSCLPVPGVPAVGRIGSVLLFMARMGWELCHVFRPYTVVMFNREKGKNVRGYASSNSSFQLNPPLASRELTRAHPWSIPSMPLSSQLPLVGSQDQNQYVFDRAFATQVNELPMPEEDVPFCHDCREQGHYALNCPWVYAKEAPSFGLTGQTSLNQPPRTKSSLQPSVQSREPNGENPLNPGNCFPPSPSYHVGSRTKQAKGKKSKNQKRKAPMRTEEEVRKMAISSTEWPPAGITIPRRQRGNTFRGARQLTQHLLSHGGRVSDSEGSDQVSSDDEDESPRHLGEEEMESKACIRCGEIGHIASMCLTLCAYCEEDHPPGECPTRKVTCFLCEGTNHVPKDCQLSVLLTKTAEIQRTTLRLSRQLVSSNSNIDDIIHNTNAPPAPPNSAINHSNNIFSTNHSLHRQPQQRVVVDGRSCVSPRPTPGQAKGNQPQEGDTKQKTVIRFNQQSEGSFSCE

SEQ ID NO: 20293 - protein, 468 aa, Oryza sativa
  Clone ID: TF_OSC18459j.C1.p2.np
MSWQRVGALLLGGSVLPACPGCPGRRGIGSVLLSMARRGWKLCHVFRLYTVVMFNREKGKNVSGYASSNSSFQLNPPLASRELTRAHPWSIPSMLLSSQLPLVGSQDQNQYVFDRAFATQVNELPMPEEDVPFCHDCREQGHYALNCPWVYVKEAPSFGLAGQTSLNQPPRTKSSLQPSVQSEEPNGDNPLNPRKCFPPSLSHHVGSRTKQAKGRKSKNQKRKAPMRTEEEVRKMTITSTEWPPPGMTKRQRRNTFRGAPQLTEQLLANGGRVSDSEDSDQVSSDDEDEKSPQGFNQNKMEHKACSRCGEIGHVASMCLTLCTHCEEDHPPGECLTRVTCFLCEGTNHVPKDCQLSVLLTKTAEIQRTTLRLSHQLVSSNNNIDDIIHRTNAPLAPPNFAINHGNNTFSTNHSLHRQPQQRIVVDGRSCVSPRPTPGQAKGNQPQEGDTKQKTVIRFKQQSEGSFSCE

SEQ ID NO: 20294 - protein, 429 aa, Oryza sativa
  Clone ID: TF_OSC400691j.C1.p14.fg
MSWQRVGALLLGAQSCLPVPGVPAVGGIGSVLLSMARMGWELCHVFRPYTVVMFNREKGKNVRGYASSNSSFQLNPPLVSRELTRAHPWSIPSMPLSSQLPLVGSQDQNQYVFDRAFATQVNELPMPEEDVPFCHDCREQGHYALNCPWVYAKEAPSFGLTVQTSLNQPPRTKSSLQPSVQSREPNGENPLNPGNCFPPSLSYHVGSRTKHAKGKKSKNQKRKAPMRTEEEVRKMTITSTEWPPAGITIPRRQRGNTFRGARQLTQHLLSHGGRVSDSEGSDQVSSDYEDESLRRLGEEEMESKACPRCGEIGHIASRCLTLCPHCEEDHPPGECPTRKVTCFLCEGTNHVPKDCQLSVLLTKTAEIQRTTLRLSRQLVSSNSNIDDIIHSTNAPLAAPDSAVNHSDNTFSTNHSLHRQPQQRISPESE

SEQ ID NO: 20295 - protein, 430 aa, Oryza sativa
  Clone ID: TF_OSC412750j.C1.p3.fg
MDEVGRRWTFSRANEGYTSCGPEWWPWVGLEQAGTPGRVPSSVQIMVGLGLRQMFNREKGKNVRGYASSNSSFQLNPPLVSRELTRAHPWSIPSMPLSSQLPLVGSQDQNQYVFDRAFATQVNELPMPEEDVPFCHDCREQGHYALNCPWVYAKEAPSFGLTVQTSLNQPPRTKSSLQPSVQSREPNGENPLNPGNCFPPSLSYHVGSRTKHAKGKKSKNQKRKAPMRTEEEVRKMTITSTEWPPAGITIPRRQRGNTFRGARQLTQHLLSHGGRVSDSEGSDQVSSDYEDESLRRLGEEEMESKACPRCGEIGHIASRCLTLCPHCEEDHPPGECPTRKVTCFLCEGTNHVPKDCQLSVLLTKTAEIQRTTLRLSRQLVSSNSNIDDIIHSTNAPLAAPDSAVNHSDNTFSTNHSLHRQPQQRISPESE

SEQ ID NO: 20296 - protein, 878 aa, Oryza sativa
  Clone ID: TF_OSC401056j.C1.p5.fg
MSTTGDNNNTGDKDKAILPQTPAEGHSRVGFAASLKPHAFDGSNYKRWKARALLWLTAVHCFFVSRGKPSELPLSPEEEAKFEAADCLFRGALISVLADNIVDVYMHMPSRKDMWDAFEAKFGVSDASSELYVMEQFYDYKMVDGRSVVEQAHEIQMLAKELENNNCELPDKFVAGGIIAKLPPSWTDFATSLKHKRQEFSVTDLIGSLGVEEKARAKDNRGKKIEGGSSANLVQKKNPHASHNNNKKVKPDVKPKATTNFKKKGKGKAKGGCFVYGKSGHWAKDCPECKDKKSTNMVISEGGGTSRYGKFLPTVLSVCHSPDWWVDTGANIHVGRGSSLLMGNGSLAAVHGVGYDSGGLFRFSLDDMCNKVVNHDEALHYFKIYKAEVENQLERKIKRLRIPTKHKEVTPFEEWEKKKLNLSHLRTWGCLAKRCHFFENEFPMKNAPSTSSQEPILSPEHFMPIEHIDQTLEENPKEDNIVATRKSKRQRTAKSFGDDYIVYLMDDTPRTIEEAYSSPDADYWKEAVRSEMDSIMSNGTWEVVERPYGCKPVGCKWVFKKKLRPDGTIEKYKARLVAKGYTQKEGEDFFDTYSPVARLTTIRVLLALAASHGLLVHQMDVKTAFLNEELEEEIYMDQLDGYVLEGQKGMVCKLLKSLYGLKQAPKQWHEKFDNKLTSAGFVVNEADKCVYYRYGGGEGVILCLYVDDILIFGTRLNVIEEVKDFLSKSIEMKDLGVGGVILNIKLLRGDEGGITLVQSHYVDKVLSRFGYSDCKAAPTPYDPSVLLRKNRRIARDQLRYSQIIGSLMYLASATRPDISFAVSKLSRVFSNPGDDHWHALERVIRYLKGTMSYEIHYAGTQKCWRAIVIQIGYLMLMR

SEQ ID NO: 20297 - protein, 1327 aa, Oryza sativa
  unsure (1)..(1327): unsure at all Xaa locations
  Clone ID: TF_OSC497j.C1.p1.np
MRVSLLAQGVWGAVDPGYAEFKEDRVALAAILQAVSKEMLRPLAKKDSAKAAWDAIKLMRVGVDRVREAKEQAFRQQYEAMRFKVGETAEEFSLRLTSVVTDIRDMGGVLDDEHMIKKFLRVVPKRYKQVAVALEQFLDLKTMPIEELVGRLSTAERDDNVDDDDDAPRGNRLYLTEEECLARMKLKDHDGSSSGSKSGGGGEKSRHDKPCSGGRGDRGHDNKSGGGSSSTRTWDRSKVKCFNCDKLGHYSKECRKPRREWREEANLVQVENEQPALLFTEVHQTVFLNEERVIKEMPDDVWYFDTGASNHMIGNRAMFASLDEKVTGTVRFGDNSVVEIQGMGAVTFQCKNGEHRALTEVYYIPRLRSNIISLGQLEEGGCRGVLENAALTLFDAERQLLAWVPRKNRMYTLSLKLATPVCLLTKADDEAWRWHERFGHLNFRSLRDMSLKHMVEGMPLVNHVEQFCQGCSLGKHHRAPFPRASAFRAERGFELVHGDLCGPITPTTTTGKRYFLLIVDDYSRYMWVEMLRSKDEAFKCFKKIKAAAENELDVKLKAFRTDRGGEFNSNEFTSYCVELGIRRDTTAPYTPQQNGVVERRNRTVVEMARSMLKSKGVPAHFWAEAVKTAVHVLNRAPTRALDGMTPYEALYRRKPKVHYLRTFGCAALVKKVGPGVSKLSDRSIPGVFIGYEDNAKAYRVYDPVAKKLYVSRDVVFEEEKKWNWETNTGRQDPDWSGTFTVVYTPRDMGDSLGSNGGTQEVSDAPGQQSPATPERPPPATPSMPTTSTGVEFVSPPMGGSCDSEGMPLRYRSLENLQQTTLPVDDTVMSDVNDFSGFCLVAAEEPDSVERALAEPNWRRAMEDEMSSIRGNETWEFARLPEGHRAIGLKWVFKVKRDPAGNIVKYKARLVAKGYAQRQGVDFDEVFAPVARLEMVRLLLALAAHDGWSVHHMDVKSAFLNGDLEEEVYVQXPPGFIDDKQGGAVLRLRKALYGLRQAPRAXHSKLDATLVSLGFDRCPMEHGVYKRKTGDDLLLVGVDLGLLSYYLGIEVQQSRGIITMCQSSYAKKILEMSGMIGCNACATPMENRLKLSKKDGSAAVNPTEYRSIVGSLRYLVNTRPDLAYSVGIVSRYMEAPTSQHMAAVKHILRYLSGTIGFGCCYRKQDQSDNGLMGYSDSDIASDLDDRRSMSGAAFFLGASLVTWTSQKQKVVALSSCEAEYIAAASAACQGLWLSRLLNDLIGGAAKKFKLLVDNKSAIALTKNPVHHDRSKHIDTKFHFIRQCVEEEKVQIDHIGTDGQLADLPTKPLGRVKFLELRRKLGVENVKVT

SEQ ID NO: 20298 - protein, 556 aa, Oryza sativa
  Clone ID: TF_OSC17441j.C1.p2.gm
MEEKPSTSCLFGSQVKSSLKLHARSEKISSKSSFREDQESRQCHPPQVPDQMPARNPNQSQSQEFPISAPKTPVKMLSRSPKITTAKSSSDQRKVSATCYDCGEQGHYVRNCPWKVFARSPEKDEKQCPGSNQAPSQSTDKKDGTLQPNSGANRKVTWKMDNGRTMIITSSEFTPEDAARIPKRQRGRNTFRGARQLTRHLIKYGSPRPEDDESGEQFSADDDDDDTDDDDDTTLNSFMERGLEFKAYHVPKDCQLNAVIAKTKKEQGTTVQPIRQPMTIDNSGHNPSALPPTLVPVEANHGRSNVTKDVHKSLLVPVSAAKVHNQKPAPRDQASRFCHNCRKPGHRFSDCPLPRAAKAVRRDSQVTSTAHDTNRHLNVQPPPQRIIVKGTVKGHIVPPAIVSSLQHQRQQRKQCQENNSSLQLQRGGTPLRQHPRQVLSAPGRPTVVSSSNAPRIAPIWRPIDKSPFGNPTGKKILPVTADKTVAPPPSKINKQSNVPGHTYPHSARDRGDVGARPPVQSDVTGNRPVTDWSPPIDRGQLGAPHACPYRVKCSEG

SEQ ID NO: 20299 - protein, 1784 aa, Oryza sativa
  unsure (1)..(1784): unsure at all Xaa locations
  Clone ID: TF_OSC400545j.C1.p64.np
ILETDERRTRNRVIRFCKVQWSNHSEGESTWEREDELKSAHPHLFASSSESISTFPESPFSQEKNLKSSKSSKATPGLEWLIPGLEIELCSRGGCSEXLGLCNRMPRYKPEYLFGTEGFVQELRTMSFAIGFGTAPLYAQIPHDHDEEKCRVKVTLNSNREDIPSVMFEAGGGNYIHACQEVARIAIGELRDRYSDQLANTEYRYHPLQPQGSDRGSYLEPEGIENDATTRHLVEMLWAMDETRAEIVLAAQDREDRNRGKICKLEDKVDRLEKELAALKGEAPPQKARVRLTAMKRALFVPRYQLAPKMVLTRSNGKGPNINNNNNNNGENPTLAQVLAQQAQLMNMMMQQLQNQQNQGNNHAPPQNKLAEFLRVRPPTFSSTTNPVEAGDWLHAIEKKLDLLQCTDQEKVSFASHQLHGPASEWWDHFRLNRTTAEPISWLEFTAAFRKTHIPSGVVSLKKKEFRSLTQGSRTVTEYLHEFNRLARYAPEDVHTDEERQEKFLEGLNDELSYPLMTGDYHDFQKLVDKAIRQEDKYNRMEQKKRRIAHFKAQQGNSQRPRLTLGPQSMPQGGSSSVVRPQRQFFNNNAGNNIRNQAPRPIAALTQQQPAKKEQGSKPGVCFNCGEPGHYSDKCPKPRCVKVVPVQSNSTAPASKARVNHVAAAEAQGAPDVILGTFPVNSFPAIVLFDSGATHSFLSMSFAGNHGMEVEDLRRPLMVSTPSNQALSLQRSPSVRIEIQGVPFLANLILLESKDLDVILGMDWLARYKGVIDCANRKVTLTSNDGRVVTVHALSSEPLRSSLNQIALEEIPIVQEYPDVFPDDLPGMPPKRDIEFRIDLVPGTTLIHKRPYRMAANELAEVKRQVDDLLQKGYIRPSSSPWGAPVIFVEKKDHTQRMCVDYRALNDVTIKNKYLLPRIDDLFDQLKGATIFSKIDLRSGYHQLRIKEEDIPKTAFTTRYGLFECTVMSFGLTNAAAFFMNLMNKVFMEYLDKFVVVFIDDILIYSRTKEEHEEHLRLALEKLREHQLXAKFSKCEFXLSAVKFLGHVISAGGVAVDPSNVESITNWKQPKTVSEIRSFLGLAGYYRRFIENFSKIAKPMTXLLQKDVKYKWSEECEQSFQELKSRLISAPILILPDPKKGFQVYCDASKLGLGCVLMQDGKVVAYASRQLRPHEKNYPTHDLELAAVVHALKIWRHYLFGTRTEVYTNHKSLKYIFTQPDLNMRQRRWLEFIKDYDMGIHYHPGKTNVVADALSRKGYCNATEGRQLPLELCKEFKRLNLGIVSRGLVAALEAKPTLIDQVREAQINDPDIQEIKKNMRRGKAIGYLEDEQGTVWLGERICVPNNKDLKDAILKEAHDTLYSIHPGSTKMYQDLKERFLWASMKREIAEYLAVCDVCQRVKVEHQKSAGLLQPLKIPEWKWEEIGMDFITGLPRTSSGHDSIWVIVDRLTKVAHFIPVKTTYSGSRLAELYMARIVCLHGVPKKIVSDRGSQFTSKFWKKLQEEMGSKLNFSTAYHPQTDGQTERVNXILEDMLRACALDFGGSWNKNLPYAEFSYNNSYQASLQMAPYEALYGRKCRTPLLWDQTGERRVFGTDILREAEEKVKIIQERLRVAQSRQKSYADNRRRDLSFEEGDHVYLRVTPLXGVHRFRTKGKLAPRFVGPYKVVSRRGEVAYQLELPQSLAGVHNVFHVSQLKKCLRVPTEEANLEQIEIQEDLAYVEKPIRILEWTDERRTRNRVIRFCKVQWSNHSEEESTWEREDELKSAHPHLFASSSESRGRDSV

SEQ ID NO: 20300 - protein, 1592 aa, Oryza sativa
  Clone ID: TF_OSC401340j.C1.p25.fg
MGKLKESEELLERCLEVRKRILSEEHFQITYQVFEFFTTSSALLAINTDWEVAVTLVHLARLTMLNFISDKEDSDLARSKLVRARLLVNDSISSPPEVRHVRRSVSAFGRLEHSASAGRRARRSRRAQASNGSDRCSSSEGGQTGGSGVGSSQGGGGGGGGGGGRCGTCGGGSLRSWQEKGHGSGQSGGQQPTSTAAAAAQGTARPPTGTQTGAGVPAAARSPHAAIAGSAALSPDRRHGHHVVQTVVRDFGPVGGWPTLTKTNYIEWAVVMRVRLQVRHMWEAVRYGDVDYDEDRRALDALIATVPPEMQFSLSQKRTAKEAWDAIAAARIGRDRARKSTLQALRKEWENLAFKPGEDVDDFALRLNTLLQKMVQYGDDTYDEERAVEKLFRYVPEKYRQIARSIESLLDLSTMSIEEALGRLKVVDGDEPQPLLGPITIGGKLHLTREQWEASQGNGRKGESSSPTGGRKPRKARGGVQLRWARRHAEGGARRGAQGVATGNHKPARDDACRSCGKLGHWAKDCRQPRRGQVHVARVEEEPALLLAHANIELPPAAPAAAAFLHLDEPKVLVSLCNGSSNDKADGWYLDTGSTHHMTDRREFFTEFDSSVRGSVKFGDASGVEIKGVGSVTFTAKSGEHRLLTGVYYIPALRNSIISVEQLDENGSRVLVEDGLMRIWDRCRRLLAKVTRGTNRLYILSAQVAQPVCLAARRDDEAWQWHERFGHLHFEALKQLSAKEMVRGMPCLDRVEQLCDVCVVTKQRRLPFPQQTSFRAKEQLELVHGDLCGPVTPATPGGRRYFLLLVDDLSRYMWVMVLGSKGEAADAIRHAQAAAEAECGRKLRVLCTDNGGEFTAAEFASYCADEGIQRHYTTPYSPQQNGVVERRNQMVVGMARALLKQRGMPAIFWGEAVVTAAYILNRSPTKALDGRTPYEAWHGRKPAVSHLRVFGCLAFAKELGHIGKLDDRSTPGVFIGYAEGSKAYRILDPETACAHCARRCVRRRPRVGMGQGGGRWLDFTVEYVHFEGAGGLGSSSSPSVSTQAPESPPTPTPTHPRATTSTTTSSSSTPPQPVTPHAPAPTATPSTSTPTPARVERSPVEFATPLSHDGERIDAYHDGEQLRYRTMEDLLGDQPVPGLVPRDLEAQLHLACDDGEPRSFAEAEKHAAWRAAMQSEMDAVQENRTWELADLPRGHRAITLKWVFKLKRDEAGAIVKHKARLVARGFVQQEGIDYDDACAPVAWMESVRLLLALVAHEGWGVHHMDVKSVFLNVDLKEEVYVHQPPGFVIPGKEGKVLRLHKALYGLRQAPRAWNAKLDSTLKGMGYEQSLHEAAIYRRGNGGNALLVGVYINDLVIIGTKDAEVAAFKEEMKATFQMSDLGPLSFYLGIEVHQDDSGITLRQTAYAKRVVELAGLTDCNPALTPMEERLKLSRDSTAEEVDATQYRRLVGSLRYLTHTRPDLAFSVGYVVALSSCEAEYMAASATSTQALWLARLLSDLLGRDTGTVELRVDSKSALALAKNPVFHERSKHIRVRYHFIRSYLEEGSIKASYINTKDQLADLLTKPLGRIKFLELCSRIGMAQLPHKTTHKT

SEQ ID NO: 20301 - protein, 1623 aa, Oryza sativa
  Clone ID: TF_OSC418119j.C1.p2.fg
MCSRDDCSEWLGLSNRMPRYKPEYLFGVERFVQELRTMSFAIGFGTAPLYAQIPHDRDEEKCRVKVTLNSNSEDIPSVMFEVGGGNYIHACQEVARIAIGELRDRYSDQLADTEYRYHPRQPQGGDRGSYLETEGIENDATTRHLVEILWAMDETRAEVVLAAQDREDRNRDKICKLEDNVDSIRCKWARPGGGGTLHGSFGPGLGEAGRYMDRLEKELAALKGEAPPQKARVRLTARKRALFVPRYQLAPKVRVVEKEATPTLADPPVVNVSDDEGEESKRTHSKVEWGATQDDGDEPNEPSINSDAGSGDWLHAIEKKLDLLQCTDQEKVSFASHQLHGPASEWWDHFCLNRTTAEPITWLEFTAAFRKTHIPSGVVSLKKKEFKSLTQGSRTVTEYLHEFNRLARYAPEDVRTDEERQERFLEGLNDELSYPLMTGDYHDFQKLVDKAICQEDKYNRMKQKKRRIAHFKAQQGNSQKPRLPLGPQSMPQGGSLSVVRPQRQFFNNNAGNNIRNQAPLPVAAPTQQQPAKKEQGSKPGVCFNCGEPGHYSDKCPKPRRVKVVPAQSNSTAPASKARVNHVAAAKAQGAPDVILGTFLVNSVPATVLFDFGATHSFLSMSFAGNHGMEVEDLRCPLMVSTPSNQALSLQRSPSVRIEIQGVPFLANLILLESKDLDVILGMDWLARYKGVIDCANRKVTLTSNDGRVVTVHALSSEFLRSSLNQIALEEIPIVQEYPDVFPDDLPANELAEVKRQVDDLLQKGYIRPSSSPWGAPVIFVEKKDHTQRMCVDYRALNDVTIKNKYPLPRIDDLFDQLKGATVFSKIDLRSGYHQLRIKEEDIHKTAFTTRYGLFECTVMSFGLTNAPAFFMNLMNKVFMEYLDKFVVVFIDDILIYSRTKEEHEEHLRLALEKLREHQLYAKFSKCEFWLSEVKFLGHVILAGGVAVDPSNVESVTNWKQPKTVSEIRSFLGLAGYYRRFIENFSKIAKPMTRLLQKDVKYKWSEECEQSFQELKSRLISAPILILPDPKKGFQVYCDASKLGLGCVLMQDGKVVAYTSRQLRPHEKNYPTHDLELAAVVHALKIWRHYLFGTRTEVYTDHKSLKYIFTQPDLNMRQRRWLELIKDYDMGIHYHPGKANVVADALSRKGYCNATEGRQLPLELCKEFEILNLGIVSRGFVAALEAKPTLIDQVREAQINDPDIQEIKKNMRRGKAIGYLEDEQGTVWLGERICVPDNKDLKDAILKEAHDTLYSIHPGSTKMYQDLKERFWWASMKREIAEYVAVCDVCQRVKAEHQKPAGLLQPLKIPEWKWEEIGMDFITGLPSTSSGHDSIWVIVDRLTKVAHFIPVKTTYSGSRLAELYMARIVYLHGVPKKIVSDRDEQTERVNQILEDMLRACALDFGGSWDKNLSYAEFSYNNSYQASLQMAPYEALYGRKCRTLLLWDQTGERQVFGTDILREAEEKVKIIQERLRVAQSRHKSYADNRRRDLSFEEGDHVYLRVTPLRGVHRFHTKGKLAPCFVGPYKIINRRGEVAYQLELPQSLAGVHNVFHVSQLKKCLRVPTEEANLEQIEVQEDLTYVEKPIRILETNERRTRNRVIRFAKSNGVITRKKNQLGNEKMN

SEQ ID NO: 20302 - protein, 1508 aa, Oryza sativa
  Clone ID: TF_OSC8370j.C1.p11.fg
MMPRCKPEYLFGVEGFVKELRTMSFAIGFGTAPLYAQIPRDRDEEKCRVKVTLNSNSEDILSVMFEAGGGNYIHACQEVARIAIGELRDRYSDQLADTEYRYHPRQPQGSDRGSYLETEGIENDATTRHLVEMLWAMDKTRAEIVLAAQDREDRNRGKICKLEDKVDRLEKELAALKGEAPPQKARVRLTARKRALFVPRYQLAPKVRVVEKEATPTLADPPIVNNKLAEFLRARPPTFSSTTNPVEAGDWLHAIEKKLDLLQCTDQEKKTHIPSGVVSLKKKEFRSLTQGSRTVTEYLHEFNRLARYAPEDVRTDEERQERFLEGLNDELSYPLMTGDYHDFQKLVDKAIRQEDKYNRMEQKKCRIAHFKAQQGNSQRPRLTLGPQSMPRGGSSSVVRPQRQFFNNNAGNNIRNQAPHPVAAPTQQQPAKREQGIKPGVCFNCGEPGHYSDKCPKPRRVKVVPAQSNSTAPASKARVNHVAAAEAQGAPDVILGTFLVNSVPATVLFDSGATHSFLSMSFAGNHGMEVEDLRRPLMVSTPSNQALSLQRSPSVRIEIQGVPFLANLILLESKDLDVILGMDWLARYKGVIDCANRKVTLTNNDGRVVTVHALSSESLRSSLNQIALEEIRIVQEYPDVFPDDLPGMPPKRDIEFRIDLVPGTTPIHKRPYRMAVNELAEVKRQVDDLLQKGYIRPSSSLWGAPVIFVEKKDHTQRMCVDYRALNDVTIKNKYPLPRIDDLFDQLKGATVFSKIDLRSGYHQLRIKEEDIPKTAFTTRYGLFECTVMSFGLTNAPTFFMNLMNKVFMEYLDKFVVVFIDDILIYSRTKEEHEEHLRLALEKLREHQLYVKFSKCEFWLSEVKFLGHVISAGGVTVDPSNVESVTNWKQPKTVSEIHSFLGLAGYYRRFIENFSKIAKPITRLLQKDVKYKWSEECEQSFQELKNRLISAPILILPDPKKGFQVYCDASKLGLGCVLMQDGKVIAYASRQLRPHEKNYPTHDLELAAVVHALKIWRHYLFGTRTEDYDMGIHYHLGKVNVVADALSRKGYCNATEGRQLPLELCKEFERLNLGIVSRDFVAALQAKPTLIDQIREAQINDPDIQEIKKNMRRGKAIGFLEDEQGTRVKAEHQKPTGLLQPLRIPEWKWEEIGMDFITGLPRTASGHDSIWVIVDRLTKVAHFILVKTTYSGSRLAELYMARIVCLHGVPKKIVSDRGSQFTSKFWKKLQEEMGSKLNFSTAYHPQTDGQTERVNQILEDMLRACALDFGGSWDKNLPYAEFSYNNSYQASLQMAPYEALYGRKCRTPLLWDQMGERQVFGTDILREAEEKVKIIQERLRVAQSRHKSYADNRRRDISFEEGDHVYLRVTPLRGVHRFHTKGKLAPRFVGPYKIVSRRGEVACQLELPQSLAGVHNVFYVSQLKKCLRVPTEEANLEQIEVQEDLTYVEKPIRILEIDERRTRNRVIRFCKVQWSNHSEEESTWEREDELKSAHPHLFASSSESRGRDSV

SEQ ID NO: 20303 - protein, 1574 aa, Oryza sativa
  unsure (1)..(1574): unsure at all Xaa locations
  Clone ID: TF_OSC8370j.C1.p11.np
MPRCKPEYLFGVEGFVKELRTMSFAIGFGTAPLYAQIPRDRDEEKCRVKVTLNSNSEDILSVMFEAGGGNYIHACQEVARIAIGELRDRYSDQLADTEYRYHPRQPQGSDRGSYLETEGIENDATTRHLVEMLWAMDKTRAEIVLAAQDREDRNRGKICKLEDKVDRLEKELAALKGEAPPQKARVRLTARKRALFVPRYQLAPKVRVVEKEATPTLADPPIVNVSDDEGEESKRTHSKVEWGATQDDGDEPNEPSILRCPEDLECLFSPVSLLVPCPCQMVLTRSNGNGPNINNNNNNNGENPTLAQVLAQXAQLMNMMMQQLQNQXNQGNNHAPPQNKLAEFLRARPPTFSSTTNPVEAGDWLHAIEKKLDLLQCTDQEKVSFASHQLHGLASEWWDHFRLNRTTAEPISWLEFTAAFXKTHIPSGVVSLKKKEFRSLTQGSRTVTEYLHEFNRLARYAPEDVRTDEERQERFLEGLNDELSYPLMTGDYHDFQKLVDKAIRQEDKYNRMEQKKCRIAHFKAQQGNSQRPRLTLGPQSMPRGGSSSVVRPQRQFFNNNAGNNIRNQAPHPVAAPTQQQPAKREQGIKPGVCFNCGEPGHYSDKCPKPRRVKVVPAQSNSTAPASKARVNHVAAAEAQGAPDVILGTFLVNSVPATVLFDSGATHSFLSMSFAGNHGMEVEDLRRPLMVSTPSNQALSLQRSPSVRIEIQGVPFLANLILLESKDLDVILGMDWLARYKGVIDCANRKVTLTNNDGRVVTVHALSSESLRSSLNQIALEEIRIVQEYPDVFPDDLPGMPPKRDIEFRIDLVPGTTPIHKRPYRMAVNELAEVKRQKDHTQRMCVDYRALNDVTIKNKYPLPRIDDLFDQLKGATVFSKIDLRSGYHQLRIKEEDIPKTAFTTRYGLFECTVMSFGLTNAPTFFMNLMNKVFMEYLDKFVVVFIDDILIYSRTKEEHEEHLRLALEKLREHQLYVKFSKCEFWLSEVKFLGHVISAGGVTVDPSNVESVTNWKQPKTVSEIHSFLGLAGYYRRFIENFSKIAKPITRLLQKDVKYKWSEECEQSFQELKNRLISAPILILPDPKKGFQVYCDASKLGLGCVLMQDGKVIAYASRQLRPHEKNYPTHDLELAAVVHALKIWRHYLFGTRTEVYTNHKSLKYIFTQPDLNMSQRRWLXLIKDYDMGIHYHLGKVNVVADALSRKGYCNATEGRQLPLELCKEFERLNLGIVSRDFVAALQAKPTLIDQIREAQINDPDIQEIKKNMRRGKAIGFLEDEQGTVWLDKRICVPDNKDLKVAILKEAHDTLYSIHPSSTKMYQDLKEXFWWASMKREIAXYVAVCDVCQRVKAEHQKPTGLLQPLRIPEWKWEEIGMDFITGLPRTASGHDSIWVIVDRLTKVAHFILVKTTYSGSRLAELYMARITDGQTERVNQILEDMLRACALDFGGSWDKNLPYAEFSYNNSYQASLQMAPYEALYGVHNVFYVSQLKKCLRVPTEEANLEQIEVQEDLTYVEKPIRILEIDERRTRNRVIRFCKVQWSNHSEEESTWEREDELKSAHPHLFASSSESRGRDSV

SEQ ID NO: 20304 - protein, 1396 aa, Oryza sativa
  Clone ID: TF_OSC900207j.C1.p2.fg
MVHCFELCYAEGIVTISIRWYTSGQSKTIRIAVPAYLLNAIYTNETILCHPLLSPALAYLLHGLLSMSYTLLAIIHQRRSSKVMLKMPRFKPEYLFGIEGFVQELRAMSFTIGFGTAPLYAQIPHDRDEEKCRVKVTLNSDREDIPSVMFKAGGGSYPHACQEVARIAIGELRGRYNDLLADTEYRYHPRQPQGSDRASYVDPEGIENDATTRHLVEMLWAMDESRVEIVSAAQAREDRNRGKICKLEGKVDRLEKELAELKGEAPPQKARVRLTARKRALFVPRYQLAPKVHVVSREAVPVDPPVVNLSDDEEEDSKRTHSKNQQNQGNNHAPPQNKFAEFLRVRPPTFSSTTNLVEAGDWLHTIEKKLDLLQCTDQEKVSFASHQLHGPAFEWWDHFRLNRATAEPITWLEFTAAFRKTHVPSRVVSLKKKEFRALTQGSRSVTEYMHEFNRLARYAPKDVRTNEEHQEKFLEGLNDELSYPLMTGDYSDFQELRQFYNNNNNRNQAPRPVATPVQHQPVKREQENKPGVCFNCGEPGHYSDKCPKPRRVKTIPVQNNSNAPTSKAHVNHVAVAEAQGATDVILEIQGVPFPANLILLESKDLDVILGTDWLDRYKRVIDYANRKVTLTSNDGQVVTVHALPSEPLRSSLNQITLEEIPIVRDYPDVFPDDLPAKVKRQVDDLLQKGYIRPSSSPWGAPVIFVEKKDHTQRMCVDYRALNDVTIKNKYPLPRIDDLFDQLKGATVFSKIDLRSGYHQLRIKDEDIPKTSFTTRYGLFECTVMSFGLTNAPAFFMNLMNKVFMEYLDKFMVVFIDDILIYSQTKEEHEEHLRLALEKLREHQLYVKFSKCEFWLSAVKFLGHVISAGGVAVDPSYYRRFIENFSKIAKPMTRLLQKDVKYKWSEECEQSFQELKSRLISAPILILPDPKKGFQVYCDASKLGLGCVLMQDGNVVAYASHQLRPHEKNYPTHDLELAAVIHALKIWRHYLFGTRTEVYTDHKSLKYIFIQPDLNMRQRRWLELIKDYDMGIHYHPGKANDVADVLSRKGYCNATEGRQLPWELCKEFERLNLGIVSRGFVVALEAKPTLIDQVREAQINDLNIQEIKKNMRRGKAIGYLEDEQGTVWLGERICVPDNKELKDTILKEAHDTLYSIHPGSTKMYQDLKEKFWWASMKHEIAEYVAVCDVCQRVKAEHQKPAGERQVFGTDILREAEEKVKIIQERLRIAQSRHKSYADNRRRDLSFEEGDHLYLRVMPLRGAHRFRTKGKLAPCFVGPYKIISRRGEVAYQLELPQSLAGVHNVFHVSQLKKCLRVPTEEANPEQIEIQEDLTYVEKPIRILETDEKRTRNRVIRFCKVQWSNHSEEEATWEREDELKSAHPHLFVISSESRGQDSV

SEQ ID NO: 20305 - protein, 1504 aa, Oryza sativa
  Clone ID: TF_OSC900380j.C1.p12.fg
MPRYKPEYLFGTEGFVQELRTMSFAIGFGTAPLYAQIPHDRDEEKCCIKVTLNSNREDIPSVMFEAGGGSYIHACQEVARITIGELRESYNDQLADTEYRYHPRQPQGNDRGSYLEPAGIENDATTRHLVEMLWAMDETRVEIVLAAQDREDRNRGKICKLEDKVDRLEKELAALKGEAPPQKARVRLTARKGALFVPRYQLAPKVRVVEKEAAPAPADPPVVNCTDQEKVSFASHHLHGPASEWWDHFRFNRTTAEPITWLEFTAAFRKTHIPSGVVSLKKEFRVLTQGSRFVTKYLDEFNRLPRYTPEDVCTDEERQEKFLEGLNDELSYPLMTGDYHDFQKLVDKAIRQEDKYNRMEKKKHRIAHFKAQQGNSQRPRLAMGPQAVSQGGSSSVVRPQRQLFNNNASNNNRSQAPRPVATPTQHQPAKREQGNKPGVCFNCGEPGHYSDKCPKPRRVKIVPAQNNSSAPASKAHVNHVAAAEAQSAPDVILGTFPVNSVPATVLFDSGATHSFLSMSFAGNHGMEVEDLRRPLMVSTPSNQALSSQRSPSVRIEIQGVPFLANLILLESKDLDVILGMDWLAKYNGVIDCTNRKVTLTSNDGQVVTVHSLPYGPLRSSLNQITLEEIPIVREYPDVFLDDLPGMPPKRDIEFRIDLVPGTTPIHKRPYRMAANELAEVKRQVDDLLQKGYIRPSSSPWGAPVIFVEKKDHTQRMCVDYRALNDVTIKNKYPLPRIDDLFDQLKDATVFSKIDLRSRYHQLRIKEEDIPKTAFTTRYGLFECTVMSVGLTNAPAFFMNLMNKVFMEYLDKFVVVFIDDILIYSRTKEEHEEHLRLALEKLREHQLYAKFSKCEFWLSEVKFLGHVISAGGVAIDPSNVESVTNWKQPKTVSEIRSFLGLAGYYRRFIENFSKIPKPMTRLLQKDVKYKWSEECEQSFQELKSRLISAPILILPDPKKGFQVYCDASKLGLGCVLMQDGKVVSYASCQLRPHENYPTHDLELAAVVHALKIWRHYLFGTRTEVYTDHKSLKYIFTQPNLNMRQRRWLELIKDYDMGIHNHHGKANVVADALSRKGYCNATEGQQLPWELCKEFERLNLGIVSRGFVATLEAKPTLIDQVREAQINDPDIQEIKKNMRRGKAIGYLEDEQGTVWLGERICVPENKELKDAILKEAHDTLYSIYPGSTKMYQDLKEKFWWASMKYERVKAEHQKPAGLLQPLKIPEWKWEEIGMDFITGLPRTSSGHDSIWVIVDRLTKVAHFIPVRTTYFGSRLAELYMARIVCLHGVPKKIVSDRGSQFTSKFWKKLQEEMGSKLNFSTAYHPQIDGQTERVNQILEDMLRACALDFGGSWDKNLPYAEFSYNNSYQASLQMAPYEALYGRKCRTPLLWDQTGERQVFGTDILREAEEKVKIIQERLRIAQSRHKSYADNRRSDLSFEEGDHVYLRVTPLRGVHRFHTKGKLAPRFVGPYKIVSQRGEVAYQLELPQSLAGVHNVIHVSKLKKC

SEQ ID NO: 20306 - protein, 1082 aa, Oryza sativa
  Clone ID: TF_OSC401728j.C1.p15.fg
MSGVAAAAGGDGGGGAPPTGAGASAPGGGAVNDNNNGGNSASPSSGGPFSGAIPVPLLALSLYYVRYVLVPVLHDASMRYCYVPVPDIHDAHSMLLVMLRSPYTAYAMIIALTFWIKICRLMTIFPTIQKLDRSFSVVGFAAALKPHAFDGSNYKRWKARALLWLTAMQCFYVSRGKRSEPPLSPEEEAKFEASDCLFRGTLISVLADNIVDVYMHMPSGKDMWDALEAKFGVSDADSELYVMEQFYDYKMVDDRSVVEQAHEIQMLVKELENNNCELPDKFVAGGIIAKLPPSWSDFATSLKHKRQEFSVSDLIGSLGVEEKARAKDVRGKKVEGGSSANMVQKKNPHASHDNKKVKPDVKSKATTNFKKKDKGKAKVDCFVCDKSGHWAKDCPERKDRKSANMVISEGGGTSGYGKILSTVLSVFHSPDWWVDTGANIHVGRGSSLLMGNGSLAAVHGVGSKCHTCVQSKQPRKPHKASEARNLAPLELVHSDLCEMNGVLTKGGKKYFMTLIDNCTRFCYVYLLKTKDEALYYFKIYKAEEVTPFEEWERKKLNLSYLQTWGCLAKVNVPIAKKWKFGPNTVDCVFLGYAIHSVVYRFLIVNSGVPDMHVGTILESRGATFFENEFPMKHTPSTSSKETVMPHEHLAPIEHNDQTPKENPEEDNIVDTRKSKRQRVAKSFGDDYIVYLVDDTPRTIEETYSSPDADYWKEAVRSEMDSIMSNGTWEVVERPYGCKPVGCKWVFKKKLRPDGTIEKYKARLVAKCYTQKEGEDFFDTYSPVARLTTIRVLLALAASLGLLVHQMDVKTAFLNGELEEEIYMDQPDGYVLEGQEGMVCKLLKSLYGLKQAPKQWHEKFDTTLTSAGFVVNEADKCVYYRYGGGEGVILCLYVDDILIFGTSLNVIEEVKDYLSKSFEMKDLGEADVILNIKLQRGDEGGITLVQSHYVDKVLSRFGYSDCKPAPTPYDPSVLLRKNRRIARDQLRYSQIIGSLMYLASATRPNISFAVSKLSRFVSNPGDDHWQALERVMRYLKGTMSYGIHYTGYPKVLEGYSDSNWISDADEIKATSGYVFTLGGGAVS

SEQ ID NO: 20307 - protein, 638 aa, Oryza sativa
  Clone ID: TF_OSC401847j.C1.p19.fg
MSTTGDNNNTRDKEEPPVNTNGGNTVSNSSGGPFSGYNVSLLPFVLRFLQLSVAILLRSLVYVDAYSILSTLKLYTSSTVTRSTHIANVMFIVLIFWIKICRIMTKFPTIQKLDSVHADSIVDVYMHMPSGKDMWDSLEAKFGVSDADSELYVMEQFYDYNMVDDRSVVEHAHEIQMLAKELENNNCELPDKFVAGGIIAKLPPSWSDFGTSLKHKRQEFSVTDLIGSLGVEEKTRAKDNRDKKIEGGSSANLVQKKNPHASHNKNKKVKPDVKPKATINFKNKDKGKAKGDCFVCGKPRHWAKDCPECMDKKSANMVISEGGGTSGYGRERFLLVDGKRIVCGCSWCRFCYVYLLKTKDEALHYFKIYKAEVENQLERKIKRLRSGRGGEYFSNEFTSLCEEYGIIHERTPPYSPQSNGVAEKKNRTLTEMVNAMLDTARLSKEWWGEAILTACHVLNRIPTMHKELTPFEEWERKKLNLPHLRTWGCLAKVNVSIAKKRKLGPKTVDCVFLGYAIHSVGYRFLTVNSGVPDMRVGIITESRDATFFENEFPMKNAPSTSSQEPILSPEHFVPIEHIDQMLEENSEEDNIVATQKSKRQRTAKSFGDDYVVYLVDDTPRTIEEAYSSPDTDYWKEAV

SEQ ID NO: 20308 - protein, 131 aa, Oryza sativa
  Clone ID: TF_OSC423289j.C1.p1.gm
HKRQEFSVSDLIGSLGVEEKARAKDVRGKKVEGGSSANMVQKKNPHASHDNKKVKPDVKSKATTNFKKKDKGKAKVDCFVCDKSGHWAKDCPERKDRKSANMVISEGGGTSGYGRERFLLVDGKRVACGCS

SEQ ID NO: 20309 - protein, 751 aa, Oryza sativa
  Clone ID: TF_OSC12493j.C1.p1.fg
MSGVAGGGGAPPPTGAGSGAGAPPPTGAGSGAGAPGGGAVNDYNNGGNSASPSSGGPFSGYNLLLLLLLLALYCVSYVLVPVLHDASSMLSHYWYVPVSDIHDAHSMLLVMLRSPYTAYAMIIVSISWIKICRIMTIFPTIQKPDRSFSVVGFAAALKPHAFDGSNYKRWKARALLWLTAMQCFYVSRGKRSEPPLSPEEEAKFEASDCLFRGALISVLADNIVDVYMHMPSGKDMWDALEAKFGVSDAGSELYVMEQFYDYKMVDDRSVVEQAHEIQMLAKELENNNCELPDKFVAGGIIAKLPPSWSDFATSLKHKRQEFSVPDLIGSLGVEEKARAKDVRGKKVEGGSSANMVQKKNPHASHNNKKVKPDVKPKAATNFKKKGKGKAKGDCFVCGKSGHWAKDCPERKDRKSANMIISEGGGTSGYGKILPTVLSVFHSPDWWVDTGANIHVGRGSSLLMGNGSLAAVHGVGTVDLKFTSGKTVQLKNVQHVPSIKKNLVSGSLLCREGFRLVFESNKCVVSKYGTFVGKGYDSGGLFRFSLNDMCNNHNAVNHISENDESNVWHSRLCHVNFGCMTRLANMSLIPKFTLVKGSKCHTCVQSKQPRKPHKASEARNLAPLELVHSDLCEMNGVLTKGGKKYFMTLIDDCTRFCYVYLLKTKDEALHYFKIYKAEVENQLERKIKRLRSDRGGEYFSNEFASFCEEFGIIHEMTPPYSPQSNGVPERKNRTVASQNDSKTHPRNCAKNN

SEQ ID NO: 20310 - protein, 805 aa, Oryza sativa
  Clone ID: TF_OSC1305j.C1.p1.fg
MSGVAAAATGGGGAPPPTGAGAPPPTGAGSGAGAPGGGAVNDYNNGGNSASPSSGGPFSGYNLLLLLLLLALFLFPLLALYCVRYVLVPVLHDASSMLSRYWYVPVSDIHDAHSMLLVMLRSPYTAYAMIIVSISWIKICRIMTIFPTIQKPDRSFSVVGFAAALKPHAFDGSNYKRWKARALLWLTAMQCFYVSRGKRSEPPLSPEEEAKFEASDCLFRGALISVLADNIVDVYMHMPSGKDMWDALEAKFGVSDAGSELYVMEQFYDYKMVDDRSVVEQAHEIQMLAKELENNNCELPDKFVAGGIIAKLPPSWSDFATSLKHKRQEFSVPDLIGSLGVEEKARAKDVRGKKVEGGSSANMVQKKNPHASHNNKKVKPDVKPKVATNFKKKGKGKAKGDCFVCGKSGHWAKDCPERKDRKSANMIISEGGGTSGYGKILPTVLSIFHSPDWWVDTGANIHVGRGSSLLMGNGSLAAVHGVGTVDLKFTSGKTVQLKNVQHVPSIKKNLVSGSLLCREGFRLVFESNKCVVSKYGTFVGKGYDSGGLFRFSLNDMCNNHNAVNHISKNDESNVWHSRLCHVNFGCMTRLANMSLIPKFTLVKGSKCHTCVQSKQPRKPHKASEARNLAPLELVHSDLCEMNGVLTKGGKKYFMTLIDDCTRFCYVYLLKTKDEALHYFKIYKAEVENQLERKIKRLRSDRGGEYFSNEFASFCEEFGIIHEMTPPYSPQSNGVAERKNRTLTEMVNAMLDTAGLSKEWWGEAVLTACHVLNKIPMKHKEVTPFEEWERKKLNLSYLRTWCCMAK

SEQ ID NO: 20311 - protein, 1186 aa, Oryza sativa
  Clone ID: TF_OSC1309j.C1.p6.fg
MSGVAAAATGGGGAPPPTGAGAPPPTGAGSGAGAPGGGAVNDYNNGGNSASPSSGGPFSGYNLLLLLLLLALFLFPLLALYCVRYVLVPVLHDASSMLSRYWYVPVSDIHDAHSMLLVMLRSPYTAYAMIIVSISWIKICRIMTIFPTIQKPDRSFSVVGFAAALKPHAFDGSNYKRWKARALLWLTAMQCFYVSRGKRSEPPLSPEEEAKFEASDCLFRGALISVLADNIVDVYMHMPSGKDMWDALEAKFGVSDAGSELYVMEQFYDYKMVDDRSVVEQAHEIQMLAKELENNNCELPDKFVAGGIIAKLPPSWSDFATSLKHKRQEFSVPDLIGSLGVEEKARAKDVRGKKVEGGSSANMVQKKNPHASHNNKKVKPDVKPKVATNFKKKGKGKAKGDCFVCGKSGHWAKDCPERKDRKSANMIISEGGGTSGYGKILPTVLSIFHSPDWWVDTGANIHVGRGSSLLMGNGSLAAVHGVGTVDLKFTSGKTVQLKNVQHVPSIKKNLVSGSLLCREGFRLVFESNKCVVSKYGTFVGKGYDSGGLFRFSLNDMCNNHNAVNHISKNDESNVWHSRLCHVNFGCMTRLANMSLIPKFTLVKGSKCHTCVQSKQPRKPHKASEARNLAPLELVHSDLCEMNGVLTKGGKKYFMTLIDDCTRFCYVYLLKTKDEALHYFKIYKAEVENQLERKIKRLRSDRGGEYFSNEFASFCEEFGIIHEMTPPYSPQSNGVAERKNRTLTEMVNAMLDTAGLSKEWWGEAVLTACHVLNKIPMKHKEVTPFEEWERKKLNLSYLRTWCCMAKSRDATFFENEFPMKYTPSTSSKETVMPHEHFAPIEHNDQTPEENPEEDNIVDTRKSKRQRVAKSFGDDYIVYLVDDTPRTIEEAYSSPDADYWKEAVRSEMDSIMSNGTWEVVERPYGCKPVGCKWVFKKKLRPDGTIEKYKARLVAKGYTQKESEDFFDTYSPVARLTTIRQAPKQWHEKFDTTLTSAGFVVNEADKCVYYRYGGGEGVILCLYVDDILIFGTSLNVIEEVKDYLSKSFEMKDLGEADVILNIKLQRGDEGGITLVQSHYVDKVLSRFGYSDCKPAPTPYDPSMLLRKNRRIARDQLRYSQIIGSLMYLASATRPDISFAVSKLSRFVSNPGDDHWQALERVMRYLKGTMSYGIHYTGYPKVLEGYSDSN

SEQ ID NO: 20312 - protein, 413 aa, Oryza sativa
  Clone ID: TF_OSC14746j.C1.p5.gm
MPSRKDMWDALEAKFGVSDAGSELYAMEQFYDYKMVDDRSIVEQAHEIQMLAKELENNNCELPDKFVADGIIAKLLPSWSDFATSLKHKRQEFSVSDLIGSLGVEEKARAKDNRGKKVEGGSSANMLQKKNPHASHNNKKVKADVKPKATTNFKKKGKGKAKGDCFVCGKSGHWAKDCPERKDRKSANMVISEGRGTSGYVNYGVPDMRVGTIIESRDATFFDNEFAMKNTPSTSSQETVIPHKHFAPIEHNDQTPEGNPEEDNIVDTRKSKRQRVAKSFGDDNIVYLVDGTPRTIEEAYSSPDADHWKEAVRSEMDSIMSNGTWEVVERPYGCKPVGCKWVFKKKLRPDGTIEKYKARLVAKASHGLLVHQMDVKTAFLNGELEEEIYMDQPDGDVDLQNISEGTHLYEFDC

SEQ ID NO: 20313 - protein, 1382 aa, Oryza sativa
  Clone ID: TF_OSC16536j.C1.p8.fg
MSNTGDKEKETPVNTNGGNTASNSSGRPFLGYNLITLFQLEVLLLMFIAMSTLCHYVIVDAYSMLSMLMLITFTTITGSNPIVNIMFIILLFWIKICRIMTKFLTIQKPDRSFSVVGFAATLKPHAFDGSNYKRWKARALLWLTAMQCFYVSRGKRSEPPLSPEEEAKFEASDCLFRGALISVLADNIVDVYMHMPSGKEMWDALEAKFGVSDAGSELYVMEQFYDYKMVDDRSVVEQAHEIQMLAKELENNNCELPDKFVAGGIIAKLPPSWSDFATSLKHKRQEFSVPDLIGSLGVEEKARAKDVRGKKVEGGSSANMVQKKNPHASHNNKKVKPDVKPKAATNFKKKSKGKAKGDCFVCGKSGHWAKDCPERKDRKSANMIISEGGGTSGYGKILPTVLSVFHSPDWWVDTGANIHVGRGSSLLMGNGSLAAVHGVGTVDLKFTSGKTVQLKNVQHVPSIKKNLVSGSLLCREGFRLVFESNKCVVSKYGTFVGKGYDSGGLFRFSLNDMCNNHNAVNHISENDESNVWHSRLCHVNFGCMTRLANMSLIPKFTLVKGSKCHTCVQSKQPRKPHKASEARNLAPLELVHSDLCEMNGVLTKGGKKYFMTLIDDCTRFCYVYLLKTKDEALHFFKIYKAEVENQLERKIKRLRSDRGGEYFSNEFASFCEEFGIIHEMTPPYSPQSNGVAERKNRTLTEMVNAMLDTAGLSKECIRKTPFEEWERKKLNLSYLRTWGCLAKVNVPIAKKRKLGPKTVDCVFLGYAIHSVGYRFLIVNSGVPDMHVGTILESRDAIFFENEFPMKYTPSTSSKETVMPHEHFAPIEHNDQTPEENPEEDNIVDTRKSKRQRVAKSFGDDYIVYLVDDTPRTIEEAYSSPDADYWKEAVRSEMDSIMSNGTWEVVERPYGCKPVGCKWVFKKKLRPDGTIEKYKARLVAKGYTQKEGEDFFDTYSPVARLTTIRVLLALAASHGLLVHQMDIKTAFLNGELEEEIYMDQPDGYVLEGQEGMVCKLLKSLYGLKQAPKQWHEKFDTTLTSAGFVVNEADKYVYYRYGGGEGVILCLYVDDILIFGTSLNVIEEVKDYLSKSFEMKDLGEADVILNIKLQRGDEGGITLVQSHYVDKVLSRFGYSDCKPAPTPYDPSVLLRKNRRIARDQLRYSQIIGSLMYLASATRPDISFAVSKLSRFVSNPGDDHWQALERVMRYLKGTMSYGIHYTGYPKVLEGYSDSNWISDADEIKATSGYVFTLGGGAVSWKSCKQTILTRSTMEAELTALDIATVEAEWLRELLMDLPVVEKPVPAILMNCDNQTVIIKVNSSKDNMKSSRHIKRRLKSVRKQKNSGVIALDYVQTARNLADQFTKGLPRNVIDSASREMGLIPT

SEQ ID NO: 20314 - protein, 1186 aa, Oryza sativa
  Clone ID: TF_OSC18107j.C1.p5.fg
MSAPGAGASDGAPGAGAGDGAPGAANVNTNGGNFASQSSGGPFSGEPPLSPEEEAKFEASDCLFRGALISVLADNIVDVYMHMPSGKDMWDALEAKFGVSDAGSELYVMEQFYDYKMVDDRSVVEQTHEIRMLAKELENNNYELPDKFVAGGIIAKLPPSWSDFATSLKHKRQEFSVSDFIGSLGVEEKARAKDVRGKKVEGGSSANMVQKKNPHASHNNKKVKHDVKPKAATNFKKKGKGKAKGDCFVCGKSGHWAKDCPERKDKKSANMVISEGGGISGYGKILPTVLFVFHSPDWWVDTSANIHVGRGSSLLMGNGSLAAVHGVGMVDLKFTSGKTVQLKNVQHVPSIKKNLVSGSLLCREGFRLVFKSNKCVVSKYGTFVGKGYDSGGLFRFSLNDMCNNHNVVNHISENDESNVWHSRLCHVNFGCMTRLANMSLIPKFTLVKGSKCHTCVQSKQPLKPHKASEARNLAPLELVHSNLCEMNGVLTKGGKKYFMTPIDDCTRFCCVYLLKTKDEALHFFKTYKAEVENQLERKIKRLRSDRGGEYFSNEFSSFCEEFGIIHERTPPYSPQSNGVAERKNRTLTEMVNAMLDIVELSKEWWGKAVLTACHVLNKIPMKHKEVNVPIAKKWKLGPNTVDCVFLGYAIHSVGYRFLIVNSGVPGMHLGTIIECRDATFFENEFPMKHTPSTSSQETVMPHEHFAPIEHNDQTPEENPEEDNIVDTRKKEAYSSPDADYWKEAVRSEMDSIMSNGTWEVIEHPYGCKPVGCKWVFKKKLRLDGTIEKYKARLVARVIPKRKARTFFDTYSPVARLTTIRVLLALAASHGLLVHQMDVKTAFVNRELEEEIYMDQPYGYVLEGQEGMVCKLLKSLYGLKQAPKQCHEKFDTTLTSAGFVVNETDKCVYYHYSGGEGVILCLYVDDILIFGTSLNVIEEVKDYLSKSFEMKDLGEADVILNIKLQRGDEGGITLVQSHYVDKVLSRFGYSDCKPAPTPYDPSVLLRKNRRIARDQLRYSQIIGSLMYLASATRPDISFAVSKLSRFVSNPGDDHWQALERVMRYLKGTVSYGIHYTGYPKVLEGYSDSNWISDADEIKATGGYVFTLGGGAVSWKSCKQTILTSSKDNMKSSRHIKRRLKSVRKQKNSGVIALDYVQTARNLADQFTKRLPRNVIDSASREMGLIPT

SEQ ID NO: 20315 - protein, 311 aa, Oryza sativa
  Clone ID: TF_OSC21802j.C1.p1.fg
PDVKPKAATNFKKKGKGKTKGDCFVCGKSGHWAKDCPECKDRKSANMIISEGGGTSGYGKILPTVLSVFHSPDWWVDTGANIHVGRGSSLLMGNGSLAAVHGVGTVDLKFTSGKTVQLKNVQHVPSIKKNLVSGSLLCREGFRLVFESNKCVVSKYGTFVGKGYDSGGLFRFSLNDMCYNHNAVNHISENDESNVWHSRLCHVNFGCMTRLANMSLIPKFTLVKGSKCHTCVQSKQPRKPHKASEARNLAPLELVHSDLCEMNGVLTKGGKKYFMTLIDDCTRFCYVYLLKTKDEALHYFKIYKAEVENQL

SEQ ID NO: 20316 - protein, 868 aa, Oryza sativa
  Clone ID: TF_OSC22139j.C1.p3.fg
MSAPGAGAATAAGGDGGGGAPPGAGAGAGGGAPGARAGAANNNTNGGNSASQSSGGPFSRSPYTVYAMIIVLTFWIKICRFMTIFSTIQKPDRSFSVVGFAATLKPHAFDGSNYKRWKARALLWLTAMQCFYVSRGKRSEPPLSPEEEAKFEASDCLFRGALISVLADNIVDVYMHMPSGKDMWDALEAKFGVSDAGSALYVMEQFYDYKMVDDRSVVEAHEIQMLAKELENNNCELPDKFVVGGIIAKLPPSWSDFATSLKHKRQEFSVSDFIGSLGVEEKARAKDVRGKKVEGGSSANMVQKKNPHVSHNNKKVKPDVKSKAATNFKKKGKRKAKGDCFVCGKSGHWAKDCPERKDRKSANMVISEGGGTSGYGRKRFLLVDGKRVACGCSWCCVGYRFLIVNSGVPDMHVGTIFESRDATFFENEFPMKHTPSTSSQETVMPHEHFAPIEHNDQTPEENPEEDNIVDTRKSKRQRVTKSFGDDYIVYLVDDTPRTIEEAYSSPDADYWKEAVRSEMDSIMSNGTWEVVERPYGCKPMDVKTTFLNGELEEEIYMDQPDGYVLEDQKGMVCKLLKSLYGLKQAPKQWHEKFDTTLTSAGFVVNEADKCVYYRYDGGEGVILCLYVDDILIFGTSLNVIEEVKDYLSKSFEMKDLGEADVILNIKLQRGDEGGIALVQSHYVDKALERVMRYLKGTMSYGIHYTGYPKVLEGYSDSNWISDADEIKATSGYVFTLGGGAVSWKSCKQTILTRSTMEAELTALDTATVEAEWLRELLMDLPVVEKPVSAILMNCDNQTVIIKVNSSKDNTKSSRHIKRRLKSVRKQKNSGVIALDYVQTARNLADQFTKGLPRNVIDSASRKMGLIPT

SEQ ID NO: 20317 - protein, 1329 aa, Oryza sativa
  Clone ID: TF_OSC23901j.C1.p2.fg
MSGVAAAATGPPTGAGDTPPPTGAGSGAGAPGGGVVNDYNNGGNSASPSSGGPFSGYNLLLLLLLLALFLFLFPLLALYYVRYVLVPVLHNASSMLSRYCASMVSRGKRSEPPLSPEEEAKFEASDCLFRGALISVLADNIVDVYMHMPSGKDMWDALEAKFGVSDAGSELYVMEQFYDYKMVDDRSVVEQAHEIQMLAKELENNNCELPDKFVAGGIIAKLPPSWSDFATSLKHKRQEFSVPDLIGSLGVEEKARAKDVRGKRVEGGSSANMVQKKNPHASHNNKKVKPDVKPKAATNFKKKGKGKAKGDCFVCGKSGHWAKDCPERKDRKSANMIISEGGGTSGTVGRGSFLLMGNGSLAAVHGIGTVDLKFTSGKTVQLKNVQHVPSIKKNLVSGSLLCREGFRLVFESNKCVVSKYGTFVGKGYDSGGLFRFSLNDMCNNHNAVNHISENDESNVWHSRLCHVNFGCMTRLANMSLIPKFTLVKGSKCHTCVQSKQPRKPHKASEARNLAPLELVHSDLCEMNGVLTKGGKKYFMTLIDDCTRFCYVYLLKTKDEALHYFKIYKAEVENQLEMKIKRLRSDRGGEYFSNEFASFCEEFGIIHEMTPPYSPQSNGVAERKNRTLTEMVNAMLDTAGLSKEWWGEAVLTACHVLNKIPMKHKEVTPFEEWERKKLNLSYLRTWGCLAKVNVPIAKKRKLGPKTVDCVFLGYAIHSVGYRFLIVNSGVPDMHAGTILESRDATFFENEFPMKYTPSTSSKETVMPHEHFAPIEHDDQTPEENPEEDNIVDTRKSKRQRVAKSFGDDYIVYLVDDTPRTIEEAYSSPDADYWKEAVRSEMDSIMSNGTWEVVERPYGCKPVGCKWVFKKKLRPDGTIEKYKARLVAKGYTQKEGEDFFNTYSPVARLTTIRVLLALAASHGLLVHQMDVKTAFLNGELEEEIYMDQPDGYVLEGQEGMVCKLLKSLYGLKQAPKQWHEKFDTTLTSAGFVVNEADKCVYYRYGGGEGVILCLYVDDILIFGTSLNVIEEVKDYLSKSFEMKDLGEADVILNIKLQRGDEGGITLVQSHYVDKVLSRFGYSDCKPAPTPYDPSVLLRKNRRIARDQLRYSQIIGSLMYLASATRPDISFAVSKLSRFVSNPGDDHWQALERVMRYLKGTMSYGIHYTGYPKVLEGYGDSNWISDADEIKATSGYVFTLGGGAVSWKSCKQTILTRSTMEAELTALDTATVEAEWLRELLMDLPVVEKPVPAILMNCDNQTVIIKVNSSKDNMKSSRHIKRRLKSVRKQKNSGVIALDYVQTARNLADQFTKGLPRNVIDSASREMGLIPT

SEQ ID NO: 20318 - protein, 107 aa, Oryza sativa
  unsure (1)..(107): unsure at all Xaa locations
  Clone ID: TF_OSC2785j.C1.p1.hg
TTFKKKGKGKAKGDCFVCGKSGHWAKDCPERKDRKCANMVISEGGGTSGYGQERFLLVDGKRVAYGCLWCWYGRSEVYFGKDRAAEERATXFGIGDLLESSDGHLGQ

SEQ ID NO: 20319 - protein, 175 aa, Oryza sativa
  Clone ID: TF_OSC30194j.C1.p1.gm
QAHEIQMLAKELENNNCELPDKFVAGGIIAKLPPSWSDFATSLKHKRQEFSVSDLIGSLGVEEKVRAKDVRGKKVEGGSSANMVQKKNSHASHNNKKVKPDVKPKAATNFKKKGKGKAKGDCFVCGKSGHWAKDCPERKDRKSANMVISEGGGTSGYGRERFLLVDGKRVACGCS

SEQ ID NO: 20320 - protein, 906 aa, Oryza sativa
  Clone ID: TF_OSC31402j.C1.p3.fg
MAEVVRRRQELEPVARTTTSTEAILPHNPAEGHSRVDVYMHMPSGKDMWDALEAKFGVSNAGSELYVMEQFYDYKMLPDKFVAGGIIAKLPPSWSDFATSLKHKRQEFSVSDLIGSLGVEEKARATDIREKKVEGGSSANMVQKKNPHASYNNKKVKPDVKPKAATNFKKKGKGKAKGDCFVCGKSGHWAKDCPERKDRKSANMVIGEGGGTSGYGKILPTVLSVFHSPDWWVDTGANIHVGRGSSMLMGNGSLAAVHGIGTVDQKFTSGKTVQLKNVQHVPSIKKNLVSGSLLCREGFRLVFESNKCVVSKYGTFVRKGYDSGGLFRFSLNDMCNNHNVVNHISENDESNVWHSRLCHVNFSCMTRLANMSLIPKFTLIKGSKCHTCVQSKQPRKPHKASEARNLAPLELVHSDLCEMNGVLTKGGKKYFMTLIDDYTRFCYVYILKRKDEALHYFKIYKAEVENQLERKIKRLRSDRGEEYFSNEFASFCEEFGIIYERMPPYSPQSNGVAERKNRTLTEMVNAMLETAGLSKEWWGEAVLTACHVLNKISMKHKEVTPFEEWERKKLNLSYLRTWGCLAKHFAPIEHNDQTPEKNPEEDNIVDTHKSKRQRVAKSFGDDYIVYLVDDTPRTIEETYSSPDADYWKEIMDVKTAFLNGELEEEIYMDQPDGLNVIEEVKDYLYKSFEMKDLGEANVILNIKLQRGDEGGITLVQSHYVDKVLSRFGYSDCKPAPTPCDPSVLLRKNRRIVRDQLRYSQIIGSLMYLASATRPDISFAVSKLSRFVSNPGDDHWQALERVMRYLKGTMSYGIHYTGYSKVLEGYIDSNWISDADEIKVTSGYVFTLGGGVVSWKSCKQTILTRSTMEAELTALDTATVEAEWLRELLMDLPVVEKPVRASYPNEL

SEQ ID NO: 20321 - protein, 298 aa, Oryza sativa
  Clone ID: TF_OSC33128j.C1.p1.fg
MQCFYVSRGKRSEPPLSPEEEAKFEASDCLFRGALISVLADNIVDVYMHMPSGKDMWDALEAKFGVSDAGSELYVMEQFYDYKMVDNRSVVEQAHEIQMLAKELENNNCELPDKFVAGGIIAKLPPSWSDFATSLKHKRQEFSVSDLIGSLGVEEKARAKDVRGKKVEGCSSANMVQKKNPHASHNNKKVKPDVKPKAATNFKKKGKGKAKGDCFVCGKSGHWAKDCPERKDRKSANMVISEGGGTSGYGWERFLLVDGKRVACGCSWCWYGRSEVYFGKDRAAEERAACPFNKEESS

SEQ ID NO: 20322 - protein, 472 aa, Oryza sativa
  Clone ID: TF_OSC400211j.C1.p1.fg
MSAPGAGAAAAAGGDGGDGAPPGAAAGGGAPGAGAGAANNNTNGGSSASQSSGGPFSGYILLLFLFLLLALYCYVPVPDIHDASSMLPRYCYVLLPDIHNVVHDAFSMLLVMLHAVTRSPYTVYAMIIVLTFWIKICRFMTIFPTIQKPDRSFSVVGFAAALKPHAFDGSNYKRWKARALLWLTAMQCFYVSRGKRSEPPLSPEEEAKFEASDYLFRGALISVLTDNIVDVYMHMPSGKDMWDALEAKFGVSDAGSELYVIEQFYDYKMVDDRSVVEQTHEIQMLAKELENNNCELPDKFVAGGIIAKLPPSWSDFATFLKHKRQEFSEKARAKDVRGKKVEGGSSANMVQKKNPHASRNNKKVKPDVKPKAATNFKKKGKGKAKGDCFVCGKSGHWAKDCPERKDRKSANMVISEGGGTSGYGWERFLLVDGKRVACGCSWCWYGRSEVYFGKYRAAEERAACPFNKEESC

SEQ ID NO: 20323 - protein, 1126 aa, Oryza sativa
  Clone ID: TF_OSC400297j.C1.p2.fg
MQCFYVSRGKRSEPPLSPEEEAKFEASDCLFRGALISVLADNIVDVYMHMPSGKDMWDALEAKFGVSDAGSELYVMEQFYDYKMVDDRSVVEQAHEIQMLAKELENNNCELPDKFVAGGIIAKLPPSWSDFATSLKHNRQEFSVPDLIGSLGVEEKARAKDVQGKKVEGGSSANMVQKKNPHASHNNKKVKPDVKPKAATNFKKKSKGKAKGDCFVCGKSGHWAKDCPERKDRKSANMIISEGGGTSGYGKILPTVLSVFHSPDWWVDTGANIHVRRGSSLLMGNGSLAAVHGVGTVDLKFTSGKTVQLKNVQHVPSIKKNLVSGSLLCREGFRLVFESNKCVVSKYGTFVGKGYDSGGLFRFSLNDMCNNHNAVNHISENDESNDEALHFFKIYKAEIENQLERKIKRLRSDRGGEYFSNEFASFCEEFGIIHEMTPPYSPQSNGVAERKNRTLTEMVNAMLDTAGLSKEWWGEAVLTACHVLNKIPMKHKEVTPFEEWERKKLNLSYLRTWGCLAKVNVPIAKKRKLGPKTVDCVFLGYAIHSVGYRFLIVNSGVPDMHVGTILESRDATFFENEFPMKYTPSTSSKETIMPHEHFAPIEHNDQTPEENPEEDNIVDTRKSKRQRVAKSFGDDYIVYLVDDTPRTIEEAYSSPDADYWKEAVRSEMDSIMSNGTWEVVERPYGCKPVGCKWVFKKKLRPDGTIEKYKARLVAKGYTQKEGEDFFDTYSPVARLTTIRVLLALAASHGLLVHQMDVKTAFLNGELEEEIYMDQPDGYVLEGQEGMVCKLLKSLYGLKQAPKQWHEKFDTTLTSAGFVVNEADKCVYYRYGGGEVVILCLYVDDILIFGTSLNVIEEVKDYLSKSFEMKDLGEADVILNIKLQRGDEGGITLVQSYYVDKVLSRFGYSDCKPAPTPYDPSVLLRKNRRIARDQLRYSQIIGSLMYLASATRPDISFAVSKLSRFVSNPGDDHWQTLERVMRYLKGTMSYGIHYTGYPKVLEGYSDSNWISDADEIKATSGYVFTLGGGAVSWKSCKQTILTRSTMEAELTALDTATVEAEWLRELLMDLPVVEKPVPAILMNCDNQTVIIKVNSSKDNMKSSRHIKRRLKSVRKQKNSGVIALDYV

SEQ ID NO: 20324 - protein, 1297 aa, Oryza sativa
  Clone ID: TF_OSC400466j.C1.p5.fg
MSGVATATAGGGGTPPTGARSGAGAPGGAVNDNNNGGNSASPSSGGSASRTTAHRHVWSCHRHCWRRWSFSVVGFAAALKPHAFDGSNYKRWKARALLWLTAMQCFYVSRGKRSEPPLSPEEEAKFEASDCLFRGALISVLADNIVDVYMHMPSGKDMWDALEAKFGVSDAGSELYVMEQFYDYKMVDDHSVVEQAHEIQMLAKELENNNCELPDKFVAGGIIAKLPPSWSDFATSLKHKRQEFSVPDLIGSLGVEEKARAKDVRGKKVEGGSSANMVQKKNPHASHNNKKVKPDVKPKAATNFKKKGKGKAKGDCFVCGKSGHWAKDCPERKDRKSANMVISEGGGTSGYGKMLPTVLSVYHSPDWWVDTGANIHICADISLFSSYQVGRGSSLLMGNGSLAAVHGVGTVDLKFTSGKTVQLKNVQHVPLIKKNLVSGSLLCREGFRLVFESNKCVVSKYGTFVGKCYDSGGLFRFSLNDMCNNHNAVNHISENDESNVWHSRLCHVNFGCMTRLANMSLIPKFTLVKGSKCHTCVQSKQPRKPHKASEARNLAPLELVHSDLCEMNGVLTKGGKKYFMTLIDDCTRFCYVYLLKTKDEALHYFKIYKAEVENQLERKIKRLRSDRGGEYFSNEFASFCEEFGIIHEMTPPYSPQSNGVAERKNRTLTEMVNAMLDTAGLSKECVGYRFLIVNSGVPDMHAGTILESRDATFFENEFPMKYTPSTSSKETVMPHEHFAPIEHNDQTPEENPEEDNIVDTRKSKRQRVAKSFGDDYIVYLVDDTPRTIEEAYSSPDADYWKEAVRSEMDSIMSNGTWEVVERPYGCKPVGCKWVFKKKLRPDGTIEKYKARLVAKGYTQKKGEDFFDTYSPVARLTTIRVLLALAASHGLLVHQMDVKTAFLNGELEEEIYIDQPDGYVLEGQEGMVCKLLKSLYGLKQAPKQWHEKFDTTLTSAGFVVNEADKCVYYRYGGGEGVILCLYVDDILIFGTSLNVIEEVKDYLSKSFEMKDLGEADVILNIKLQRGDEGGITLVQSHYVDKVLSRFGYSDCKPAPTPYDPSVLLRKNRRIARDQLRYSQIIGSLMYLASVTRPDISFAVSKLSRFVTNPGDDHWQALERVMRYLKGTMSYGIHYTGYPKVLEGYSDSNWISDADEIKATSGYVFTLGGGAVSWKSCKQTILTRSTMEAELTALDTATVEAEWLRELLMDLPVVEKPVPAILMNCDNQTVIIKVNSSKDNMKSSRHIKRRLKSVRKQKNSGVIALDYVQTARNLAYQFTKGLPRNVIDSASREMGLIPT

SEQ ID NO: 20325 - protein, 1453 aa, Oryza sativa
  Clone ID: TF_OSC400483j.C1.p5.fg
MSGVAAAAATGGGGTPPPTGAGAPPPTGAGAPGGGAVNDYNNGGNSASPSSGGPFSGYNLLLLLLLLALFLFPLLALYCVRYVLVPILRDASSMLSRYWYVPVSDIHDAHSMLLVMLRLPYTAYAMIIVSISWIKICRIMTIFPTIQKPDRSFSVVGFAAALKPHAFDGSNYKRWKARALLWLTAMQCFYVSRGKRSEPPLSPEEEAKFEASDCLFRGALISVLADNIVDVYMHMPSGKDMWDALEAKFGVSDAGSELYIMEQFYDYKMVDDRSVVEQAHEIQMLAKELENNNCELPDKFVAGGIIAKLPPSWSDFATSLKHKRQEFSVPDLIGSLGVEEKARAKDVRGKKVEGGSSANMVQKKNPHASHNNKKVKPDVKPKAATNFKKKGKGKAKGDCFVCGKSGHWAKDCPERKDRKSANMIISEGGGTSGYGKILPTVLSVFHSPDWWVDTGANIHVCADISLFSSYQVERGSSLLMGNGSLAAVHGVGTVDLKFTSGKTVQLKNVQHVPSIKKNLVSGSLLCREGFRLVFESNKCVVSKYGTFVGKGYDSGGLFRFSLNDMCNNHNAVNHISKNDESNVWHSRLCHVNFGCMTRLANMSLIPKFTLVKGSKCHTCVQSKQPRKPHKASEARNLAPLELVHSDLCEMNGMLTKGGKKYFMTLIDDCTRFCYVYLLKTKDEALHYFKIYKAEVENQLERKIKRLRSDRGGEYFSNEFASFCEEFGIIHEMTPPYSPQSNGVAERKNRILTEMVNAMLDTAGLSKEWWGEAVLTACHVLNKIPMKHKEVTPFEEWERKKLNLSYLRTWGCLAKVNVPIVKKRKLGPKTVDCVFLGYAIHSVGYRFLIVNFGVPDMHAATIFESRDATFFENEFLMKYTPSTSSKETVMLHEHFAPIEHNDETPEENPEEDNIVDTRKSKRQRVAKSFGDDYIVYLVDDTPRTIEEAYSSPDADYWKEAVRSEIDSIISNGTWEVVERPYGCKPVGCKWVFKKKLRPDGTIEKYKARLVAKGYTQKEGEDFFDTYSPVARLTTIRVLLALAASHGLLVHQMDVKTAFLNGELEEEIYMDQPDGYVLEGQEGMVCKLLKSLYGLKQAPKQWHEKFDTTLTAAGFVVNEADKCVYYRYGGGEGVILCLYVDDILIFGTSLNVIEEVKDYLSKSFEMKDLGEADVILNIKLQRGDEGGITLVQSHYVDKVLSRFGYSDCKPAPTPYDPSVLLRKNRRIARDQLRYSQIIGSLMYLASATRPDISFAVSKLSWFVSNPGDDHWQALERVMRYLKGTMSYGIHYTGYPKVLEGYSDSNWISDADEIKATSGYVFTLGGGAVSWKSCKQTILTRSTMEAELTALDTATVEAEWLRELLMDLPVVEKPVPAILMNCDNQTVIIKVNSSKDNMKSSRHIKRRLKSVRKQKNSGVIALDYVQTARNLADQFTKGLPRNVIDSASREMGLIPT

SEQ ID NO: 20326 - protein, 1288 aa, Oryza sativa
  Clone ID: TF_OSC400500j.C1.p54.fg
MAHLELEPEPVPGTSTPMEAILPHNPVEGHSRGISFLLLLLLALLILLVATCYVPVPDVHDAYSILVMLHVPVPDVHAFSILLVMLYVVTRSSYTVHAMIIVLTFWIKICQYMTIFPTIQKPDKSFSVVGFDAALKPHAFDGSNYKRCKARALLWLTAMQCFYVSRGKRSEPPLSPEEEAKFEASDCLFCGALISVLADNIVDVYMHMPSEKDMWDALEAKFGVSDAGSELYVMEQFYDYKIVDDRSVHKRQEFSVSDLIGSLGVEEKARAKDVRGKKVEGGSSANMVQRKNPHASHNNKKVKPDVKPKAATNCKKKGKGKAKGDCFVCGKSGHWAKDCPECKDRKSANMVISEGGGTSGYGKILPTVLSVFHPPDWWVDTGANIHVERGSSLLMGNGSLAAVHGVGTVNLKFTSGKTVQLKNVQHVPSIKKNLVSGSLLCREGFRLMFESNKCVVSKYETFVGKGYDSGGLFRFFLNDMCNNHNVVNHISENDESNVWHSRLCHVNFGCMTRLANISLIPKFTLVKGSKCHTCVQSKQPRKTHKASEARNLAPLEFVHSDLCEMNGVLTKGGKKYFMTLIDDCTRFCYVYVLKTKDETLHYFKIYKAEVENQLERKIKRLRFDRGGEYFSNKFASFCEEFGIIHERTPPYSPQSNGVAERKNRTLTKMVNAMLGTAGLSKEWWGEAVLTVCHVLNKIPMKHKEVTPFEEWERKKSNLSYLRTWGCLAKVNVPIAKKRKLGPNTVDCVFLGYAIHSVGYRFLIVNSGVPDMHVGTIIESRDATFFENEFPMKHTPSTSSQETVMSHEYFAPIEHDDQTPEENPNEDNIIDTRKSKRQRVAKSFGDDYIVYLVDDTLRTIEEAYSSPDADYWKEAVHSEMDSIMSNGTWEVVERPYGCKPVGCKWVFKKKLRPMMDVKTAFLNEELEEEIYMDQPDGYVLEGQEGMVCKLLKSLYGLKQAPKQWHEKFDTTLTSAGFVVNEADKCVYYRYGGGEGVILCLYVDDILIFGTSFNVIEEVKDYLFKSFEMKDLGEADVILNIKLQRGDEGGITLVQSHYVDKVLSRFGYSDCKPAPTPYDPNVLLRKSRRIARDQLRYSQIIGSLMYLASATRPDISFAVSKLSRFVSNPGDDHWQALERVMRYLKGTMSYGIHYTGYLKVLEGYSDSNWISDADEIKATSGYVFTLGGGVVSWKSCKQTILTRSTIEAELIALDTAIVEAEWLRELLIDLPVVEKPVPAILMNCDNQTVIIKVNNSKDNMKSSRHIKRRLKSVRKQKKLRSDSIGLCPNG

SEQ ID NO: 20327 - protein, 965 aa, Oryza sativa
  Clone ID: TF_OSC400506j.C1.p17.gm
MALLGKTSCKAAVFLAALVVMATAFSSSHAAQGQDGRAIRFLGSARRDYSLFVNIYFIFTNMSNTGDKEKETPCFYVSRGKRSEPPLSPEEEAKFEASDCLFRGALISVLADNIVDVYMHMPSGKDMWDALEAKFGISDAGSELYVMEQFYDYKMVDDRSVVEQAHEIQMLAKELENNNCELPDKFVAGDIIAKLPPSWSDFATSLKHKRQEFSVPDLIGSLGVEEKARAKDVRGKKVEGGSSANMVQKKNPHASHNNKKVKPDVKPKAATNFKKKSKGKAKGDCFVCGKSGHWAKDCPERKDRKSANMIISEGGGTSGYGRERFLLVDGKRVACGCSCVGYRFLIVNSGVPDMHVGTILESRDATFFENEFPMKYTPSTSSKETVMPHEHFTPIEHNDQTPEENPEEDNIVDTRKSKRQRVVKSFGDDYIVYLVDDTPRTIEEAYSSPDADYWKEAVRSEMDSIMSNGTWEIVERPYGCKPVGCKWVFKKKLRPDGTIEKYKARLVAKGYTQKEGEDFFDTYSPVARLTTIRVLLALAASHGLLVHQMDVKTAFLNGELEEEIYMDQPDGYVLEGQEGMVCKLLKSLYGLKQAPKQWHEKFDTTLTSAGFVVNEADKCVYYRYGGGEGVILCLYVDDILIFGTSLNVIEEVKDYLSKSFEMKDLGEADVILNIKLQRGDEGGITLVQSHYVDKVLSRFGYSDCKPAPTPYDPSVLLRKNRRIARDQLRYSQIIGSLMYLASATRPDISFAVSKLSRFVSNPGDDHWQALERVMRYLKGTMSYGIHYTGYPKVLEGYSDSNWISDADEIKATSGYVFTLGGGAVSWKSCKQTILTRSTMEAELTALDTAIVEAEWLRELLMDLPVVEKPVPAILMNCDNQTVIIKVNSSKDNMKFLGSARRDYSLFVNIYFIFTNMSNTGDKEKETPVNTNGGNTASNSSGGPFLGFASTAVKQCNACVECGESR

SEQ ID NO: 20328 - protein, 1268 aa, Oryza sativa
  Clone ID: TF_OSC400569j.C1.p8.fg
MQCFYVSRGKRSEPPLSPEEEAKFEASDCLFRGALISVLADNIVDVYMHMPSGKDMWDALEAKFGVSDAGSELYVMEQFYDYKMVDDRSVVEQAHEIQMLAKELENNNCELPDKFVAGGIIAKLPPSWSDFATSLKHKRQEFSVPDLIGSLGVEEKARAKDVRGKKVEGGSSANMVQKKNPHASHNNKKVKPDVKPKAATNFKKKSKGKAKGDCFVCGKSGHWAKDCPERKDRKSANMIISEGGGTSGYGKILPTVLSVFHSPDWWVDTGANIHVCADISLFSSYQVGRGSSLLMGNGSLAAVHGVGTVDLKFTSGKTVQLKNVQHVPSIKKNLVSGSLLCREGFRLVFESNKCVVSKYGTFVGKGYDSGGLFRFSLNDMCNNHNAVNHISENDESNVWHSRLCHVNFGCMTRLANMSLIPKFTLVKGSKCHTCVQSKQPRKPHKASEARNLAPLELVHSDLCEMNGVLTKGGKKYFMTLIDDCTRFCYVYLLKTKDEALHFFKIYKAEVENQLERKIKRLRSDRGGEYFSNEFASFCEEFGIIHEMTPPYSPQSNGVAERKNRTLTEMVNAMLDSAGLSKEWWGEAVLTACHVLNKIPMKHKEVTPFEEWERKKLNLSYLRTWGCLAKVNVPIAKKRKLGPKTVDCVFLGYAIHSVGYRFLIVNSRVPDMHVGTILESRDATFFENEFPMKYTPSTSSKETVMPHEHFAPIEHNDQTPEENPEEDNIVDTRKSKRQRVAKSFGDDYIVYLVDDTPRTIEEAYSSPDADYWKEAVRSEMDSIMSNGTWEVVERPYGCKPVGCKWVFKKKLRPDGTIEKYKARLVAKGYTQKEGEDFFDTYSPVARLTTIRVLLALAASHGLLVHQMDVKTAFLNGELEEEIYMDQPDGYVLEGQEGMVCKLLKSLYGLKQAPKQWHEKFDTTLSSVGFVVNEADKCVYYRYGGGEGVILCLYVDDILIFGTSLNVIEEVKDYLSKSFEMKDLGEADVILNIKLQRGDEGGITLVQSHYVDKVLSRFGYSDCKPAPTPYDPSVLLRKNRRIARDQLRYSQIIGSLMYLASATRPDISFAVSKLSRFVSNPGDDHWQALERVMRYLKGTMSYGIHYTGYPKVLEGYSDSNWISDADEIKATSGYVFTLGGGAVSWKSCKQTILTRSTMEAELIALDTATVEAEWLRELLMDLPVVEKPVPAILMNCDNQTVIIKVNSSKDNMKSSRHIKRRLKSVRKQKNSGVIALDYVQTARNLADQFTKGLPRNVIDSASREMGLIPT

SEQ ID NO: 20329 - protein, 1385 aa, Oryza sativa
  Clone ID: TF_OSC400615j.C1.p31.fg
MSGVAAATAGGGGTPPPTGAGSGSGAGAPGGGAVNDYNNGGNSASPSSGEPFSGYNLLLLLLLLALFMFPLLALYYVRYVLVPVLHDASSMLSRYWYVPVPDIHDAHSMLLVMLRSPYTAYAMIIVSFSWIKICRLMTIFPTIQKPDRSFSVVGFAAALKPHAFDGSNYKRWKARALLWLTAMQCFYVSRGKRSEPPLSPEEEAKFEASDCLFRGALISVLADKIVDVYMHMPSGKDMWDALEAKFGVSDAGSELYVMEQFYDYKMVDDRSVVEQSHEIQMLAKELENNNCELPDKFVAGGIIAKLPPSWSDFATSLKHKRQEFSVPDLIGSLGVEEKARAKDVRGKKVEGGSSANMKKGKGKAKGDCFVCGKSGHWAKDCPERKDRKSANMIISEGGGTSGYVGRGSSLLMGNGSLAAVHSVGMVDLKFTSGKTVQLKNVQHVPSIKKNLVNGSLLCREGFRLVFESNKCVVSKYGTFVGKGYDSGGLFRFSLNDMCNNHNAVNHISENDESNVWHSRLCHVNFGCMTRLANMSLIPKFTLVKGSKCHTCVQSKQPRKPHKASEARNLAPLELVHSDLCEMNGVLTKGGKKYFMTLIDDCTRFCYVYLLKTKDEALHYFKIYKAEVENQLERKIKRLRSDRGGEYFSNEFASFCEEFEIIHEMTPPYSPQSNGVAERKNRTLTEMVNAMLDTAGLSKEWWGEAVLTACHVLNKIPMKHKEVTPFEEWERKKLNLSYLRTWGCLAKVNVPIAKKQKLGPKTVDCVFLGYAIHSVGYRFLIVNSGVPDMHAGTILESRDATFFENEFPMKYTPSTSSKETVMPHEHFAPIEHDDQTPEENPEEDNIVDTRKSKRQRVAKSFGDDYIVYLVDDTPRTIEEAYSSPDADYWKEAVRSEMNSIMSNGTWEVVERPYGCKPVGCKWVFKKKLRPDGTIEKYKARLVAKGYTQKEGEDFFDTYSPVARLTTIRVLLALAASHGLLVHQMDVKTAFLNGELEEEIYMDQPDGYVLEGQEGMVCKLLKSLYGLKQAPKQWHKKFDTTLTSAGFVVNEADKCVYYRYGGGEGVILCLYVDDILIFGTSLNVIEEVKDYLSKSFEMKDLGEADVILNIKLQRGDEGGITLVQSHYVDKVLSRFGYSDCKPAPTPYDPSVLLRKNRRIARDQLRYSQIIGSLMYLASATRPDISFAVSKLSRFVSNPGDDHWQALERVMRYLKGTMSYGIHYTGYPKVLEGYSDSNWISDADEIKATSGYAFTLGGGAVSWKSCKQTILTRSTMEAELTALDTATVEAEWLRELLMDLPVVEKPVPAILMNCDNQTVIIKVNSSKDNMKSSRHIKRRLKYVRKQKNSGVIALDYVQTARNLADQFTKGLPRNVIDSASREMGLIPT

SEQ ID NO: 20330 - protein, 1170 aa, Oryza sativa
  Clone ID: TF_OSC400694j.C1.p10.fg
MSAAPGAAAAAAAAPGDAPGAGAAANDNVNGGSSASQSSGGTFTGSFSVVGFASALKPHAFDGSNYKRWKARALLWLTAMQCFYVSRGKRSEPPLSPEEEVKFKASDWLFRGALISVLADNIVDVYMHMPFGKDMWDALEAKFGVSDAGSELYVMEQFYDYKMVDDRSVVEQAHEIQMLAKELENNNCELPDKFVAGGIIAKLPPSWSDFATSLKHKRQEFSVSDLIGSLGVEEKARAKDNRGKKVEGSSSANMVQKKNPHASHNNKKVKLDVKPKATTNFKKKGKGKAKGDCFVCGKSGHWAKDCPERKDRKSANMVISEGGGTSGYGKLLPTVLSVFHSPDWWVDTGANIHVGRGSSLLMGNGSLAAVHGVGTVDLKFTSGKTVQLKNMQHVSSIKKNLVIGSLLCREGFRLVFESNKCVVSKYGTFVGKGYDSGGLFRFSLDDMCNNHNVVNHISENDESNVWHSRLCHVNFGCMTRLANMSLVPKFTLVKDSKCHTCVQSKQPRKPHKASEARNLAPLELVHSDLCEMNGVLTKGGKKYFMTLIDDCTRVCYVYLLKTKDEALHYFKTYKTEVENQLERKIKRLRSDRGGEYFSNEFTSFCEEFGIIHERTPPYSPQSNGVAERKNRTLTEMVNAMLDTAGLSKEWWGEAVLTACHVLNKIPMKHKEMTLFEEWERKKLNLSYLRTWGCLAKGNPEEDNIVDTRKSKRQRVAKSFGDDYIVYLVDNTPRTIEEAYLSPYADYWKEAVHSEMDSIMSNGTWEVVERPYGCKPVGCKWVFKKKLRLDGTIEKYKARLVAKGYTQKEGEDFFDTYSPVARLTTIRVLLALAASHGLLVHQMDVKTAFLNGELEEEIYMDQPDGLNVIEEVKDFLSKSFEMKDLGEADVILNIKLLRGDEGGIPLVQSHYVDKVLSRFGYSDCKPAPTPYDPSVLLRKNRRIARDQLRYSQIIGSLMYLASATRPDISFAVSKLSRFVSNPGDDHWQALERVMRYLKGTMSYGIHYTGYPKVVEGYSDSNWISDADEIKATSGYVFTLGGGTVSWKSSKQTILTRSTMEAELTALDTATVEAEWLCELLMDLPVVEKPVPAILMNCDNQTVIIKVNSSKDNMKSSRHIKRRLKSVRKQKNSGVIALDYVQTAKNLADQFTKGLPRNVIDSASREMGLIPT

SEQ ID NO: 20331 - protein, 1335 aa, Oryza sativa
  unsure (1)..(1335): unsure at all Xaa locations
  Clone ID: TF_OSC400718j.C1.p100.np
HENMLNYXAPESNTNVNTKGGNSASQSSGGPFSGSFSVVGFAAALKPHAFDGSNYKRWKARALLWLTAMQCFYVSWGKRSEPPLSPGEEAKFEASDCLFRGALISVLADNIVDVYMHMPSGKDMWDALEAKFGFSDAGSELYVMEQFYDYKMVDDCSVVEQAHGIQMLAKELENNNCELPDKFVAGGIIAKLPPAWSDFATSLKHKRQEFSVSDLIGSLGVEEKARAKDVRGKKVEGGSSANMVQKKNPHASHNNKKVKPDVKPKAATNFKKKGKGKAKGDCFVCGKSGHWAKDCPERKNRKSANMVVSEGRGTSRYGKILPTVLSVFHSPDWWVDTGANIHVCADISLFSSYQVGRGSLLMGNRSLAAVHGVGTVDLKFTSGKTMQLKNVQHVPSIKKNLVSGSLLCREGFRLVFESNKCVVSKYETFVGKGYDSGGLFRFSLNDMCNNHNVVNHISENDESNVWHSRLCHVNFGCMTRLANMSLIPKFTLVKGSKCHTCVQSKQPRKPHKASEARNLAPLELVYSDLCEINGVLTKGGKKHFMTLIDDCTRFCYVYLLKTKDEALHYFKTYKAEVENQLERKIKRLRSDRGGEYFFNEFASFCKEFGIIHERTPPYSPQSNGVAERKNCTLTEMVNAMLDIAGLSKEWWVEAVLIACHVLNKMPMKHKEVTPFEEWERKKLNLSYLRTWGCLAKVNVPIAKKRKLGPNTVDCVFLSYAIHSVGYRFLIINSGVPDMHVGTIIMSRDATFFENEFPMKHTPSTSSQETVTPHEHFTPIEHNDQTPEENPEEDNIVDTRKSKRQRVAKSFGDDYIVYLVDDTPRTIEEAYSSPDADYWKEAVRSEMDSIMSNGTWEVVERPYGCKPVGCKWVFKKKLRPDGTIEKYKARLVAKGYTQKEGEDFFNTYSPVARLTTIRVLLALAASHGLLVHQMDVKTAFLNGELEEEIYMDQPDGYVLEGQEGMVCKLLKSLYGLKQAPKQWHEKFDTTLTSAGFVVNEADKCVYYRYGGGEGVILCLYVDDILIFGTSLNVIEEVKDYLSKSFEIKDLGQADVILNIKLQRGDEGGITLVQSHYVDKVLSRFGYSDCKPAPTPYDPSVLLRKNRRIVRDQLRYSQIIGSLMYLASATRPDISFAVSKLSRFVSNPGDDHWXAREKVMRYLKGTMSYGIHYTGYPKVLEGYSDSNWISDADEIKATSGYVFTLAGGAVFWKSCKQTILTRSTMEAELTALDTATVEAEXLHELLMDLPVVEKPVPAILMNCDNQTVIIKVNSSKDNMKSSRHIKRRLKSVRKQKNSGVIALDYIQTVRNLADQFTKGLPRNVIDSASREMGLIPT

SEQ ID NO: 20332 - protein, 1371 aa, Oryza sativa
  Clone ID: TF_OSC400758j.C1.p22.fg
MSGVAAAAAGGDGRGGAPPGAGAGGGAPGAGAGAANDNINGGNSASQSSGGPSSEYILLLFPLLALSLYCYVLYVPVPDIHDASSMLLRYCNVPVPDIHDAHGMLLVMLRAPYTAYAMIIALTFWIKICRFMTIFPTIQKSDRSFLVVGFAAALKPHAFDDSNYKRWKARALLWLTAMQCFYVSRGKRSEPPLSPEEEAKFEASDCLFRGALISVLTDNIVDVYMHMPSGKDMWDALEAKFRVSDAGSELYVMEQLYDYKMVDDRSVVEQAHEIQMLAKELENNNCELPDKFVAGGIIAKLPPSWSDFATSLKHKRQEFSVSDLIGSLGVEEKARAKDVRGKKVEGGSSANMVQKKNPHASHNNKKVKPDVKPKAATNIKKKGKGKSKGDCFVCGKSGHWAKDCPERKDRKSANMVISEGGGTSGYGKILPTVLSVLHSPDWWVDTGANIHVGRGSSLLMGNGSLAAVHGVGTVDLKFTSGKTVQLKNVQHVPSIKKNLVSGSLLCREGFRLVFESNKCAVSKYGTFVGKGSKCHTCVQSKQTRKPHKASEARNLAPLELVHSDLCEMNGVLTKRGKKYFMTLMDDCTRFCYVYLLKTKDEALHYFKIYKAEIENQLERKIKRLRSDRGGEYFSNEFASFCEEFRIIHERTPPYSPQSNGMAERKNHTLIEMVNAMLDTAGLSKEWWGEAVLTACHVLNKIPMKHKEVTPFEEWQRKKLNLSYLQTWGCLAKVNVPIAKKRKLGPNTVDCVFLGYAIHSVGYRFLIVNFGVPDMHVGTILESRDATFFDNEFPMKHTPSTSSKETVMPHEHFAPIEHNDQTPEENPEEDNIVDTRKSKRKRVAKSFGDDYIVYLVDDTPRTIEEAYSSPDADYWKEAVRSEMDSIMSNGTWEVVEHPYGCKPLGCKWVFKKKLRPDGTIEKYKARFVAKGYTQKEGEDFFDTYSPVARLTTIRVLLALAASHGLLVHQMDVKTTFLNGELEEEIYMDQPDGYILKGQEGMVCKLLKSLYGLKQAPKQWHEKFDTTLTSAGFVVNEADKCVYYRYGGGEEVILCLYVDDILIFGTSLNVIEEVKDYLSKSFEMKDLGEADVILNIKLQRGDEGGITLVQSHYVDKVLSWFGYSDRKPAPTPYDPSVLLRKNRKIARDQLRYSQIIGSLMYLASAMRPDISFAVSKLSRFVLNPGDDHWQALERVMRYIKGTMSYGIHYTGYPKVLEGYSDSNWISDADEIKATSGYVFTLGGGAVSCKSCKQTILTRSAMKAELTALDTATVEAEWLRELLMDLPVVEKPVPAILMNCDNQTVIIKVNSSKDNMKSSRHIKRRLKSVRKQKNSEVIALDYVQTARNLTDQFTKGLPRNVIDSASREMGLIPT

SEQ ID NO: 20333 - protein, 1253 aa, Oryza sativa
  Clone ID: TF_OSC400993j.C1.p11.fg
MQCFYVSRGKRSEPPLFPEEEAMFEASDCLFRGALISVLADNIVDVYMHMPSGKDMWDALEAKFGVSDAGSELYVMEQFYDYKMVDDRSVVEQAHEIQMLAKELENNNCELPDKFVAGGIIAKLPPSWSDFATSLKHKRQEFSVPDLIGSLGVEEKARAKDVRGKKVEGGSSANMVQKKNPHASHNNKKVKPDVKPKAATNFKKKGKGKAKGDCFVCGKSGHWAKDCPERKDRKSANMIISEGGGTSGYGKILPTVLSVFHSPDWWVDTGANIHVCADISLFSSYQVGRGSSLLMGNGSLAAVHGVGTVDLKFTSGKTVQLKNVQHVPSIKKNLVSGSLLCREGFRLVFESNKCVVSKYGTFVEKGYDSGGLFRFSLNDMCNNHNAVNHISENDESNVWHSRLCHVNFGCMTRLANMSLIPKFTLVKGSKCHTCVQSKQPRKPHKASEARNLAPLELVHSDLCEMNGVLTRFCYVYLLKTKDEALHYFKIYKAEIENQLERKIKQLRSDRGGEYFSNEFASFCEEFGIIHEMTPPYSPQSNGVAERKNHTLTEMVNAMLDTAGLSKEWWGEAVLTACHVLNKIPMKQKEVTPFEEWERKKLNLSYLRIWGCLAKVNVPIAKKRKLGPKTVDCVFLGYAIHSVGYRFLIVNSGVPDMHAGTILESRDATFFENEFPMKYTPSTSSKETVMPHEHYAPIEHNDQTPEENPEEDNIVDTRKSKRQRVAKSFGDDYIVYLVDDTPRTIEEAYSSPDADYWKEAVRSEMDSIMSNGTWEVVERPYGCKPVGCKWVFKKKLRPDGTIEKYKARLVAKGYTQKEGEDFFDTYSPVARLTTIRVLLALAASHSLLVHQMDVKTAFLNGELEEEIYMDQPDGYVLEGQEGMVCKLLKSLYGLKQAPKQWHEKFDTTLTSAGFVVNEADKCVYYRYGGGEGVILCLYVDDILIFGTSLNVIEEVKDYLSNNFEMKDLGEADVILNIKLQRGDEGGITLVQSHYVDKVLSRFGYSDCKPAPTPYDPSVLLRKNRRIVRDQLRYSQIIGSLMYLASATRPDISFAVSKLSRFVSNPGDDHWQALERVMRYLKGTLSYGIHYTGYPKVLEGYSDSNWISDADEIKATSGYAFTLGGGAVSWKSCKQTILTRSTMEAELTALDTATVETEWLRELLMDLPVVEKPVPAILMNCDNQTVIIKVNSSKDNMKSSRHIKRKLKSVRKQKNSGVIALDYVQTARNLADQFTKGLPRNVIDSASREMGLIPT

SEQ ID NO: 20334 - protein, 1467 aa, Oryza sativa
  unsure (1)..(1467): unsure at all Xaa locations
  Clone ID: TF_OSC400993j.C1.p82.np
MSGVAAATAGGGGTPPGAGSGAGAPGGAVNDNNNGVNSASPSSGGPFSGYTLLLLLLLLALFLFPLLALSLYYVRYVLVPVLHDASSMLSRYWYVPVPDIHDAHSMLLVMLRSPYTAYAMIIALTFWIKICRLMTIFPTIQKPDRSFSVVGFAAALKPHAFDGSNYKRWKARALLWLTAMQCFYVSRGKRSEPPLSPEEEAKFEASDCLFRGALISVLADNIVDVYMHMPSGKDMWDALEAKFGVSDAGSELYVMEQFYDYKMVDDRSVVEQAHEIQMLAKELENNNCELPDKFVAGGIIAKLPPSWSDFATSLKHKRQEFSVPDLIGSLGVEEKARAKDVRGKKVEGGSSANMVQKKNPHASHNNKKVKPDVKPKAATNFKKKGKGKAKGDCFVCGKSGHWAKDCPERKDRKSTNMVISEGRGTSGYGKILPTVLSVFHSPDWWVDTGANIHVCADISLFSSYQVGRGSSLLMGNGSLAAVHGVGTVDLKFTSGKTVQLKNVQHVPSIKKNLVSCSLLCREGFRLVFESNKCVVSKYGTFVGKGYDSGGLFRFSLNDMYNNHNAVNHISENDESNVWHSRLCHVNFGCMTRLANMSLIPKFTLVKGSKCHTYVQSKQPRKPHKASEARNLAPLELVHSDLCEMNGVLTKGGKKYFMTLIDDCTRFCYVYLLKTKDETLHYFKIYKAEVENQLQRKIKLLRSDRGGEYFSNEFASFCQEFGIIHEMTPPYSPLSNGVAERKNRTLTEMVNAMLDTAGLSKELWGEAVLTACHILNKIPMKHKEVTPFEEWERKKLNLSYLRTWGCLAKVNVPIAKRRKLGPKTVDCVFLGYAIHSVGYRFLIVNSGVPDMHAGTIFESRDATFFENEFPMKYTPSTSSKETVMPHEHFAPIEHNDQTPEENPEEDNIVDARKSKRQRVAKSFGDDYIVYLVDDTPRTIEEAYSSPDADYWKEAVRSEMDSIMSNGTWEVVERPYGCKPVGCKWVFKKKLRPDGTIEKYKARLVAKGYTQKEGEDFFDTYSPVARLTTIRVLLALAASHGLLVHQMDVKTAFLNGELEEKIYMDQPDGYVLEGQEGMVCKLLKSLYGLKQAPKQWHEKFDTTLTSAGFVVIEADKCVYYRYGGGEGVILCLYVDDILIFGTSLNVIEEVKDYLSKSFEMKDLGEADVILNIKLQRGDEGGITLVQSHYVDKVLTPTPYDPSVLLRKNRRIVRDQLRYSQIKVLTPTPYDPSVLLRKNRRIVRDQLRYSQIIGSLMYLASATRPDISFAVSKLSRFVXNPGDDHWQALERVMRYLKGTMSYGIHYTGYPKVLEGYSDSNWISNADEIKATSGXVFTLGGGAVSWKSCKQTILTRSTMEAELTALDTATVEAEWLRELLMDLPVVEKPVPAILMNCDNXTVIIKVNNSKDNMKSSRHIMRRLKSVRKQKNSGVIALDYVQTARNLADQFTKGLPRNVIDSASREMGLIPT

SEQ ID NO: 20335 - protein, 1438 aa, Oryza sativa
  Clone ID: TF_OSC401126j.C1.p85.np
MSGVAAATAGGGGTPPPPTGAGSGSGVGAPGGAVNDNNNGGNSASPSSGGPFSGYNLLLLLLLLALFLFPLLALSLYYVRYVLVPVLHDASSMLSRYWYVPVPDIHDAHSMLLVMLRSPYTAYAMIIVSISWIKICRLMTIFPTIQKPDRSFSVVGFAAALKPHAFDGSNYKRWKARALLWLTAMQCFYVSRGKRSEPPLSPEEEAKFEASDCLFRGALISVLADNIVDVYMHMPSRKDMWDALEAKFGVSDAGSELYVMEQFYDYKMVDDRSIVEQAHEIQMLAKELENNNCELPDKFVAGGIIAKLPPSWSDFATSLKHKRQEFSVPDLIGSLGVEEKARAKDVRGKKVEGGSSANMVQKKNPHASHNNKKVKPDVKPKAATNFKKKGKGKAKGDCFVCGKSGHWAKDCPERKDRKSANMIISEGGGTSGYGKILPTVLSVFHSPDWWVDTGANIHVCADISLFSSYQVGRGSSLLMGNGSLAAVHGVGTVDLKFTSGKTVQLKNVQHVPSIKKNLVSGSLLCREGFRLVFESNKCVVSKYRTFVGKGYDCGGLFRFSLNDMCNNHNAVNHISENDESNVWHSRLCHVNFGCMTRLANMSLIPKFTLVKGSKCYTCVQSKQPRKPHKASEARNLAPLELVHSDLCEMNGVLTKGGKKYFMTLIDDCTRFCYVYLLKTKDEALHYFKIYRAEVENQLERKIKRLRSDRGGEYFSNEFASFCEEFGIIHEMTPPYSPQSNGVAERKNRTLTEMVNAMLDTAGLSKEWWGEAVLTACHVLNKIPMKHKEVTQFEEWERKKLNLSYLRTWGCLAKVNVPIAKKRKLGPKTVDCVFLGYAIHSVGYRFLIVNSGVPDMHAGTILESRDATFFENEFPMKYTPSTSSKETVMPREHFAPIEHNDQTPEENPEEDNIVDTRKSKRQRVAKSFGDDYIVYLVDDTPRTIEEAYSSPDADYWKEAVRSEMDSIMSNGTWEVVERPYGCKPVGCKWVFKKKLRPDGTIEKYKARLVAKGYTQKEGEDFFDTYSPVARLTTIRVLLALAASHGLLVHQMDVKTAFLNGELEEEIYMDQPDGYVLEGQEGMVCKLLKSLYGLKQAPKKWHEKFDTTLTSAGFVVNEADKCVYYRYGGGEGVILCLYVDDILIFGTSLNVIEEVKDYLSKNFEMKDLGEADVILNIKLQRGDEGGITLVQSHYVDKDVTPTPYDPSVLLRKNRRIARDQLRYSQIIGSLMYLYSATRPDISFAVSKLSRFVSNPGDDHWQALERVMRYLKGTMSYGIHYTGYPKVLEGYSDSNWISDADEIKATSGYAFTLGGGAVSWKSCKQTILTRSTMEAELTALDTATVEAEWLRELLMDLPVVEKPVPAILMNCDNQTVIIKVNSSKDNMKSSRHIKRRLKSVHSGVIALDYVQTARNLADQFTKGLPRNVIDSASREMDLIPT

SEQ ID NO: 20336 - protein, 1352 aa, Oryza sativa
  Clone ID: TF_OSC401217j.C1.p36.fg
MSNTGDKEKETPVNTNGGNTASNSSGGPFLGYNLITLFQLEVLLLMFIAMSTLCHYVIVDAYSTLSMLMLITFTTITGSNPIVNIMFIILLFWIKICRIMTKFPTIQKPDRSFSVVGFAAALKPHAFDGSNYKRWKARALLWLTAMQCFYVSRGKRSEPPLSPEEEAKFEASDCLFRGALISVLADNIVDVYMHMPSGKDMWDALEAKFGVSDAGSELYVMEQFYDYKMVDDRSVVEQAHEIQMLAKELENNNCELPDKFVAGGIIAKLPPSWSDFATSLKHKRQEFSVPDLIGSLGVEEKARAKDVRGKKVEGGSSANMVQKKNPHASHNNKKVKPDVKPKAATNFKKKSKGKAKGDCFVCGKSGHWAKDCPERKDRKSANMIISEGGGTSGYGKILPTVLSVFHSPDWWVDTGANIHVGRGSSLLMGNGSLAAVHGVGTVDLKFTSGKTVQLKNVQHVPSIKKNLVSGSLLCREGFRLVFESNKCVVSKYGTFVGKGYDSGGLFRFSLNDMCNNHNAVNHISENDESNVWHSRLCHVNFGCMTRLANMSLIPKFTLVKGSKCHTCVQSKQPRKPHKASEARNLAPLELVHSDLCEMNGVLTKGVKKYFMTLIDDCTRFCYVYLLKTKDEALHCFKIYKAEVENQLERKIKRLRSDRGGEYFSNEFASFCEEFGIIHEMTPPYSPQSNGVAERKNRTLTEMVNAMLDTAGLSKEWWGEAVLTACHVLNKIPMKHKEVTPFEEWERKKLNLSYLRTWGCLAKSRDATFFENEFPMKYTPSTSSKETVMPHEHFAPIEHNDQTPEENPEEDNIVDTRKSKRQRVEKSFGDDYIVYLVDDTPRTIEEAYSSPDADYWKEAVCSEMDSIMSNGTWEVVERPYGCKPVGCKWVFKKKLRPDSTIEKYKARLVAKGYTQKEGEDFFDTYSPVARLTTIRVLLALAVSHGLLVHQMDVKTAFLNGELEEEIYMDQPDGYVLEGQEGMVCKLLKSLYGLKQAPKQWHEKFDTTLTSAGFVVNEADKCVYYRYGGGEGVILCLYVDDILIFGTSLNVIEEVKDYLSKNFEMKDLGEADVILNIKLQRGDEGGITLVQSHYVDKVLSRFGYNDCKPAPTPYDPSVLLRKNRRIVRDQLRYSQIIGSLMYLASATRPDISFAVSKLSRFVSNPGDDHWQALERVMRYLKGTMSYGIHYTGYPKVLEGYSDSNWISDADEIKATSGYVFTLGGGAVSWKSCKQTILTRSTMEAELTALDTATVEAEWLRELLMDLPVVEKPVPAILMNCDNQTVIIKVNSSKDNMKSSRHIKRRLKSVRKQKNSGVIALDYVQTARNMADQFTKGLPRNVIDSASREMGLIPT

SEQ ID NO: 20337 - protein, 1040 aa, Oryza sativa
  Clone ID: TF_OSC401279j.C1.p23.gm
MQCFYVSRGKRSEPPLSPEEEAKFEASDCLFRGALISVLADNIVDVYMHMPSGKDMWDALEAKFGVSDAGSELYVMEQFYDYKMVDDRSVVEQAHEIQMLAKELENNNCELPDKFVAGGIIAKLPPSWSDFATSLKHKRQEFSVPDLIGSLGVEEKARAKDVRGKKVEGGSSANMVQKKNPHASHNNKKVKPDVKPKAATNFKKKGKGKAKGDCFVCGKSGHWAKDCPERKDRKSANMIISEGGGTSGDATFFENEFPMKYTPSTSSKETVMPHEHFAPIEHNDQTPEENPEEDNIVDTRKSKRQRVAKSFGDDYIVYLVDDTPRTIEEAYLSPDADYWKEAVRSEMDSIMSNGTWEVVERPYGCKPVGCKWVFKKKLRPDGTIEKYKARLVAKGYTQKEGEDFFDTYSPVARLTTIRVLLALAASHGLLVHQMDVKTAFLNGELEEEIYMDQPDGYVLEGQEGMVCKLLKSLYGLKQAPKQWHEKFDTTLTSAGFVVNEADKCVYYRYGGGEGVILCLYVDDILIFGTSLNVIEEVKDYLSKSDLGEADVILNIKLQRGDEGGITLVQSHYVDKVLSRFGYSDCKPAPTPYDPSVLLRKNRRIARDQLRYSQIIGSLMYLASATRPDISFAVSKLSRFVSNPGDDHWQALERVMRYLKGTMSYGIHYTGYPKVLEGYSDSNWISDADEIKATSGYAFTLGGGAVSWKSCKQTILTRSTMEAELTALDTATVEAEWLRELLMDLPVVEKPVPAILMNCDNQTVIIKVNSSKDNMKSSRHIKRRLKSVRKQKNSGVIALDYVQTARNLADQFTKGLPPTNPRSHDSLRNSASTFFLLIDKEAASLIRVPRFFPGFWGVPPARLLIAMSGVAAAAIGGGGAPPPTPTGAGSGAGAPGGGAVNDYNNGGNSASPSSGGPFSGTTFRFRRANYVTRNFAIAAVTVFFPRPEEGPSALVNSAHHQFDRVRRCEVVGEMSSGGEEGKTSWPEVVGLRAEEAKKVILKDMPDADIVVVPVGTPVTMDFRPNRVRIFVDTVAGTPTIG

SEQ ID NO: 20338 - protein, 1268 aa, Oryza sativa
  Clone ID: TF_OSC401325j.C1.p27.fg
MQCFYVSRGKRSEPPLSPEEEAKFEASDCLFRGALISVLADNIVDVYMHMPSGKDMWDALEAKFGVSDAGSELYVMEQFYDYKMVDDRSVVEQAHEIQMLAKELENNNCELPDKFVAGGIIAKLPPSWSDFATSLKHKRQEFSVLDLIGSLGVEEKARAKDVRGKKVEGGSSANMVQKKNPHASHNNKKVKPDVKPKAATNFKKKSKGKANGDCFVCGKSGHWAKDCPERKDRKSANMIISEGGGTSGYGKILPTVLSVFHSPDWWVDTGANIHVCADISLFSSYQVGRGSSLLMGNGSLAAVHGVGTVDLKFTSGKTVQLKNVQHVPSIKKNLVSGSLLCREDFRLVFESNKCVVSKYETFVGKGYDSGGLFRFSLNDMCNNHNAVNHISENDESNVWHSRLCHVNFGCMTRLANMSLIPKFTLVKGSKCHTCVQSKQPRKPHKASEARNLAPLELVHSDLCEMNGVLTKGGKKYFMTLIDDCTRFCYVYLLKTKDEALHFFKIYKAEVENQLERKIKRLRSDRGGEYFSNEFASFCEEFGIIHEMTPPYSPQSNGVAERKNRTLTEMVNAMLDTAGLSKEWWGEAVLTACHVLNKIPMKHKEVTPFEEWERKKLNLSYLRTWGCLAKVNVPIAKKRKLGPKTVDCVFLGYAIHSVGYRFLIVNSGVPDMHVGTILESRDATFFENEFPMKYTPSTSSKETVMPHEYFAPIEHNDQTPEENPEEDNIVDTRKSKRQRVAKSFGDDYIVYLVDDTPRTIEEAYSSPDADYWKEAVRSEMDSIMSNGTWEVVERPYGCKPVGCKWVFKKKLRPDGTIEKYKARLVAKGYTQKEGEDFFDTYSPVARLTTIRVLLALAASHGLLVHQMDVKTAFLNGELEEEIYMDQPDGYVLEGQEGMVCKLLKSLYGLKQAPKQWHKKFDTTLTSAGFVVNEADKCVYYRYGGGEGVILCLYVDDILIFGTSLNVIEEVKDYLSKSFEMKDLGEADVILNIKLQRGDEGGITLVQSHYVDKVLSRFGYSDCKPAPTPYDPSVLLRKNRRIARDQLRYSQIIGSLMYLASATRPDISFAVSKLSRFVSNPGDDHWQALERVMRYLKGTMSYGIHYTGYPKVLEGYSDSNWISDADEIKATSGYVFTLGGGAVSWKSCKQTILTRSTMEAELTALDTATVEAEWLRELLMDLPVVEKPVPAILMNCDNQTVIIKVNSSKDNMKSSRHIKRRLKSVRKQKNSGVIALDYVQTARNLADQFTKGLPRNVIDSASREMGLIPT

SEQ ID NO: 20339 - protein, 425 aa, Oryza sativa
  Clone ID: TF_OSC401432j.C1.p16.gm
MAEMVRHLELLLEVVHQELEPVPRTTTPTEAVLPHNPAEGHSQAMQCFYVSRGKRSEPPLSPEEEAKFEASDYLFRGALISVLTDNIVDVYMHMPSGKDMWDALEAKFGVSDAGSELYVIEQFYDYKMEKARAKDVRGKKVEGGSSANMVQKKNPHASRNNKKVKPDVKPKAATNFKKKGKGKAKGDCFVCGKSGHWAKDCPERKDRKSANMVISEGGGTSGYEHNDQTPEENPEEDNIVDTRKSKRQRVAKSFGDDYIVYLVDDTPRTIEETYSSPDADYWKEAVHSEMDSMMSNGTWEVVERPYGCKPVGCKWVFKKKLRPDGTIEKYKARLVAKASHDLLVHQMDVKTAFLNGELEEEIYMDQPDSLNVIEEVKDYLSKSFEMKDLGEADVILNIKLQRGYEDHLNEVNNGSRTYSTRYCDS

SEQ ID NO: 20340 - protein, 1015 aa, Oryza sativa
  Clone ID: TF_OSC401539j.C1.p47.gm
MDHVVYLSADKLLTEQFADNVAMARPSDIRAVLASYQGRDIPAEFIERSKEHQRASLPASTARTNTSGRSPDQPEAEPVQIVAAMRPRAFAPPCLPGSGPLPGLAVPGRGDLFPAAGSVVGRRAAPAPAGRGAVARAVDGPSAAAAVAAAAASAAADVPPPQITWQIVVGAVAGVTPFVVAGVEFGKRIIAQKKCEICGGSGLVMKKDYYVRCQGRSRHLLLAHQLRIQLLSASAAAQLLSAAAHHRRHFEVGVGMPHARARAGPWAWPRRGVAGGGRVSRRYPFAATNPRSHDSLRNNASTFFLLIDKEAASFWGVPPARLLIAMSGVAAAAIGGGGAPPPTGAAPPPTPTGAGSGAAMQCFYVSRGKRSEPPLSPEEEAKFEASDCLFRGALISVLTDNIVDVYMHMPSGKDMWDALEAKFGVSDAGSELYVMEQFYDYKMVDDRSVVEQAHEIQMLAKELENNNCELPDKFVAGGIIAKLPPSWSDFATSLKHKRQEFSVPDLIGSLGVEEKVRAKDVRGKKVEGGSSANMVQKKNPHASHNNKKVKPDVKPKAATNFKKKGKGKAKGDCFVCGKSGHWAKDCPERKDMKSANMIISEGGGTSGYGRERFLLVDGKRVACGCSCVGYRFLIVNSGVPDMHAGTIFESRDATFFENEFPMKYTPSTSSKETVMPHEHFAPIEHNDQTPEENPEEDNIVDTRKSKRQRVAKSFGDDYIVYLVDDTPRTIEEAYSSPDADYWKEAVRSEMDSIMSNGTWEVVERPYGCKPVGCKWVFKKKLRPDGTIEKYKARLVAKGYTQKEGEDFFDTYSPVARLTTIRVLLALAASHGLLVHQMDVKTTFLNGELEEEIYMDQPDGYVLEGQEGMVCKLLKSLYGLKQAPKQWHEKFDTTLTSAGFVVNEADKCVYYRYGGGEGVILCLYVDDILIFGTSLNVIEEVKDYLSKSFEMKDLGEADVILNIKLQRGDEGGITLVQSHYVDKDGLCLNVIRVAFPSRDVDLQNISEGTHLYEFDC

SEQ ID NO: 20341 - protein, 1388 aa, Oryza sativa
  Clone ID: TF_OSC401643j.C1.p14.fg
MSGVAAATAGGGGAPPPTGARSGSGAGAPGGAVNDNNNGGNSASPSSGGPFSGYNLLLLLLLLALSLYYVRYVLVPVLHDASSMLSRYWYVPVPDIYDAHSMLLVMLRSPYTAYVMIIVSISWIKICRLMTIFPTIQKPDRSFSVVGFAAALKPHAFDGSNYKRWKARALLWLTAMQCFYVSRGKRSEPPLSPEEEAKFEASDCLFRGALISVLADNIVDVYMHMPSGKDMWDALEAKFGVSDAGSELYVMEQFYDYKMVDDRSVVEQAHEIQMLAKELENNNYELPDKFVAGGIIAKLPHSWSDFATSLKHKRQEFSVPDLIGSLGVEEKARAKDVRGKKVEGGSSANMVQKKNPHASHNNKKVKPDVKPKAATNFKKKGKGKAKGDCFVCGKSGHWAKDCPERKDRKSANMIISEGGGTSGYGKILPTVLSVFHSPDWWVDTGANIHVGRGSSLLMGNRSLAAVHGVGTVDLKFTSGKTVQLKNVHHVPSIKKNLVSGSVLCREGFRLVFESNKCVVSKYGTFVGKGYDNGGLFRFSLNDMCNNHNAVNHISENDESNVWHSRLCHVNFDCMTRLANMSLIPKFTLVKGSKCHTCVQSKQPRKPHKASKARNLAPLELVHSDLCEMNGVLTKGGKKYFMTLIDDCTRFCYVYLLKTKDEALHYFKIYKAEVENQLERKIKRLRSDRGGEYFSNEFASFCEEFGIIHEMTPPYSPQSNGVAERKNRTLTEMVNAMLDTAGLSKEWWGEAVLTACHVLNKIPMKHKEVTPFEEWEWKKLNLSYLRTWGCLAKVNVPIAKKRKLGPKTVDCVFLGYAIHSVGYRFLIANSGVPDMHAGTIFESRDATFFENEFPMKYTPSTSSKETVMPHEHFAPIEHNDQMPEENPEEDNIVDTRKSKRQRVAKSFGDDYIVYLVDDTPRTVEEAYSSPDADYWKEAVRSEMDSIMSNGTWEVVERPYGCKPIGCKWVFKKKLRPDGTIEKYKARLVAKSYTQKEGEDFFDTYSPVARLTTIRVLLALAASHGLLVHQMDVKTAFLNGELEEEIYMDQPDGYVLEGQEGMVCKLLKSLYGLKQAPKQWHEKFDTTLTSAGFVVNEADKCVYYRYGGGEGVILCLYVDDILIFGTSLNVIEEVLSRFGYSDCKPAPTPYDPSVLLRKNRRIARDQLRYSQIIGSLMYLASATRPDISFAVSKLSRFVSNPGDDHWQALERVMRYLKGTMSYGIHYTGYPKVLEGYSDSNWISDADEIKATSGYAFTLGGGAVSWKSCKQTILTRSTMEAELTALDTATVEAEWLRELLMDLPVVEKPVPAILMNCDNQTVIIKVNSSKDNMKSSRHIKRRLKSVRKQKNSGVIALDYVQTARNLADQFIKGLPRNVIDSASREMGLIPT

SEQ ID NO: 20342 - protein, 1328 aa, Oryza sativa
  Clone ID: TF_OSC401685j.C1.p115.fg
MSGVATAAAGGDGRGGAPGAGAGAANDNINGDNSASQSSGGPFLGYILLLFPLLALSLYYYVRYVPVPDIHDASSMLLRYCNVPVSDIHDAHSMLLHDASSMLLRYCNIPVPDIHDTHSMLLVMLRSPYTAYAMIIVLTFWIKICRFMTIFPTIQKPDRSFSVVGFAAALKPHAFDGSNYKRWKACALLWLTAMQYFYVSRGKRSEPPLSPEEEAKFEALDCLFRGALISVLADNIVDVYMHMPSGKDMWDALEAKFGVSDAGSELYVMEQFYDYKMVDDRSVVDQPHEIQMLAKKLENNNCELPDKFVAGGIIAKLPTSWSDFATSLKHKRQEFSVSDLIGSLGVEKKARAKDVRGKKVEGGSSANMVQKKNPHASHNNKKVKPDVKPKAATNFKKKGKGKAKGDCFVCGKSGHWAKDCPERKDRKSANMVISEGGGTSGYGKILPTVLSVLHLPDWWVDTGANIHVGRGSSLLMGNGSLAAVHGVGSKCHTCIQSKQPRKPHKSSEARNLAPLELVHSDLCEMNDVLTKGGKKYFMTLIDDCTRFCYVYLLKTKDKALHYFKIYKAEAENQLERKIKRLRSDRSGEYFSNEFASFCEEFGIIHERTPPYSPQSNGVAERKNRTLTEMVNAMLDTSGLSKEWWGEAVLTTYHVLNKIPMKHKEVTPFEEWERKKLNLSYLRTWGCLAKVNVPIAKKRKLGPNTVDCVFLGYAIHSVGYRFLIVNFGVPDMHVGTILESRDATFFENEFPMKHTPSTSSKETVMPHEHFAPVEHNDQTPEENPEEDNIVDTRKSKRQRVAKSFGDDYIVYLVDDTSRTIEEAYSSPDADYWKEAVRSEMDSIMSNGTWEVVELSYGCKPVGCKWVFKKKLIPDGTIEKYKARLAAKGYTQKEGEDFFDTYSPVARLTTIRVLLALAASHGLLVYQMDVKTAFLNGELEEEIYMDQLDGYVLEGQEGMVCKLLKSLYGLKQAPKQWHEKFDTTLTSAGFVVNETDKCVYYRYGGGEGVILCLYVDDILIFGTSLNVIEEVKDYLSKSFEIKDLGEADVILNIKLQIGDEGGITLVQSHYVDKVLSRFGYSDCKPAPTPYDPSVLLRKNRRIARDQLRYSQIIGSLMYLASATRPDISFAVSKLSRFVSNPGHDHWQALERVMRYLKGTMSYGIHYTGYPKVLEGYSDSNWISDADEIKATSGYVFTLGGGAVSWKSCKQTILTRSTMEAELTALDTATVEAEWLHELLMDLPVVEKSVPAILMNCDNQTVIIKVNSSKDNTKSSRHIKRRLKSVRKQKNSGVIALDYVQTARNLADQFTKGLPRNVIDNASREMGLIPT

SEQ ID NO: 20343 - protein, 1361 aa, Oryza sativa
  Clone ID: TF_OSC401706j.C1.p4.fg
MSASVGGGGTPPPTGAGAGSGVGAPGGGAVNDYNNGDNSASPSSGGPFSGYNLLLLFPLLALYYVPVPVLHDASSILSCYWYAPVPDIHDAHSMLLVMLRSPYTAYAMIIVSFSWIKICRLMTIFPTIQKPDRSFSVVGFAAALKPHAFDGSNYKRWKARALLWLTAMQCFYVSRGKRSEPPLSPEEDAKFEASDCLFRGALISVLADNIVDVYMHMPSGKDMWDALEAKFGVSDAGSELYVMEQFYDYKMVDDRSVVEQAHEIQMLAKELENNNCELPDKFVAGGIIAKLPPSWSDFATSLKHKRQEFSVPDLIGSLGVEEKARAKDIRGKKVEGGSSANMVQKKNPHASHNNKKVKPDVKPKAATNFKKKGKGKAKGDCFVCGKSGHWAKDCPERKDRKSANMIISEGGGTSGYGKILPTVLSVFHSPDWWVDTGTNIHVCADISLFSSYQVGRGSSLLMGNGLLAAVHGVGTVDLKFTSGKTVQLKNVQHVPSIKKNLVSGSLLCREGFRLVFESNKCVVSKYGTFVGKGYDSGGLFRFSLNDMCNNHNAVNHISENDESNVWHSRLCHVNFGCMTRLANMSLIPKFTLVKGSKCHTCVQSKQPRKPHKASEARNLAPLELVHSDLCEMNGVLTKGGKKYFMTLIDDCTRFCYVYLLKTKDEALHYFKIYKAEVENQLERKIKRLRSDRGGEYFSNEFASFCEEFGIIHEMTPPYSPQSNGVAERKNRTLTEMVNAMLDTAGLSKEWWGEAVLTACHVLNKIPMKHKEVTPFEEWERKKLNLSYLRTWGCLAKVNVPIVKKRKLGPKTVDCVFLGYAIHSVGYRFLIVNSGVPDMHAGTIFESRDAIFFENEFPMKYTPSTSSKETVMPHEHFAPIEHNDETPEENPEEDNIVDTRKSKRQRVAKSFGDDYIVYLVDDTPRTIEEAYSSPDADYWKEAVRSEMDSIMSNGTWEVVERPYGCKPVGCKWVFKKKLRPDGTIEKYKARLVAKGYTQKEGEDFFDTYSPVARLTTIRVLLALAASHGLLVHQMDVKTAFLNGELEEEIYMDQPDGYVLEGQEGMVCKLLKSLYGLKQAPKQWHEKFDITLTSAGFVVNEADKCVYYRYGGGEGVILCLYVDDILIFGTSLNVIEEVKDYLSKNFEMKDLGEADVILNIKLQRGDEGGITLVQSHYVDKALERVMRYLKGTMSYGIHYTGYPKVLEGYSDSNWISDADEIKATSGYVFTLGGGAVSWKSCKQTILTRSTMEAELTALDTATVEAEWLRELLMDLPVVEKPVPAILMNCDNQTVIIKVNSSKDNMKSSRHIKRRLKSVRKQKNSGVIALDYVQTARNLADQFTKGLPRNVIDSASREMGLIPT

SEQ ID NO: 20344 - protein, 1110 aa, Oryza sativa
  Clone ID: TF_OSC401762j.C1.p8.fg
MSAPGAGAATAAGGDGGGGAPPGAGAGAGGGAPGARAGAANNNTNGGNSASQSSGGPFSRSPYTVYAMIIVLTFWIKICRFMTIFSTIQKPDRSFSVVGFAATLKPHAFDGSNYKRWKARALLWLTAMQCFYVSRGKRSEPPLSPEEEAKFEASDCLFRGALISVLADNIVDVYMHMPSGKDMWDALEAKFGVSDAGSALYVMEQFYDYKMVDDRSVVEAHEIQMLAKELENNNCELPDKFVVGGIIAKLPPSWSDFATSLKHKRQEFSVSDFIGSLGVEEKARAKDVRGKKVEGGSSANMVQKKNPHVSHNNKKVKPDVKSKAATNFKKKGKRKAKGDCFVCGKSGHWAKDCPERKDRKSANMVISEGGGTSGYGKILPTVLSVFHSPDWWVDTGANIHVGRGSSLLMGNGSLAAVHGVGTVDLKFTSGKTMQLKNVQHVSSIKKNLVSGSLLCREGFRLVFECNKCVVSKYGTFVGKCYDNGAEVENQLERKIKRLRSDRGGEYFSNEFASFCEEFGIIHERTPPYSPQSNGVAERKNRTLTEMVNAMLDTAGLSKEWWGEAVLTACHVLNKIRMKHKEVTPFKEWERKKLNLSYLRTWGCLAKVNVPITKKRKLGPNIVDCVFLCYAIHSVGYRFLIVNSGVPDMHVGTIFESRDATFFENEFPMKHTPSTSSQETVMPHEHFAPIEHNDQTPEENPEEDNIVDTRKSKRQRVTKSFGDDYIVYLVDDTPRTIEEAYSSPDADYWKEAVRSEMDSIMSNGTWEVVERPYGCKPMDVKTTFLNGELEEEIYMDQPDGYVLEDQKGMVCKLLKSLYGLKQAPKQWHEKFDTTLTSAGFVVNEADKCVYYRYDGGEGVILCLYVDDILIFGTSLNVIEEVKDYLSKSFEMKDLGEADVILNIKLQRGDEGGIALVQSPLCGQDDHWQALERVMRYLKGTMSYGIHYTGYPKVLEGYSDSNWISDADEIKATSGYVFTLGGGAVSWKSCKQTILTRSTMEAELTALDTATVEAEWLRELLMDLPVVEKPVSAILMNCDNQTVIIKVNSSKDNTKSSRHIKRRLKSVRKQKNSGVIALDYVQTARNLADQFTKGLPRNVIDSASRKMGLIPT

SEQ ID NO: 20345 - protein, 1242 aa, Oryza sativa
  Clone ID: TF_OSC401880j.C1.p5.fg
MSGVAAAAAGGDGGGGAPPPGAGAGGGAPGGAANDNINGGNSASQSSGGPFSGVLADNIVDVYMHMPSGKDMWDTLEAKFGVSDAGSELYVMEQFYDYKMVDDRSVVEQAHEIQMLAKELENNNCALPDKFVAGGIIAKLPPSWSNFATSLKHKRQEFSVSDLIGSLGVEEKARAKDVRGKKVEGGSSANMVQNKNPHASHNNKKVKPDVKPKAATNFKKKGKGKAKGDCFVCGKSGHWAKDCPERKDRKSANIVISEGGGTSGYGKILPTVLSVFHSPDWSLASFHGVGTVDLKFTSGKTVQLKNVQHVPSIKKNLVSGSLLYREGFRLVFESNKCVVSKYGTFVGKGYDSGGLFRFSLNDMCNNHNAVNHISENDESNVWHSRLCHVNFGCMTRLANMSLIPKFTLVKGSKCYTCVQSKQPRKPHKASEARNLAPLELVHSDLCEMNGVLTKGGKKYFMTLIDDCTRFCYVYLLKTKDEALHYFKIYKAEVENQLERKIKRLRSDRGGQYFSNEFASFCEEFGIIHERTPPYSPQSNGVAERKNRTLTEMMNAMLDTAGLSKEWWGEAVLTACHVLNKIPMKHKEVAPFEEWERKKLNLSYLRTWGCLAKVNVPITKKRKLGPNTVDCVFLGYAIHSVGYRFLIVNSGVPDMHVGTILESRDATFFENEFPMKHTPSTSSKETVMPHEHFAPTEHNDQTPEENPEEDNIIDTRKSKRQRVAKSFGDDYIVYLVDDTPRTIEEAYSSPDADYWKEAVCSEMDSIMSNGTWEVVERPYGCKPVGCKWVFKKKLRPDGTIEKYKARLVAKGYTQKEGEDFFDTYSPVARLTTIRVLLALAASHGLLIHQMDVKTAFLNGELEEEIYMDQPDGYVLEGQEGMACKLLKSLYGLKQAPKQWHEKFDTMLTFAGFVVNEADKCVYYRYGGGEGVILCLYVDDILIFGTSLNVIEEVKDYLSKSFEMKDLGEADVIFNIKLQRGDEGGITLVQSHYVDKVLSRFGYSDCKPAPTPYDPSVLLRKNRRIARDQLRYSQIIGSLMYLASATRLDISFAASKLSRFVSNPGDDHWQALERVMRYLKGTMSYGIHYTGYPKVLEGYSDSNWISNADEIKATSGYVFTLGGGAVSWNSCKQTILTRSTMEAELTALDTATVEAEWLRELLMDLPVVEKPVPAILMNCNNQTVIIKMNSSKDNMKSSRHIKRRLKSVRKQKNSGVIALDYVQTARNLADQFTKGLPRNVIESA

SEQ ID NO: 20346 - protein, 1268 aa, Oryza sativa
  Clone ID: TF_OSC401918j.C1.p5.fg
MQCFYVSRGKRSEPPLSPEEEAKFEASDCLFRGALISVLADNIVDVYMHMPSGKDMWDALEAKFGVSDAGSELYVMEQFYDYKMVDDRSVVEQAHEIQMLAKELENNNCELPDKFVAGGIIAKLPPSWSDFATSLKHKRQEFSVPDLIGSLGVEEKARAKDIRGKKVEGGSSANMVQKKNPHASHNNKKVKPDVKPKAATNFKKKGKGKAKGDCFVCGKSGHWAKDCPERKDRKSANMIISEGGGTSGYGKILPTVLSVFHSPDWWVDTGANIHVCADISLFSSYQVGRGSSLLMGNGSLAAVHGVGTVDLKFTSGKTVQLKNVQHVPSIKKNLVSGSLLCREGFRLVFESNKCVVSKYGTFVGKGYDSGGLFRFSLNDMCNNHNAVNHISENDESNVWHSRLCHVNFGCMTRLANMSLIPKFTLVKGSKCHTYVQSKQPRKPHKASEARNLAPLELVHSDLCEMNGVLTKGGKKYFMTLIDDCTRFCYVYLLKTKDEALHYFKIYKAEVENQLERKIKRLRSDRGGEYFSNEFASFCEEFGIIHEMTPPYSPQSNGVAERKNRTLTEMVNAMLDTAGLSKEWWGEAVLTACHVLNKIPMKHKEVTPFEEWERKKLNLSYLRTWGCLAKVNVPIVKKRKLGQKTVDCVFLGYAIHSVGYRFLIVNSGVPDMHAGTIFESRDATFFENEFPMKYTPSTSSKETVMPHEHFAPIEHNDETPEENPEEDNIVDTRKSKRQRVAKSFGDDYIVYLVDDTPRTIEEAYSSPDADYWKEAVRSEMDSIMSNGTWEVVERPYGCKPVGCKWVFKKKLRPNGTIEKYKARLVAKGYTQKEGEDFFDTYSPVARLTTIRVLLALAASHGLLVHQMDVKTAFLNRELEEEIYMDQPDGYVLEGQEGMVCKLLKSLYGLKQAPKQWHEKFDITLTSAGFVVNEADKCVYYRYGGGEGVILCLYVDDILIFGTSLNVIEEVKDYLSKNFEMKDLGEADVILNIKLQRGDECGITLVQSHYVDKVLSLFGYSDCKPAPTPDDPSVLFRKNRRIARDQLRYSQIIGSLMYLASATRPDISFAVSKLSRFVSNPGDDHWQALERVMRYLKGTMSYGIHYTGYPKVLEGYSDSNWISDADEIKATSGYVFTLGGGAVSWKSCKQTILTRSTMEAELTALDTATVEAEWLRELLMDLPVVEKPVPAILMNCDNQTVIIKVNSSKDNMKSSRHIKRRLKYVRKQKNSGVIALDYVQTARNLADQFTKGLPRNVIDSASREMGLIPT

SEQ ID NO: 20347 - protein, 1413 aa, Oryza sativa
  Clone ID: TF_OSC401921j.C1.p13.fg
MSNTGDKEKETPVNTNGGNTASNSSGGPFLGYNLITLFQLEVLLLMFIAMSTLCHYVIVDAYSTLSMLMLITFTTITGSNPIVNIMFIILLFWIKICRIMTKFPTIQKPDRSFSVVGFAATLKPHAFDGSNYKRWKARALLWLTAMQCFYVSRGKRSEPPLSPEEEAKFEASDCLFRGALISVLADNIVDVYMHMPSGKEMWDALEAKFGVSDAGSELYVMEQFYDYKMVDDRSVVEQAHEIQMPAKELENNNCELPDKFVAGGIIAKLPPSWSDFATSLKHKRQEFSVPDLIGSLGVEEKARAKDVRGKKVEGGSSANMVQKKNPHASHNYKKVKPDVKPKAATNFKKKSKGKAKGDCFVCGKSGHWAKDCPERKDRKSANMIISEGGGTSGYSKILPTVLSVFHSPDWWVDTGANIHVCADISLFSSYQVGRGSSLLMGNGSLAAVHGVGTVDLKFTSGKTVQLKNVQHVPSIKKNLVSGSLLCREGFRLVFESNKCVVSKYGTFVGKGYDSGGLFRFSLNDMCNNHNAVNHISENDESNVWHSRLCHVNFSCMTRLANMSLILKFTLVKGSKCHTCVQSKQPRKPHKASEARNLAPLELVHSDLCEMNGVLTKGGKKYFMTLIDDCTRFCYVYLLKTKDEALHFFKIYKAEVENQLERKIKRLRSDRGGEYFSNEFASFCEEFGIIHEMTPPYSPQSNGVAERKNRTLTEMVNAMLDTAGLSKEWWGEAVLTACHVLNKIPMKHKEITPFEEWERKKLNLSYLRTWGCLAKVNVPIAKKRKLGPKTVDCVFLGYAIHSVGYRFLIVNSGVPDMHVGTILESRDATFFENEFPMKYTPSTSSKETVMPHEHFAPIEHNDQTPEENPEEDNIVDTRKSKRQRVAKSFGDDYIVYLVDDTPRTIEEAYSSPDADYWKEAVRSEMDSIMSNGTWEVVERPYGCKPVGCKWVFKKKLRLDGTIEKYKARLVAKGYTRKEGEDFFDTYSPVACLTTIRVLLALAASHGLLVHQMDVKTAFLNGELEEEIYMDQPDGYVLEGQEGMVCKLLKSLYGLKQAPKQWHEKFDTTLTSAGFVVNEADKCVYYRYGGGEGVILCLYVDDILIFGTSLNVIEEVKDYLSKSFEMKDLGEADVILNIKLQRGDEGGITLVQSHYVDKVLSRFGYSDCKPAPTPYDPSVLLRKNRRIARDQLRYSQIIGSLMYLASATRPDISFAVSKLSRFVSNPGDDHWQALERVMRYLKGTMSYGIHYTGYPKVQEGYSDSNWISDADEIKATSGYVFTLGGGTVSWKSCKQTILTRSTMEAELTALDTATVEAEWLRELLMDLPVVEKPVPAILMNCDNQTVIIKVNSSKDNMKSSRHIKRRLKSVRKQKNSGVIALDYVQTARNLADQFTKGLPRNVIDSASREMGLIPT

SEQ ID NO: 20348 - protein, 1030 aa, Oryza sativa
  Clone ID: TF_OSC401925j.C1.p1.fg
MSNTGDKEKETPVNTNGGNTASNSSGGPFLGYNLITLFQLEVLLLMFIAMSTLCHYVIVDAYSTLSMLMLITFTTITGSNPIVNIMFIILLFWIKICRIMTKFPTIQKPDRSFSVVGFAATLKPHAFDGSNYKRWKARALLWLTAMQCFYVSRGKRSEPPLSPEEEAKFEASDCLFRGALISVLADNIVDVYMHMPSGKEMWDALEAKFGVSDAGSELYVMEQFYDYKMVDDRSVVEQAHEIQMPAKELENNNCELPDKFVAGGIIAKLPPSWSDFATSLKHKRQEFSVPDLIGSLGVEEKARAKDVRGKKVEGGSSANMVQKKNPHASHNYKKVKPDVKPKAATNFKKKSKGKAKGDCFVCGKSGHWAKDCPERKDRKSANMIISEGGGTSGYSKILPTVLSVFHSPDWWVDTGANIHVGRGSSLLMGNGSLAAVHGVGTVDLKFTSGKTVQLKNVQHVPSIKKNLVSGSLLCREGFRLVFESNKCVVSKYGTFVGKGYDSGGLFRFSLNDMCNNHNAVNHISENDESNVWHSRLCHVNFSCMTRLANMSLILKFTLVKGSKCHTCVQSKQPRKPHKASEARNLAPLELVHSDLCEMNGVLTKGGKKYFMTLIDDCTRFCYVYLLKTKDEALHFFKIYKAEVENQLERKIKRLRSDRGGEYFSNEFASFCEEFGIIHEMTPPYSPQSNGVAERKNRTLTEMVNAMLDTAGLSKEWWGEAVLTACHVLNKIPMKHKEITPFEEWERKKLNLSYLRTWGCLAKVNVPIAKKRKLGPKTVDCVFLGYAIHSVGYRFLIVNSGVPDMHVGTILESRDATFFENEFPMKYTPSTSSKETVMPHEHFAPIEHNDQTPEENPEEDNIVDTRKSKRQRVAKSFGDDYIVYLVDDTPRTIEEAYSSPDADYWKEAVRSEMDSIMSNGTWEVVERPYGCKPVGCKWVFKKKLRLDGTIEKYKARLVAKGYTRKEGEDFFDTYSPVACLTTIRVLLALAASHGLLVHQMDVKTAFLNGELEEEIYMDQPDGYVLEGQEGM

SEQ ID NO: 20349 - protein, 1194 aa, Oryza sativa
  unsure (1)..(1194): unsure at all Xaa locations
  Clone ID: TF_OSC402516j.C1.p2.np
VVAAQYDYRQFSSISSIGAKFGCKQLAKELENNNCELLDKFVAGGIIAKLPPSCSDFATCLKHKRXEFSVSDLIGSLGVEEKARAKDVQGKKIEGGSSANMVQKKNPQASHNNKKVKPDVKPKAATNFKKKGKGKAKGDCFVCGKSGHWAKDCPERKDRKSANMVISEGGGTSGYGKILPTVLSVFHSPDWWVDTANIHVCADISLFSSYQVGRGSSLLMGNGSLAAVHGVGTIDLKFTSGNTVQLKNVQHVPSYIKKNLVSGSLLCREGFRLVFESNKCVVSKYETFVGKGYDSGGLFRFALNDMCNNHNAVNHISENDESNVWHSRLCHVNFGCMTRLANMSLIPKFTLVKGSKCHTCVQSKQPRKPHKASEARNLAPLELVHSDLCEMNSVLTKGGKKYFMTLTDDCTRFCYVYLLKRKDEALHYFKIYKAEVENQLERKIKRLRSDRGREYFSNEFASFCEEFGIIHERTPPYLPQSNGVAERKNRTLAEIVNAMLDTTGLCKEWWGEAVLTACYVLNKIPMKHKKVTPFEEWERKKLNLSYLRTWGCLAKVNVPIAKKRKLGPNTVDCVFLGYAIHSVGYRFLIVNSGVPDMHVGTIFESRDAIFFENEFPMKHTPSTSSQETVMPHEHFAPIEHNDQTPKKNPEEDNIVDTRKSKRQRVAKSFGDDYIVYLVDDTPRTIEEAYSSPDADYWKEAVRSEMDPIMSNGSWEVVERPYGCKPIGCKWVFKKKFRPNGTIEKYKARLVPKGYTQKEGEDFFDIYSPVARLTTIRVLLALAASHGLLVHQMDVKTAFLNGELEEEIYMDQLDGYVLEGREGMVCKLLKSLYGIKQAPKQWHEKFDTTLTSVGFVVNVVDKCMYYRYGGGEGVILCLYVDDILIFGISLNVIEEVKDYLSKSFEMKDLGEADVILNIKLQRGDEGGITLVQSHYVDKVLSRFGYSDCKPAPTPYDPSVLLRKNRRIVRDQLRYSQIIGSLIYLASATRPDISFAVSKLSRFVSNPGDDHWQALERVMRYLKGTMSYGIHYTGYPKVLEGYSDSNWISDADEIKVTSGYVFTLGGGAVSWKSCKQTILTRSTMEVELTALDTATVEAEWLRELLMDLSVVEKPVPAILMNCDNQTVIIKLNSSKDNMKLSRHIKRRLKSVRKXKNSGVIALDYVQTARNLADQFTKGLPRNVIDSASREMGMIPT

SEQ ID NO: 20350 - protein, 1301 aa, Oryza sativa
  Clone ID: TF_OSC402776j.C1.p10.gm
MQCFYVSRGKRSEPPLSPEEEAKFEASDCLFRGALISVLADNIVDVYMHMPSGKDMWDALEAKFGVSDAGSELYVMEQFYDYKMVDDRSVVEQAHEIQMLAKELENNNCELPDKFVAGGIIAKLPPSWSDFATSLKHKRQEFSVPDLIGSLGVEEKARAKDVRGKRVEGGSSANMVQKKNPHASHNNKKVKPDVKPKAATNFKKKGKGKAKGDCFVCGKSGHWAKDCPERKDRKSANIVISEGGGTSGTVGRGSFLLMGNGSLAAVHGIAKKRKLGPKTVDCVFLGYAIHSVGYRFLIVNSGVPDMHAGTILESRDATFFENEFPMKYTPSTSSKETVMPHEHFAPIEHDDQTPEENPEEDNIVDTRKSKRQRVAKSFGDDYIVYLVDDTPRTIEEAYSSPDADYWKEAVRSEMDSIMSNGTWEVVERPYGCKPVGCKWVFKKKLRPDGTIEKYKARLVAKGYTQKEGEDFFNTYSPVARLTTIRVLLALAASHGLLVHQMDVKTAFLNGELEEEIYMDQPDGYVLEGQEGMVCKLLKSLYGLKQAPKQWHEKFDTTLTSAGFVVNEADKCVYYRYGGGEGVILCLYVDDILIFGTSLNVIEEVKDYLSKSFEMKDLGEADVILNIKLQRGDEGGITLVQSHYVDKVLSRFGYSDCKPAPTPYDPSVLLRKNRRIARDQLRYSQIIGSLMYLASATRPDISFAVSKLSRFVSNPGDDHWQALERVMRYLKGTMSYGIHYTGYPKVLEGYGDSNWISDADEIKATSGYVFTLGGGAVSWKSCKQTILTRSTMEAELTALDTATVEAEWLRELLMDLPVVEKPVPAILMNCDNQTVIIKVNSSKDNMKSSRHIKRRLKSVRKQKNSGVIALDYVQTARNLADQFTKGLPRFWGVPPARLLIAMSGVAAAATGPPTGAGGTPPPTGAGSGAGAPGGGAVNDYNNGGNSASPSSGGPFSGDGYAFASTENSMVIYNINVAPLIKSNKYTLLAERTRKWEEEKRQERREGKAPAAPAGNRRGEAKQKATAEDIDDGDEDLGFQEPEATVATVDGGACAHASRWSLKAMKRELLAAAPTHEATRRARWSEVALTFDQTDHPPCVARGGQIAMVVSPTVCNVKLGRVLIDGGAALNILSPVAFDAIKALGMVLRPSQPIIGVTLGHTWPLGHIDLPVTFGGSANFRTERVDFDVADLSLPYNAVLGRPALVKFMAAVHYAYLQMKMPGPGGPITVHGDLKVALACMEQHADHLAAASKPAGGDERLSASVPAAPRQRMVTCDEVPVKEVALGDGPSKTTRIGGLLDDK

SEQ ID NO: 20351 - protein, 1438 aa, Oryza sativa
  Clone ID: TF_OSC406028j.C1.p4.fg
MSGGAPPPTGAGSGAGAPGGGAVNDYNNGGNSASPSSGGPFSGYNLLLLLLLALLLFPLLALYCVRYVLVPVLHDASSMLSHYWYVPVSDIHDAHSMLLVMLRSPYTAYAMIIVLISRIKICRIMTIFPTIQKPDRSFSVVGFAAALKPHAFDGSNYKRWKARALLWLTAMQCFYVSRGKRSEPPLSPEEEAKFEASDCLFRGALISVLADNIVDVYMHMPSGKDMWDALEAKFGVSDAGSELYVMEQFYDYKMVDDRSVVEQAHEIQMLAKELENNNCELPDKFVAGGIIAKLPPSWSDFATSLKHKRQEFSVPDLIGSLGVEEKARAKDIRGKKVEGGSSANMVQKKNPHASHNNKKVKPDVKPKAATNFKKKGKGKAKGDCFVCGKSGHWAKDCPERKDRKSANMIISEGGGTSGYGKILPTVLSVFHSPDWWVDTGANIHVCADISLFSSYQVGRGSSLLMGNGSLAAVHGVGTVDLKFTSGKTVQLKNVQHVPSIKKNLVSGSLLCREGFRLVFESNKCVVSKYGTFVGKGYDSGGLFRFSLNDMCNNHNAVNHISENDESNVWHSRLCHVNFGCMMRLANMSLIPKFTLVKGSKCHTCVQSKQPRKPHKASEARNLAPLELVHSDLCEMNGVLTKGGKKYFMTLIDDCTRFCYAYLLKTKDEALHYFKIYKAEVENQLERKIKRLRSDRGGEYFSNEFASFCEEFGIIHEMMPPYSPQSNGVAEKKNRTLTEMVNAMLDTAGLSKEWWGEAVLTACHVLNKIPMKHKEVTPFEEWERKKLNLSYLRTWGCLAKVNVPIVKKRKLGPKTVDCVFLGYAIHSVGYRFLIVNSGVPDMHAGTIFESRDATFFENEFPMKYTSSTSSKETVMPHEHFAPIEHNDQTSEENPEEDNIVDTRKSKRQRVAKSFGDDYIVYLVDDTPRTIEEAYSSPDADYWKEAVRSEMDSIMSNGTWEVVERPYGCKPVGCKWVFKKKLRPDGTIEKYKARLVAKGYTQKEGEDFFDTYSPVARLTTIRVLLALAASHGLLVHQMDVKTAFLNGELEEEIYMDQPDGYVLEGQEGMVCKLLKYLYGLKQAPKQWHEKFDTTLTSAGFVVNEADKCVYYRYGGGEGVILCLYVDDILIFGTSLNVIEEVKDYLSKSFEMKDLGEADVILNIKLQRGDEGGITLVQSHYVDKVLSRFGYSDCKPAPTPYDPSVLLRKNRRIARDQLRYSQIIGSLMYLASATRPDISFAVSKLSRFVSNPGDDHWQALERVMRYLKGTMSYGIHYTGYPKVLEGYSDSNWISDADEIKATSGYAFTLGGGAVSWKSCKQTILTRSTMEAELTALDTATVEAEWLRELLMDLPVVEKPVPAILMNCDNQTVIIKVNSSKDNMKSSRHIKRRLKSVRKQKNSGVIALDYVQTARNLADQFTKGLPRNVIDSASREMGLIPT

SEQ ID NO: 20352 - protein, 1382 aa, Oryza sativa
  Clone ID: TF_OSC408407j.C1.p3.fg
MSNTGDKEKETPVNTNGGNTASNSSGGPFLGYNLITLFQLEFLLLMFITMSTLCHYVIVDAYSTLSMLMLITFTTITGSNPIVNIMFIILLFWIKICRIMTKFPTIQKPDRSFSVVGFAAALKPHAFDGSNYKRWKARALLWLTAMQCFYVSRGKRSEPPLSPEEEAKFEASDCLFRGALISVLADNIVDVYMHMPSGKDMWDALEAKFGVSDAGSELYVMEQFYDYKMVDDRSVVEQAHEIQMLAKELENNNCELPDKFVAGGIIAKLPPSWSDFATSLKHKRQEFSVPDLIGSLGVEEKARAKDVRGKKVEGGSSANMVQKKNPHASHNNKKVKPDVKPKAATNFKKKSKGKAKGDCFVCGKSGHWAKDCPERKDRKSANMIISEGGGTSGYGKILPTVLSVFHSPDWWVDTGANIHVCADISLFSSYQVGRGSSLMMGNGSLAAVHGVGTVDLKFTSGKTVQLKNVQHVPSIKKNLVSGSLLCREGFRLVFESNKCVVSKYGTFVGKGYDSGGLFRFSLNDMCNNHNVVNHISENDESNVWHSRLCHVNFGCMTRLANMSLIPKFTLVKGSKCHTCVQSKQPRKPHKASEARNLAPLELVHSDLCEMNGVLTKGGKKYFMTLIDDCTRFCYVYLLKTKDEALHFFKIYKAEVENQLERKIKRLRSDRGGEYFSNEFASFCEEFGIIHEMTPPYSPQSNGVAERKNRTLTEMVNAMLDTAGLSKEWWGEAVLTACHVLNKIPMKHKEVTPFEEWERKKLNLSYLRTWGCLAKVNVPIAKKRKLGPKTVDCVFLGYAIHSVGYRFLIVNSGVPDMYVGRILESRDATFFENEFPMKYTPSTSSKETVMPHEHFAPIEHNDQTPEDNPEEDNIVDTRKSKRQRVAKSFGDDYIVYLVDDTPRTIEEAYSSPNADYWKEAVRSEMDSIMSNGTWEVVERPYGCKPVGCKWVFKKKLRPDGTIEKYKARLVAKGYTQKEGEDFFDTYSPVARLTTIRVLLALAASHGLLVHQMDVKTAFLNGELEEEIYMDQPDGYVLEGQEGMVCKLLKSLYVLKQAPKQWHEKFDTTLTSAGFVVNEADKCVYYRYGGGEGVILCLYVDDILIFGTSLNVIEEVKDYLSKSFEMKDLGEADVILNIKLQRGDEGGITLVQSHYVDKVLSRFGYSDCKLAPTPYDPSVLLRKNRRIARDQLRYSQIIGSLIYLASATRPDISFAVSKLSRFVSNPADDHWQALERVMRYLKGTMSYGIHYTGYPKVLEGYSDSNWISDADEVKATSGYVFTLGGGAVSWKSCKQTILTRSTMEAELTALDTATVEAEWLRELLIDLPVVEKPVPAILMNYDNQTVIIKVNSSKDNMKSSRHIKRRLKSVRKQKNSGVIALDYV

SEQ ID NO: 20353 - protein, 1457 aa, Oryza sativa
  Clone ID: TF_OSC408508j.C1.p21.fg
MSGVAAATAGGGGTPPPTGAGSGSGAGAPGGGAVNDYNNGGNSASPSSGGPFSGYNLLLLLLLLALFLFPLLALYYVRYVRYVLVPVLHDASSMLSSMLSRYWYVPVPDIHDAHSMLLVMLRSPYTAYAMIIVSFSWIKICRLMTIFPTIQKPDRSFSVVGFAAALKPHAFDGSNYKRWKARALLWLTAMQCFYVSRGKRSEPPLSPDEEAKFEASDCLFRGALISVLADNIVDVYMHMPSGKDMWDALEAKFGVSDAGSELYVMEQFYDYKMVDDRSVVEQAYEIQMLAKELENNNCELPDKFVAGGIIAKLPPSWSDLATSLKHKRQEFSVPDLIGSLGVEEKARAKYVRGKKVEGGSSANMVQKKNPHASHNNKKVKPDVKPKAATNFKKKGKGKAKGDCFVCGKSGHWAKDCPERKDRKSANMIISEGGGTSGYGKILPTVLSVFHSPDWWVDTGANIHVCADISLFSSYQVGRGSSLLMGNGSLAAVHGVGTVDLKFTSGKTVQLKNVQHVPSIKKNLVSGSLLCREGFRLVFESNKCVVSKYGTFVGKGYDSGGLFRFSLNDMCNNHNAVNHISENDESNVWHSRLCHVNFGCMTRLANMSLISKFTLVKGSKCHTCVQSKQPRKPHKASEARNLAPLELVHSDLCEMNGVLTKGGKKYFMTLIDDCTRFCYVYLLKTKDEALHYFKIYKAEVENQLERKIKRLRSDRGGEYFSNEFASFCEEFGIIHEMSPPYSPQSNGVAERKNRTLTEMVNAMLDTAGLSKEWWGEAVLTACHVLNKIPMKHKEVTPFEEWERKKLNLSYLRTWGCLAKVNVPIAKKRKLGPKTVDCVFLGYAIHSVGYRFLIVNSGVPDMHAGTILESRDATFFENEFPMKYTPSTSSKETVMPHEHFAPIEHDDQTPEENPEEDNIVDTRKSKRQRVAKSFGDDYIVYLVDDTPRTIEEAYSSPDADYWKEAVRSEMDSIMSNGTWEVVEHPYGCKPVGCKWVFKKKLRPDGTIEKYKARLVAKGYTQKEGEDFFDTYSPVARLTTIRVLLALAASHGLLVHQMDVKTAFLNGELEEEIYMDQPDGYVLEGQEGMVCKLLKSLYGLKQAPKQWHEKFDTTLTSAGFVVNEADKCVYYRYGGGEGVILCLYVDDILIFGTSLNVIEEVKDYLSKSFEMKDLGEADVILNIKLQRGDEGGITLVQSHYVDKVLSRFGYSDCKPAPTPYDPNVLLRKNRRIARDQLRYSQIIGSLMYLASATRPDISFAVSKLSRFVSNPGDDHWQALERVMRYLKGTMSYGIHYTGYPKVLEGYSDSNWISDANEIKAISGYAFTLGGGAVSWKSCKQTILTRSTMEAELTALDTATVEAEWLRELLMDLPVVEKPVPAILMNCDNQTVIIKVNSSKDNMKSSRHIKRRLKSVRKQKNSGVIALDYVQTARNLADQFTKGLPRNVIDSASREMGLIPT

SEQ ID NO: 20354 - protein, 1033 aa, Oryza sativa
  Clone ID: TF_OSC410626j.C1.p4.gm
MGSHWSSPPVTAARAAAAVAGGEARREEETCTGSLFLVADALHEHHHGRPNIAGATCVPHERDALLAFKEGVVGDPVGRLASWRTGEDCFRHWRGVRCSNLTGHVLKLHLRNTDGGEAAMSGKAGDQVFGDCFPHDCSVRPPCLRLEPELPPAPLLPLEMARREPEPFEPELPLAPLLPLEMARREPEALRTSTPTEAILPHNPAEGHSRAMQCFYVSRGKRSEPPLSPEEEAKFKASDCLFRGALISVLADNIVDVYMHMPFGKDMWDALEAKFGVSDAGSELYVMEQFYDYKMVDDRSVVEQAHEIQMLTKELENNNCELPDKFVAGGIIAKLPPSWSDFATSLKHKRQEFSVSDLIGSLGVEEKARAKDNWGKKVEGGSSANMVQKKNRHASHNNNKKVKPDVKPKVATNFKKKGKGKAKGDCFVCGKSGHWAKDCPERKDRKCANMVISEGGGTSGDATFFENEFSMKHTPSTSSQETVMPHKHFAPIEHNDQTPEENPEEDNIVDTRKSKRQRVAKSFGDDYIVYLVDDTPRTIEEAYSSPDADYWKEAVRSEMDSIMSNDTWEVVERPYGCKPIGCKWVFKKKLSPDGTIEKYKARLVAKGYTQKEGKDFFDTYSPVAHLTMIRVLLALAASHGVLVHQMNVKTAFLNGELEEEIYMDQPDGYVLEGFVVNGADKCVYYRYGGGEGVILCLYVDDILIFGTNLNVIEGVKDYLSKSFEMKDLGEADVILNIKLQRGDEGEITLVQSHYVDKILSHFGYSGCKPASTPYDPSVLLRKNRRIARDQLRYSQIIGSLMYLASATRPDISFAVSKLSRFVLNPGDDHWQALERVMRYLKGIMSYGIHYTRYPKVLEGYSDSNWISDADKIKATSGYVFALGGGTVSWKPCKQTILTRSTMEVELTALDTATVEAEWLRELLMDLPVVGKPVPAILMNCDNQTMIIKVNSSKDNMKSSRHIKRRLKSVRKQKNSGVIALDYVQTARNLADQFTKGLPRNDGSNLNVIRVAFPSRDVDLQNISEGTHLYEFDC

SEQ ID NO: 20355 - protein, 1234 aa, Oryza sativa
  Clone ID: TF_OSC411338j.C1.p6.fg
MSNTGDKEKETPVNTNGGNTASNSSGGPFLGYNLITLFQLEVLLLMYIAMSTLCHYVIVDAYSTLSMLMLITFTTITGSNPIVNIMFIILLFWIKICRIMTKFPTIQKPDRSFSVVGFAAALKPHAFDGSNYKRWKARALLWLTAMQCFYVSRGKRSEPPLSPEEEAKFEASDCLFRGALISVLADNIVDVYMHMPSGKDMWDALEAKFGVSDAGSELYVMEQFYDYKMVDDRSVVEQAHEIQMLAKELENNNCELPDKFVAGGIIAKLPPSWSDFATSLKHKRQEFSVPDLIGSLGVEEKARAKDVRGKKVEGGSSANMVQKKNPHASHNNKKVKPDVKPKAATNFKKKSKGKAKGDCFVCGKSGHWAKDCPERKDRKSANMIISEDGGTSGYGKILPTVLSVFHSPDWWVDTGANIHVGRGSSLLMGNGSLAAVHGVGTVDLKFTSGKTVQLKNVQHVLSIKKNLVSGSLLCREDFRLVFESNKCVVSKYGTFVGKGYDSGGLFRFSLNDMSNNHNAVNHISENDESNENQTVGSDRGGEYFSNEFASFCEEFGIIHEMTPPYSPQSNGVAERKNRTLTEMVNAMLDTAGLSKEWWGEAVLTACHVLNKIPMKHKEVTPFEEWERKKLNLSYLRTWGCLAKVNVPIAKKRKLGPKTVDCVFLGYAIHSVGYRFLIVNSGVPDMHVGTILESRDATFFENEFPMKYTPSTSSKETVMPHEHFAPIEHNDQTPEENPEEGNIVDTRKSKRQRVAKSFGDDYIVYLVDDTPRTIEEAYSSPDADYWKEAVRSEMDSIMSNGTWEVVERPYGCKPVGCKWVFKKKLRPDGTIEKYKARLVAKGYTQKEGEDFFDTYSPVARLTTIRVLLALAASHGLLVHQMDVKTAFLNGELEEEIYMDQPDGYVLEGQEGMVCKLLKSLYGLKQAPKQWHEKFDTTLTSAGFVVNEADKCVYYRYGGGEGVILCLYVDDILIFGTSLNVIEEVKDYLSKSFEMKDLGEADVIINIKLQRGDEGGIHLCNPTMWTSATRPDISFAVSKLSRFVSNPGDDHWQALERVMRYLKGTMSYGIHYTGYPKVLEGYSDSNWISDADEIKATSGYVFTLGGGVVSWKSCKQTILTRSTMEAELTALDTATVEAEWLRELLIDLPVVEKPVPAILMNCDNQTVIIKVNSSKDNMKSSRHIKRRLKSVRKQKNSGVIALDYVQTARNLADQFTKGLPRNVIDSASREIGLIPT

SEQ ID NO: 20356 - protein, 1171 aa, Oryza sativa
  Clone ID: TF_OSC415168j.C1.p9.fg
MSGVATAAIGGGGAPPPTGAAPPPTPTGAGSGAGAPGGGAVNDYNNGGNSASPSSGGPFSGYNLLLLLLLALLLFPLLALYCVRYVLVPVLHDASSMLSHYWYVPVSDIHDVHSMLLVMLRSPYTAYAMIIVSISWIKICRIMTIFSTIQKPDRSFSVVGFAAALKPHAFDGSNYKKWKARALLWLTAMQCFYVSRGKRSEPPLSPEEEAKFEASDCLFRGALISVLADNIVDVYMHMPSGKDMWDALEAKFGVSDAGSELYVMEQFYDYKMVDDRSVVEQAHEIQMLAKELENNNCELPDKFVAGGIIAKLPPSWSDFATSLKHKRQEFSVPDLIGSLGVEEKARAKDVRGKKVEGGSSANMVQKKNPHASHNNKKVKPDVKPKAATNFKKKGKGKAKGDCFVCGKSGHWAKDCPERKDRKSANMIISEGGGTSGYGKILPTVLSVFHSPDWWVDTGANIHVGRGSSLLMGNGSLAAVHGVGTVDLKFTSGKTVQLKNVQHVPSIKKNLVSGSLLCREGFRLVFESNKCVISKYGTFVGKGYDSGGLFRFSLNDMCNNHNAVNHISENDESNVWHSRLCHVNFGCMMRLANMSLIPKFTLVKGSKCHTCVQSKQPRKPHKASEARNLAPLELVHSDLCEMNGVLTKGGKKYFMTLIDDCTRFCYVYLLKTKDEALHYFKIYKAEVENQLERKIKRLRSDRGGEYFSNEFASFCKEFGIIHEMTPPYSPQSNGVAERKNRTLTEMVNAMLDTARLSKEWWGEAVLTACHVLNKIPMKHKEVNVPIVKKRKLGPKTVDCVFLGYAIHSVGYRFLIVNSGVPDMHAGTIFESRDATFFENEFPMKYTSSTSSKETVMPHEHFAPIEHNDQTPEENPEEDNIVDTRKSKRQRVAKSFGDDYIVYLVDDTPRTIEEAYSSPDADYWKEAVRSEMDSIMSNGTWEVVERPYGCKPVGCKWVFKKKLRPDGTIEKYKARLVAKGYTQKEGEDFFDTYSPVARLTTIRVLLALAASHGLLVHQMDVKTAFLNGELEEEIYMDQPDGYVLEGQEGMVCKLLKSLYGLKQAPKQWHEKFDTTLTSAGFVVNEADKCVYYRYGGGEGVILCLYVDDILIFGTSLNVIEEVKDYLSKSFEMKDLGEADVILNIKLQRGDEGGITLVQSHYVDKVLSRFGYSD

SEQ ID NO: 20357 - protein, 807 aa, Oryza sativa
  Clone ID: TF_OSC417635j.C1.p8.gm
MQCFYVSRGKRSEPPLSPKEETKFEASDCLFRGALISVLADNIVDVYMHMPSGKDMWDALEAKFGVSDAGSELYVMEQFYDYKMHKRQEFSVPDLIGSLGVEEKARANDVRGKKVEGGSSANMVQKKNPHASHNNKKVKPDVKPKAATNFKKKGKGKAKGDCFVCGKSGHWAKDCPERKDRKSANMIISEGGGTSGDATFFENEFPMKYTPSTSSKETVMPHEHFAPIEHNDQTPEKNPEEDNIVDTRKSKRQRVAKSFGDDYIVYLVDDTPRTIEEAYSSPDADYWKEAVRSEMDSIMSNGTWEVVERPYGCKPVGCKWVFKKKLRPDGTIEKYKARLVAKGYTQKEGEDFFDTYSPVARLTTIRVLLALAASHGLLVHQMDVKTAFLNGELEEEIYMDQPDGYVLEGQEGMVCKLLKSLYGLKQAPKQWHEKFDTTLTSAGFVVNEADKCVYYRYGGGEGVILCLYVDDILIFGTSLNVIEEVKDYLSKSFEMKDLGEADVILNIKLQRGDEGFWGVPPARLLIAMSGVAAAAIGGGGASPPTGAAPLPTPTGAAPLPMPTGAGSGAGAPGGGAVNDYNNGGNSASPSSGGPFSGRIEEYELRREEADRRTRADIRSLIDVVEACTPEVGKKAKDLPASIKKEQSKVTPTTCSTKCSSPDIEPNLTVVAVDKCATTAMASMKLVADDGATSTTKIPTTDYSKETHAKCSMLGFDVKWDANKADITFLTKTVVLETVPASIASLSAFSPRMIADIKQYTLMPTRKDNCYLSWRHLLLARVMVVELSSTGQFGSENISIKGKHVDKL

SEQ ID NO: 20358 - protein, 1086 aa, Oryza sativa
  Clone ID: TF_OSC420545j.C1.p5.fg
MALFCYRRASDFLPDHAAHAYGIQTAPLLAFYALANSALVTLYAMCWKGRRRLLAGEEAGGAGERVRAAAGAAVPPRLRRPVRGRRVPRPPEGAGAQRAGREVVTTEAAGVPFNFLNGLDIDQRTSDIYFTDSSSTYWRRPLVNLFLSKSNYYPSPKFLFSWADSHEPTLLKPKSNIPTPQNTVSVLDLPMDPFQQNVSPALPPKPKRRAGKVILMDLERRRSASINKLSDGFMSPDPNLGVGKPRGKDRAKSTKKLKMLAQESGILLSLNPLPLELNDPNASDDEIDAPLADCSIRLLQQIGTERCNVSWGKRSEPPFSPEEEVKFEASDFLFRGALISVLADNIVDVYMHTPSGKDMWDALEAKFGVSDAGMEQAHEIQMLAKELENNNCELPDKFVAGGIIAKLPPSWSDFATSLKHKRQEFSVSDLIGSLGVEEKARAKDNGAKRSREKVKPDVKPKATTNFKKKGKGKAKGDCFVCGKSGHWAKDCPERKDRKSANMVICEAEEYWGTDLQLTPPYSPQSNGAAERKNCTLTEMVNAMLDTAGLSKERWGEAILTACHVLNKIPTKHKEVTPFEEWERKKLNLSYLRIRGCLAKVNVPIAKKRKLGPNTVDCVFLSYAIHSVGYRFLIVNSGVPDMRVGTIIESRDATFFDNEFPMKNIPSTSSQETVIPHEHFAPIQHNDQAPEGNPEEDNIADTRKSKRQRVAKSFGDDYIVYFVDDTPRTIEEAYSSPDADYWKEAVRSEMDSIMSNGTWEVVERPYGCKPVGCKWVFKKKLRPDGTIEKYKARLVAKGYTQKEGEDFFDTYSPVARLTTIRVLLALAASHGLLVHQMDVKTAFLNGELDEEIYMDQPDGYVLEGQEGMVCKLLKSLYGLKQAPKQWHKKFDTTLTSVGFVVNEADKCVYYRYGGGEGVILCLYVDDILIFGTSLNVNEEVKDFLSKSFEMKDLGKADVILNIKLLKGDEGGITLVQSHYVDKVLSGFGYSDCKPAPTPYDPNVLLRKNRRIARDQLRYSQIIGSLMYLASATRPDISFAVSKLSRFVSNPGDDHWQALERVMRYLKGTMSYGIHYTGYPKVLEGYSD

SEQ ID NO: 20359 - protein, 1456 aa, Oryza sativa
  Clone ID: TF_OSC420787j.C1.p19.gm
MQCFYVSRGKRSEPPLSPEEEAKFEASDCLFRGALISVLADNIVDVYMHMPSGKDMWDALEAKFGVSDAGSELYVMEQFYDYKMVDDRSVVEQAHEIQMLAKELENNNCELPDKFVAGGIIAKLPPSWSDFATSLKHKRQEFSVPDLIGSLGVEEKARAKDVRGKKVEGGSSANMVQKKNPHASHNNKKVKPDVKPKAATNFKKKSKGKAKGDCFVCGKSGHWAKDCPERKDRKSANMIISEGGGTSGDATFFENEFPMKYTPSTSSKETVMPHEHFAPIEHNDQTPEENPEEDNIVDTRKSKRQRVAKSFGDDYIVYLVDDTPRTIEEAYSSPDADYWKEAVRSEMDSIMSNGTWEVVERPYGCKPVGCKWVFKKKLRPDGTIEKYKARLVAKGYTQKEGEDFFDTYSPVARLTTIRVLLALAASHGLLIHQMDVKTAFLNGELEEEIYMDQPDGYVLEGQEGMVCKLLKSLYGLKQAPKQWHEKFDTTLTSAGFVVNEADKCVYYRYGGGEGVILCLYVDDILIFGTSLNVIEEVKDYLSKSFEMKDLGEADVILNIKLQRGDEDGRAIRFLGSARRDYSLFVNIYFIFTNMSNTGDKEKETPVNTNGGNTTSNSSGGPFLGTIHFHLFESGFMPSYNCWTSHGEQGVEMEEDEVEDDNIPDFAQYVGFEGNQTGEEEIAADGNDVADDLGQMLQDAREDSESEKEAHKLDKMLEDHRTSLYPGCEQGHKKLDTTLDLLQWKAKNGDGILRHPADGSQWRNIDRKFKEFGKDARNIRFGPKQPGNDIDVYLRPLVEDLKQLWKKEGVPVWDEDKQEEFNLRALLFVTINDWPALSNLSGQSNKGYKACTHCMDETESTYLKHCRKVVYMGHRRFLAANHPVRKKDKHFEHKADHRTKPKHRSGKTVFAMVKDLKVVFGKGPGSQHIESEDGHAAMWKKNSIFWELPYWEFLDVRHAIDVMHLTKNLCVNLLGFLGVYGKSKDTLEARNDLKHMEQRSDLHPEPKEKGSHYLSPASYTLSKAEKESMFECLESIKVPSGYSTNIKRIISTKEKKFTNLKSHDCHVLMTQLLPVVIRGILPDNVRATITKLCAFMNAISQKVIDPDRLEALQNEVVQCLVSFELIFPPSFFNIMTHLLCHLVKEIRILGPMYLHNMFPFERYMGVLKKYVRNRARPEASIAKGYGTEEVIEFCVEFIEDLRPIGVPKSRHEGRLQGKGTLGRKAITTVDNNLFRKAHFTVLQHSSLVAPYIEEHLALVRARNIGKSDAWITRHHIDTFPAWLRQHLMGNESINQQLAFLAWGPSGSIATFQGYEINGYTFYTRAQDMKSTNQNSAVRVDAMGHDGTTATYYGSIEDIWELDYGPLKVPLFRCQWVRLTGGGVMIDDSGMTTVDLNKVGYSDEPFVLANDVTQVFFVKDMSSKGKKGRGPDEPKRQVVLPGKRKIVGVEDKTDEDYD

SEQ ID NO: 20360 - protein, 358 aa, Oryza sativa
  Clone ID: TF_OSC423002j.C1.p1.fg
MAMIFLLAALSTTHLASSLRPGAVAGGACRPSGYLPGKSYGRAIMFLGSARRDYSLFVNIYFIFTNMSNTGDKEKETPVNTNGGNTASNSSGGPFLGVLADNIVKVYMHMPSGKDMRDALEAKFGVSDAGSELYVMEQFYDYKMVDDRSVVEQAHEIQMLAKELENNNCELPDKFVAGGIIAKLPPSWSDFATSLKHKRQEFSVPDLIGSLGVEEKARAKDVRGKKVEGGSSANMVQKKNPHASHNNKKVKPDVKPKAATNFKKKSKGKAKGDCFVCGKSGHWAKDCPERKDRKSANMIISEGGGTSGYGRERFLLVDGKRVACGCSWCWYGRSEVYFGKDRAAEECAACPFNKEESS

SEQ ID NO: 20361 - protein, 788 aa, Oryza sativa
  Clone ID: TF_OSC423019j.C1.p2.np
IMIIILLFWIKICRIMTKFPTFQKPDRSFSVVGFAAALKPHAFDGSNYKRWKARALLWLTAMQCFYVSRGKRSEPPLSPEEEAKFEASDCLFRGALISVLADNIVDVYMHMPSGKNMWDALEAKFGVSDAGSELYVMEQFYDYKMVDDRSVVEQAHEIQMLAKELENNNCELPDKFVAGGIIAKLPPSWSDFATSLKHKRQEFSVPDLIGSLGVEEKARAKDVRGKKVEGGSSANMVQKKNPHASHNNKKVKPDVKPKAATNFKKKSKGKAKGDCFVCGKSGHWAKDCPERKDRKSANMIISEGGGTSGYGKILPTVLSVFHSPDWWVDTGANIHVCADISLFSSYQVGRGSSLLMGNGSLAAVHGVGTVDLKFTSGKTVQLKNVQHVPSIKKNLVSGSLLCREGFRLVFESNKCVVSKYGTFVGKGYDSGGLFRFSLNDMCNNHNAVNHISENDESNVWHSRLCHVNFGCMTRLANMSLIPKFTLVKGSKCHTCVQSKQPRKPHKASEARNLAPLELVHSDLCEMNGVLTKGGKKYFMTLIDDCTRFCYVYLLKTKDEALHFFKIYKAEVENQLERKIKRLRSDRGGEYFSNEFASFCEEFGIIHEMTPPYSPQSNGVAERKNRTLTEMVNAMLDSAGLSKEWWGEAVLTACHVLNKIPMKHKEVTPFEEWERKKLNLSYLRTWGCLAKVNVPIAKKRKLGPKTVDCVFLGYAIHSVGYRFLIVNSRVPDMHVGTILESRDATFFENEFPMKYTPSTSSKETVMPHEHFAPIEHNDQTPEENSEKDN

SEQ ID NO: 20362 - protein, 693 aa, Oryza sativa
  Clone ID: TF_OSC7439j.C1.p3.fg
MSAPGAGAAAAAAAAGAGDGVPGAGAGAVANVNTNRGNSASQSSGGPFSGYILLLLLTHSFIALLVLLVASQLQLLGSASRTIARPPCMRLEPELPPVPLLLELEMARLELEPELLRTSTPTEAILPHNPTEGHSRVGFAAALKPHAFDGSNYKRWKARALLWLTAMQCFYVSRGKQSEPPLSPEEEAKFEASDCLFRGALISVLADNIVDVYMHMPSGKDMWDALEAKFGVSDAGSELYVMEQFYDYKIVDDRSVVEQAHEIQMLAKELENNNCELPDKFVAGGIIAKLPPSWSDLATSLKHKRQEFSVSDLIGSLGVEEKARTKDVRGKKVEGGSSANMVQKKNPHASHNNKKVKPDVKPKAATNFKNKGKGKAKGDCFVCGKSGHWAKDCPERKDRKSANMVISEGGGTSGYGRERFLLVDGKRVACGCSWCWFCYVYLLKTKDEALHFFKTYKAEVENQLERKIKRLRSDRGGEYFSNEFASFCEEFGIIHERTPPYSPQSNGVAERKNRTLTEMVNAMLDTAGLSKEWWGEAVLTACHVLNKIPMKHKEVTPFEEWERKKLNLSYLRTWGCLAKVNVPIAKKRKLGPNTVDCVFLGYAIHSVGYKFLIVNSRVPDMHVGTIIESRDATFFENEFPMKHTPSTSSQETIMPHEHFAPIEHNDQTPEENPEEDNIVDTRKSKRQRVAKWR

SEQ ID NO: 20363 - protein, 1126 aa, Oryza sativa
  Clone ID: TF_OSC900014j.C1.p10.fg
MQCFYVSRGKRSEPPLSPEEEAKFEASDCLFHGALISVLADNIVDVYMHMPSGKDMWDALEAKFGVSDAGSELYVMEQFYDYKMVDDRSVVEQAHEIQMLAKELENNNCELPDKFVAGGIIAKLPPSWSDFATSLKHKRQEFSVPDLIGSLGVEEKARAKDVRGKKVEGGSSANMVQKKNPHASHNNKKVKPDVKPKAATNFKKKGKGKTKGDCFVCGKSGHWAKDCPECKDRKSANMIISEGGGTSGYGKILPTVLSVFHSPDWWVDTGANIHVGRGSSLLMGNGSLAAVHGVGTVDLKFTSGKTVQLKNVQHVPSIKKNLVSGSLLCREGFRLVFESNKCVVSKYGTFVGKGYDSGGLFRFSLNDMCNNHNAVNHISENDESNVWHSRLCHVNFGCMTRLANMSLIPKFTLVKGSKCHTCVQSKQPRKPHKASEARNLAPLELVHSDLCEMNGVLTKGGKKYFMTLIDDCTRFCYVYLLKTKDEALHYFKIYKAEVENQLERKIKRLRSDRGGEYFSNEFASFCEEFGIIHEMTPPYSPQSNGVAERKNRTLTEMVNAMLDTAGLSKECTSSKETVMPHEHFAPIEHDDQTPEENPEEDNIVDTRKSKRQRVAKSFGDDYIVYLVDDTPRTIEETYSSPDADYWKEAVRSEMDSIMSNGTWEVVERPYGCKPVGCKWVFKKKLRPDGTIEKYKARLVAKGYTQKEGEDFFDTYSPVARLTTIRVLLALAASHGLLVHQMDVKTAFLNGELEEEIYMDQPDGYVLEGQKGMVCKLLKSLYGLKQAPKQWHEKFDTTLTFAGFVVNEADKCVYYRYGGGEGVILCLYVDDILIFGTSLNVIEEVKDYLSKSFEMKDLGEADVILNIKLQRGDEGGITLVQSHYVDKVLSRFGYSDCKPAPTPYDPSVLLRKNRRIARDQLRYSQIIGSLMYLASATRPDISFAALERVMRYLKGTMSYGIHYTGYPKVLEGYSDSNWISDADEIKATSGYAFTLGGGAVSWKSCKQTILTRSTMEAELTALDTATVEAEWLRELLMDLPVVEKPVPAILMNCDNQTVIIKVNSSKDNMKSSRHIKRRLKSFRKQKNSGVIALDYVQTARNLADQFTKGLPRNVIDSASREMGLIPT

SEQ ID NO: 20364 - protein, 1240 aa, Oryza sativa
  Clone ID: TF_OSC900017j.C1.p7.fg
MQCFYVSRGKRSEPPLSPEEEAKFDASDCVFRGALISVLADNIVDVYMHMPSGKDMWDALEAKFGVSDAGSELYVMEQFYDYKMVDDRSVVEQAYEIQMLAKELENNNCELPDKFVAGGIIAKLPPSWSDFATSLKHKRQEFSVPDLIGSLGVEEKARAKDVRGKKVEGGSSANMVQKKNPHASHNNKKVKPDVKPKAATNFKKKGKGKAKGDCFVCGKSGHWAKDCPERKDRKSANMIISEGGGTSGYGKILPTVLSVFHSPDWWVDTGANIHVCADISQFSSYQVGRGSSLLMGNGSLAAVHGVGTVDLKFTSGKTVQLKNVQHVPSIKKNLVSGSLLCREGFRLVFESNKCVVSKYGTFVGKGYDSGGLFRFSLNDMCNNHNAVNHISENDESNVWHSRLCHVNFGCMMRLANMSLIPKFTLVKGSKCHTCVQSKQPRKPHKASEARNLAPLELVHSDLCEMNGVLTKGGKKYFMTLIDDCTRFCYVYLLKTKDEALHYFKIYKAEVENQLERKIKRLRSDRGGEYFSNEFASFCEEFGIIHEMTPPYSPQSNGVAERKNRTLTEMVNAMLDTAGLSKEWWGEAVLTACHVLNKIPMKHKEVTPFEEWERKKLNLSYLRTWGCLAKVNVPIVKKRKLGPKTVDCVFLGYAIHSVVYRFLIVNSGVPDMHAGTIFESRDATFFENEFPMKYTSSTSSKETVMPHEHFAPIEHNDQTPEENPEEDNIVDTRKSKRQRVAKSFGDDYIVYLVDDTPRTIEEAYSSPDADYWKEAVRSEMDSIMSNGTWEVVERPYGCKPVGCKWVFKKKLRPDGTIEKYKARLVAKGYTQKEGEDFFDTYSPVARLTTIRVLLALAASHGLLVHQMDVKTAFLNGELEEEIYMDQPDGYVLEGQEGMVCKLLKSLYGLKQAPKQWHEKFDTTLTSAGFVVNEADKCVYYRYGGGKGVILCLYVDDILIFGTSLNVIEEVKDYLSKSFEMKDLGEADVILNIKLQRGDEGGITLVQSHYVDKVLSRFGYSDCKPAPTPYDPSVLLRKNRRIARDQLRYSQIIGSLMYLASATRPDISFAVSKLSRFVSNLGDDHWQALERVMRYLKGTMSYGIHYTGYPKVLEGYSDSNWISDADEIKATSGYAFTLGGGAVSWKSCKQTILTRSTMEAELTALDTATVEAEWLRELLMDLPVVEKPVPAILMNCDNQTVIIKVNSSKDNMKSSRHIKRRLKSVRKQKKLRSDSIGLCPNG

SEQ ID NO: 20365 - protein, 829 aa, Oryza sativa
  Clone ID: TF_OSC900088j.C1.p24.fg
MSAPGAGAAGVAVGGDGVPGAGAGGGALGARAGATNNNINGGNFASQSSGGPFSGYILLLFLLLALYRYVPVPDIHDAFSMLALYCYVPVPDIHDAFSVLLRYCYVIHDAFSMLLVMLSLDYPTLRWKAHALLWLTAMQCFFVSRGKRSEPPLSPEEEAKFEASDCLFRGALISVLADNIVDVYMHMPSGKDMWDALEAKFGVSDAGSELYVMEQFYDYKMVDDRSVVEQAHEIQMLAKELENNNCELPDKFVHKRQEFSVSDLIGSLGVEEKARAKDNRGKKKKNPHASHNNKKIKLDVKSKAATKFKKKCKGKAKGDCFVCGKSGHWAKDCPECKDRKSANMVISEGGGTSGYGKILPTVLSVFHSPDWWVDTGANIHACADISLFSSYQVGRGSSLLMGNRSLAAIHGVGTVDLKFTSGKTMQLKNVQHVPSIKKNLVSGSLLCREGFRLVFESNKCVISKYGTFVGKGYDSGGLFRFSLNDMCNNHNVVNHISENDESNVWHSRLCHVNFGCMTLLANMSLIPKFTLVKGSKCHTCVQSKQPCKPHKTSEARNLAPLELVHSDLCEMNGVLTKGGKKYFMTLIDDCTRFCYVYLLKTKDEALHFFKTYKAEVENQLERKIKLLRSDRGGEYFFNEFASFCEEFGIIHERTPPYSPQSNGVAERKNRTLTEMVNAMLDTAGLSKEWWGEAVLTACHVLNKILMKHKEVIPFEEWERKKLNLSYLRTWGCLAKVNVPIAKKRKLGPNTVDCMFLGYAIHSVGYRFLIVNSGVPDMYVGTIIESRDATFFENEFPMKHTPSTSSQETVMPHEHFAMFLFLIFIMPLAC

SEQ ID NO: 20366 - protein, 1310 aa, Oryza sativa
  Clone ID: TF_OSC900094j.C1.p6.fg
MSNTGDKEKETPVNTNGGNTASNSSGGPFLGYNLITLFQLEVLLLMFIAMSTLCHYVIVDAYSTLSMLMLITFTTITGSNPIVNIMFIILLFWIKICRIMTKFPTIQKPERSFSVVGFAATLKPHAFDGSNYKRWKARALLWLTAMQCFYVSRGKRSEPPLSPEEEAKFEASDCLFRGALISVLADNIVDVYMHMPSGKDMWDALEAKFGVSDAGSELYVMEQFYDYKMVDDRSVVEQAHEIQMLAKELENNNCELPDKFVASGIIAKLPPSWSDFATSLKHKRQEFSVPDLIGSLGVEEKARAKDVRGKKVEGGSSANMVQKKNPHASHNNKKVKPDVKPKAATNFKKKSKGKAKGDCFVCGKSGHWAKDCPERKDRKSANMIISEGGGTSGYGKILPTVLSVFHSPDWWVDTGANIHVGRGSSLLMGNGSLAAVHGVGTVDLKFTSGKTVQLKNVQHVPSIKKNLVSGSLLCREGFRLVFESNKCVVSKYGTFVGKGYDSGGLFRFSLNDMCNNHNAVNHISENDESNVWHSRLCHVNFGCMTRLANMSLIPKFTLVKGSKCHTCVQSKQPRKPHKASEARNLAPLELVHSDLCEMNGVLTKGGKKYFMTLIDDCTRFCYVYLLKTKDEALHFFKIYKAEVENQLERKIKRLRSDRGGEYFSNEFASFCEEFGIIHEMTPPYSPQSNGVAERKNRSLTEMVNAMLDTAGLSKEWWGEAVLTACHILNKIPMKHKEVTSFEEWERKKLNLSYLRTWGCLAKENPEEDNIVDTRKSKRQRVAKSFGDDYIVYLVDDTPRTIEEAYSSPDADYWKEAVRSEMDSIMSNGTWEVVERPYGCKPVGCKWVFKEKLRPDGTIEKYKARLVAKGYTQKEGEDFFDTYSPVARLTTIRVLLALAASHGLLVHQMDVKTAFLNGELEEEIYMDQPDGYVLEGQEGIVCKLLKSLYGLKQAPKQWHEKFDTTLTSAGFVVNEADKCVYYRYGGGEGVILCLYVDDILIFGTSLNVIEEVKDYLSKSFEMKDLGEADVILNIKLQRGDEGGITLVQSHYVDKVLSRFGYSDCKPAPTPYDPSVLLRKNRRIARDQLRYSQIIGSLMYLASATRPDISFAVSKLSRFVSNPGDDHWQALERVMRYLKGTMSYGIHYTGYPKVLEGYSDSNWISDADEIKATSGYVFTLGGGAVSWKSCKQTILTRSTMEAELTALDTATVEAEWLRELLMDLPVVEKPVPAILMNCDNQTVIIKVNSSKDNMKSSRHIKRRLKSVRKQKNSGVIALDYVQTARNLADQFTKGLPRNVIDSASREMGLIPT

SEQ ID NO: 20367 - protein, 1504 aa, Oryza sativa
  Clone ID: TF_OSC900136j.C1.p6.fg
MARREPEPLRTSTPTEAILPHNPAEGHSRVVLVASQLRPWYVHDAYDTLSILLVMLHVITRSPHIVHAMVIVLIFWIKICRYMTIFPTIQKPDRSFSVVGFAAALKPHAFDGSNYKRWKARALLWLTAMQCFCVSQGKRSEPSLSHEEEAKFEASDCLFHGALISVLAHNIVDVYMHMPSGKDMWDALEATFGVSDAGSELYVMEQFYDYKMVDDRSVVEQAHEIQMLAKELEDNNCELPDKFVAGGIIAKLPPSWSDFATSLKHKRQEFSVSDLIGSLGVEEKARAKDNRGKKVEGGSSANMNNKKVKPDVKPKAATNFKKKGKGKAKGDCFVCGKSGHWAKDCPERKDRKSANMVISEGGGKSGYGKILPTVLSVFHSPDWWVDTGANIHVGRGSSLLMGNGSLAAVHGVGTVDLKFTSGKTVQLKNVQHVPSIKKNLVSGSLLCREGFRLVFESNKCVVSKYGTFVGKGYDSGGLFRFSLNDMCNNHNVVNHISENDESNDEALHFFKTYKAEVENQLERKIKRLRSDRGGEYFSNEFASFCEEFGIIHERTPPYSPQSNGVAERKNRTLTEMVNAMLDTMGLSMEWWGEAVLTACHVLNKIPMKHKEVTPFEEWERKKLNLSYLRTWGCLAKVNVPIAKKRKLGPNTVDCVFLGYAIHSVGYRFLIVNSGVPDMHVGTIIESRDATFFENEFPMKHTPSTSSQETVMPHKHFAPIEHNDQTPEENPEEDNVVDTRKSKRQRVAKSFGDDYIVYLVDDTPRTIEEAYSSPDANYWKEAEVVERPYGCKPVGCKWVFKKKLRPDGTIEKFKARLVAKGYTQKEGEDFFDTYSPVARLTTIRQAPKQWHEKFDTTLTSVGFVVNEADKCVYYRYGGGEGVILCLYVDDILIFGTSFNVIEEVKDYLSKSFEMKDLGEADVILNIKLQRGDEGGITLVQSHYVDKVLSHFGYSDCKPAPTPYDPSVLLRKNRRIARDQLRYSQIIGSLMYLVSATRPDISFAISKLSRFVSNPGDDHWQALERVMRYLKGTMSYGIHYTGYPKLLEGCSDSNWISDADEIKATSGYVFTLGGGTVSWKSFKQTILTRSTMEAELTTLYTATVEAKWLRELLMDLSVVEKPVPAILMNCDNQIVIIKVNSSKDNMKSSRHIKRRLKSVRKQKNSGVIALDYVQTARNLDGSYLNVIRVAFSSRDVDLQNISEGTHLYEFDCYSYPRWKFNLTVSTKTQKEQGLRNYTFARDLHQKCTSYYCCFHVFFTSILAQQQSSVVEIVAAVMHGEEVTRQRCRRPAVLRGERITRRQRSRLARRCKPPVGNAVAILRGERITQRRRMRSARRCKAPVGNAVAVLRGERITRWWRMRSARRCKPSVGNAVAILRGERITRRRCMRSARCKRSVGDEVAILRGERITWWWRVVPRQRGVSSPRARGKVGEEHPDDAGGEAPESVARSTNNAQATREVKPPSPWRVGVEHPDDAGGEAPESMVRSAKNAQTTRKRSPRVRGKSV

SEQ ID NO: 20368 - protein, 997 aa, Oryza sativa
  Clone ID: TF_OSC900169j.C1.p29.gm
MARREPEPFEPELPLAPLLPLEMARREPEALRTSTPTEAILPHNPAEGHSRAMQCFYVSRGKRSEPPLSPEEEAKFKASDCLFRGALISVLADNIVDVYMHMPFGKDMWDALEAKFGVSDAGSELYVMEQFYDYKMVDDRSVVEQAHEIQMLTKELENNNCELPDKFVAGGIIAKLPPSWSDFATSLKHKRQEFSVSDLIGSLGVEEKARAKDNWGKKVEGGSSANMVQKKNRHASHNNNKKVKPDVKPKVATNFKKKGKGKAKGDCFVCGKSGHWAKDCPERKDRKCANMVISEGGGTSGDATFFENEFSMKHTPSTSSQETVMPHKHFAPIEHNDQTPEENPEEDNIVDTRKSKRQRVAKSFGDDYIVYLVDDTPRTIEEAYSSPDADYWKEAVRSEMDSIMSNDTWEVVERPYGCKPIGCKWVFKKKLSPDGTIEKYKARLVAKGYTQKEGKDFFDTYSPVAHLTMIRVLLALAASHGVLVHQMNVKTAFLNGELEEEIYMDQPDGYVLEGFVVNGADKCVYYRYGGGEGVILCLYVDDILIFGTNLNVIEGVKDYLSKSFEMKDLGEADVILNIKLQRGDEGEITLVQSHYVDKILSHFGYSGCKPASTPYDPSVLLRKNRRIARDQLRYSQIIGSLMYLASATRPDISFAVSKLSRFVLNPGDDHWQALERVMRYLKGIMSYGIHYTRYPKVLEGYSDSNWISDADKIKATSGYVFALGGGTVSWKPCKQTILTRSTMEVELTALDTATVEAEWLRELLMDLPAGDQVFGECFPHDCSVHPPCLRLEPELPPAPLLPLEMTRQEPEPLRTSTPTEAILPHNSAEGHSRGSVRSLRYLNLSGIPFSDKVPPQLGSITGLRDLRHLNLAENRLSGGQLETLYTYNPLMYSGNNGLCGFPLQRSCPGNSTSKDGDLSNEKHGDQQIPELHSDDQMFFLFGCGVGFVVGSWVVFFSLLFVKTWRIAYFRLFDSVYDKVYVFVVVNWGSLTGMKVAS

SEQ ID NO: 20369 - protein, 1314 aa, Oryza sativa
  Clone ID: TF_OSC900172j.C1.p12.fg
MSGVAAATAGGGGTPPTGAGSGAGAPGGAVNDNNNGGNSASPSSGGPFSGYNLLLLLLLLALSLYYVRYVLVPVLHGASSMLSRYCYVPVPDIQDAHSMLLVMLRSPYTAYAMIIALTFWIKICRLMTIFPTIQKPDRSFSVVGFAAALKPHAFDGSNYKRWKARALLWLTAMQCFYVSRGKRSEPPLSPEEEAKFEASDCLFRGALISVLADNIVDVYMHMPSGKDMWDALEAKFGVSDAGSELYVMEQFYDYKMVDDRSVVEQAHEIQMLAKELENNNCELPDKFVAGGIIAKLPPSWSDFATSLKHKRQEFSVPDLIGSLGVEKKARAKDVQGKKVEGGSSANMVQKKNPHASHNNKKVKPDVKPKTATNFKKKGKGKAKGDCFVCGKSGHWAKDCPERKDRKSANMIISEGGGTSGYGKILPTVLSVFHSPDWWVDTGANIHVCADISLFSSYQVGRGSSLLIGNGSLAAVHGVGTVDLKFTSGKTVQLKNVQHVPSIKKNLVSGSLLCREGFRLVFESNKCVVSKYGTFVGKGYDSGGLFRFSLNDMCNNHNAVNHISENDESNVWHSRLCHVNFGCMTRLANMSLISKFTLVKGSKYHTCVQSKQPRKPHKASEARNLAPLEHVHSDLCEMNGVLTKGGKKYFMTLIDDCTRFCYVYLLKTKDETLHYFKIYKAEVENQLERKIKRLRSDRGGEYFSNEFASFCEEFGIIHEMTPPYSPQSNGVAERKNRTLTEMVNTMLDTAGLSKEWWGEAVLTACHVLNKIPMKHKEVTPFEEWERKKLNLSYLRTWGCLAKVNVPIAKKRKLGPKTVDCVFLGYAIHSVDYRFLIVNSGVPDMHVGTILESRDATFFENEFPMKYTPSTSSKETVMPHEHFAPIEHNDQTPKENPEEDNIVDTRKSKRQRVAKSFGDDYIVYLVDDTPRTIEEAYSSPDADYWKEAVRSEMDSIMSNGTWEVVERPYGCKPVGCKWVFKKKLRPDGTIEKYKARLVAKGYTQKEGEDFFDTYSPVARLTTIRVLLALAASHGLLVHQMDVKTAFLNGELEEEIYMDQPDGYVLEGQEGMVCKLLKSLYGLKQAPKQWHEKFDTTLTSAGFVVNEADKCVYYRYGGGEGVILCLYVDDILIFGTSLNVIEEVKDYLSKSFEMKDLGEADVILNIKLQRGDEGGITLMQSHYVDKVLNHFGYSDCKPAPTPYDPSVLLRKNQRIVRDQLRYSQIIGSLMYLASATRPDISFAVSKLSRFVSNPGDDHWQALERVMRYLKGTMSYGIHYTGYPKVLEGYSDSNWISDADEIKATSRYVVILGGGAVS

SEQ ID NO: 20370 - protein, 1301 aa, Oryza sativa
  Clone ID: TF_OSC900209j.C1.p26.gm
MQCFYVSRGKRSEPPLSPEEEAKFEASDCLFRGALISVLADNIVDVYMHMPSGKDMWDALEAKFGVSDAGSELYVMEQFYDYKMVDDRSVVEQAHEIQMLAKELENNNCELPDKFVAGGIIAKLPPSWSDFATSLKHKRQEFSVPDLIGSLGVEEKARAKDVRGKRVEGGSSANMVQKKNPHASHNNKKVKPDVKPKAATNFKKKGKGKAKGDCFVCGKSGHWAKDCPERKDRKSANMIISEGGGTSGTVGRGSFLLMGNGSLAAVHGIAKKRKLGPKTVDCVFLGYAIHSVGYRFLIVNSGVPDMHAGTILESRDATFFENEFPMKYTPSTSSKETVMPHEHFAPIEHDDQTPEENPEEDNIVDTRKSKRQRVAKSFGDDYIVYLVDDTPRTIEEAYSSPDADYWKEAVRSEMDSIMSNGTWEVVERPYGCKPVGCKWVFKKKLRPDGTIEKYKARLVAKGYTQKEGEDFFNTYSPVARLTTIRVLLALAASHGLLVHQMDVKTAFLNGELEEEIYMDQPDGYVLEGQEGMVCKLLKSLYGLKQAPKQWHEKFDTTLTSAGFVVNEADKCVYYRYGGGEGVILCLYVDDILIFGTSLNVIEEVKDYLSKSFEMKDLGEADVILNIKLQRGDEGGITLVQSHYVDKVLSRFGYSDCKPAPTPYDPSVLLRKNRRIARDQLRYSQIIGSLMYLASATRPDISFAVSKLSRFVSNPGDDHWQALERVMRYLKGTMSYGIHYTGYPKVLEGYGDSNWISDADEIKATSGYVFTLGGGAVSWKSCKQTILTRSTMEAELTALDTATVEAEWLRELLMDLPVVEKPVPAILMNCDNQTVIIKVNSSKDNMKSSRHIKRRLKSVRKQKNSGVIALDYVQTARNLADQFTKGLPRFWGVPPARLLIAMSGVAAAATGPPTGAGGTPPPTGAGSGAGAPGGGAVNDYNNGGNSASPSSGGPFSGDGYAFASTENSMVIYNINVAPLIKSNKYTLLAERTRKWEEEKRQERREGKAPAAPAGNRRGEAKQKATAEDIDDGDEDLGFQEPEATVATVDGGACAHASRWSLKAMKRELLAAAPTHEATRRARWSEVALTFDQTDHPPCVARGGQIAMVVSPTVCNVKLGRVLIDGGAALNILSPVAFDAIKALGMVLRPSQPIIGVTLGHTWPLGHIDLPVTFGGSANFRTERVDFDVADLSLPYNAVLGRPALVKFMAAVHYAYLQMKMPGPGGPITVHGDLKVALACMEQHADHLAAASKPAGGDERLSASVPAAPRQRMVTCDEVPVKEVALGDGPSKTTRIGGLLDDK

SEQ ID NO: 20371 - protein, 1504 aa, Oryza sativa
  Clone ID: TF_OSC900299j.C1.p21.fg
MARREPEPLRTSTPTEAILPHNPAEGHSRVVLVASQLRPWYVHDAYDTLSILLVMLHVITRSPHIVHAMVIVLIFWIKICRYMTIFPTIQKPDRSFSVVGFAAALKPHAFDGSNYKRWKARALLWLTAMQCFCVSQGKRSEPSLSHEEEAKFEASDCLFHGALISVLAHNIVDVYMHMPSGKDMWDALEATFGVSDAGSELYVMEQFYDYKMVDDRSVVEQAHEIQMLAKELEDNNCELPDKFVAGGIIAKLPPSWSDFATSLKHKRQEFSVSDLIGSLGVEEKARAKDNRGKKVEGGSSANMNNKKVKPDVKPKAATNFKKKGKGKAKGDCFVCGKSGHWAKDCPERKDRKSANMVISEGGGKSGYGKILPTVLSVFHSPDWWVDTGANIHVGRGSSLLMGNGSLAAVHGVGTVDLKFTSGKTVQLKNVQHVPSIKKNLVSGSLLCREGFRLVFESNKCVVSKYGTFVGKGYDSGGLFRFSLNDMCNNHNVVNHISENDESNDEALHFFKTYKAEVENQLERKIKRLRSDRGGEYFSNEFASFCEEFGIIHERTPPYSPQSNGVAERKNRTLTEMVNAMLDTMGLSMEWWGEAVLTACHVLNKIPMKHKEVTPFEEWERKKLNLSYLRTWGCLAKVNVPIAKKRKLGPNTVDCVFLGYAIHSVGYRFLIVNSGVPDMHVGTIIESRDATFFENEFPMKHTPSTSSQETVMPHKHFAPIEHNDQTPEENPEEDNVVDTRKSKRQRVAKSFGDDYIVYLVDDTPRTIEEAYSSPDANYWKEAEVVERPYGCKPVGCKWVFKKKLRPDGTIEKFKARLVAKGYTQKEGEDFFDTYSPVARLTTIRQAPKQWHEKFDTTLTSVGFVVNEADKCVYYRYGGGEGVILCLYVDDILIFGTSFNVIEEVKDYLSKSFEMKDLGEADVILNIKLQRGDEGGITLVQSHYVDKVLSHFGYSDCKPAPTPYDPSVLLRKNRRIARDQLRYSQIIGSLMYLVSATRPDISFAISKLSRFVSNPGDDHWQALERVMRYLKGTMSYGIHYTGYPKLLEGCSDSNWISDADEIKATSGYVFTLGGGTVSWKSFKQTILTRSTMEAELTTLYTATVEAKWLRELLMDLSVVEKPVPAILMNCDNQIVIIKVNSSKDNMKSSRHIKRRLKSVRKQKNSGVIALDYVQTARNLDGSYLNVIRVAFSSRDVDLQNISEGTHLYEFDCYSYPRWKFNLTVSTKTQKEQGLRNYTFARDLHQKCTSYYCCFHVFFTSILAQQQSSVVEIVAAVMHGEEVTRQRCRRPAVLRGERITRRQRSRLARRCKPPVGNAVAILRGERITQRRRMRSARRCKAPVGNAVAVLRGERITRWWRMRSARRCKPSVGNAVAILRGERITRRRCMRSARCKRSVGDEVAILRGERITWWWRVVPRQRGVSSPRARGKVGEEHPDDAGGEAPESVARSTKNAQATREVKPPSPWRVGVEHPDDAGGEAPESMVRSAKNAQTTRKRSPRVRGKSV

SEQ ID NO: 20372 - protein, 793 aa, Oryza sativa
  Clone ID: TF_OSC900307j.C1.p13.gm
MQCFYVSRGKRSEPPLSPEEEAKFEASDCLFRGALISVLADNIVDVYMHMPSGKDMWDALEAKFGVSDAGSELYVMEQFYDYKMVDDRSVVEQAHEIQMLAKELENNNCELPDKFVAGGIIAKLPPSWSDFATSLKHKRQEFSVPDLIGSLGVEEKARAKDVRGKKVEGGSSANMVQKKNPHASHNNKKVKPDVKPKAATNFKKKSKGKAKGDCFVCGKSGHWAKDCPERKDRKSANMIISEGGGTSRYGRERFLLVDGKRVACGCSCVGYRFLIVNSGVPDMHVGTILESRDATFFENEFPMKYTPSTSSKETVMPHEHFAPIEHNDQTPEENPEEDNIVDTRKSKRQRVAKSFGDDYIVYLVDDTPRTIEEAYSSPDADYWKEAVRSEMDSIMSNGTWEVVERPYGCKPVGCKWVFKKKLRPDGTIEKYKARLVAKGYTQKEGEDFFDTYSPVARLTTIRVLLALAASHSLLVHQMDVKTAFLNGELEEEIYMDQPDGYVLEGQEGMVCKLLKSLYGLKQAPKQWHEKFDTTLTSVGFVVNEADKCVYYRYGGGEGVILCLYVDDILIFGTSLNMIEEVKDYLSKSFEMKDLGEADVILNIKLQRGDEGGITLVQSHYVDKVLSRFGYSDCKPAPTPYDPSVLLRKNRRIARDQLRYSQIIGSLMYLASATRPDISFAVSKLSRFVSNPGDDHWQALERVMRYLKDGRAIRFLGSARRDYSLFVNIYFIFTNMSNTGDKEKETPVNTNGGNTASNSSGGPFLGPDAAIVFLADLGLSAADIATTVAYDHCY

SEQ ID NO: 20373 - protein, 1084 aa, Oryza sativa
  Clone ID: TF_OSC900361j.C1.p9.fg
MMYRETFADEVGHIRKSFEMLEGANVQQVIPEAAGGYAQDREQDERWDLLRRRHGVQARSAAQIHLCRGHRREATLLHFVVQEMTLSSAAEAADIAAGLAAELTNVRKTATVDLDVLTTSVSGPSHGLSQIKELIGSDLSGYERNQCFARGLHVTTLFTLFAFPLLKLDFGSESIRKSGRSSEPPLSPEEEAKFEASDCLFRGALISVLADNIVDVYMHMPSGKDMWDALEAKFGVSNAGSELYVMEQFYDYKMLPDKFVAGGIIAKLPPSWSDFATSLKHKRQEFSVSDLIGSLGVEEKARATDIREKKVEGGSSANMVQKKNPHASYNNKKVKPDVKPKAATNFKKKGKGKAKGDCFVCGKSGHWAKDCPERKDRKSANMVIGEGGGTSGYGKILPTVLSVFHSPDWWVDTGANIHVGRGSSMLMGNGSLAAVHGIGTVDQKFTSGKTVQLKNVQHVPSIKKNLVSGSLLCREGFRLVFESNKCVVSKYGTFVRKGYDSGGLFRFSLNDMCNNHNVVNHISENDESNVWHSRLCHVNFSCMTRLANMSLIPKFTLIKGSKCHTCVQSKQPRKPHKASEARNLAPLELVHSDLCEMNGVLTKGGKKYFMTLIDDYTRFCYVYILKRKDEALHYFKIYKAEVENQLERKIKRLRSDRGEEYFSNEFASFCEEFGIIYERMPPYSPQSNGVAERKNRTLTEMVNAMLETAGLSKEWWGEAVLTACHVLNKISMKHKEVTPFEEWERKKLNLSYLRTWGCLAKHFAPIEHNDQTPEKNPEEDNIVDTHKSKRQRVAKSFGDDYIVYLVDDTPRTIEETYSSPDADYWKEIMDVKTAFLNGELEEEIYMDQPDGLNVIEEVKDYLYKSFEMKDLGEANVILNIKLQRGDEGGITLVQSHYVDKVLSRFGYSDCKPAPTPCDPSVLLRKNRRIVRDQLRYSQIIGSLMYLASATRPDISFAVSKLSRFVSNPGDDHWQALERVMRYLKGTMSYGIHYTGYSKVLEGYIDSNWISDADEIKVTSGYVFTLGGGVVSWKSCKQTILTRSTMEAELTALDTATVEAEWLRELLMDLPVVEKPVRASYPNEL

SEQ ID NO: 20374 - protein, 1419 aa, Oryza sativa
  Clone ID: TF_OSC900380j.C1.p15.fg
MSGVATAAIGGGGAPPPTGAAPPPTPTGAGSGAGAPGGGAVNDYNNGGNSASPSSGGPFSGYNLLLLLLLALLLFPLLALYCVRYVLVPVLHDASSMLSHYWYVPVSDIHDVHSMLLVMLRSPYTAYAMIIVSISWIKICRIMTIFSTIQKPDRSFSVVGFAAALKPHAFDGSNYKKWKARALLWLTAMQCFYVSRGKRSEPPLSPEEEAKFEASDCLFRGALISVLADNIVDVYMHMPSGKDMWDALEAKFGVSDAGSELYVMEQFYDYKMVDDRSVVEQAHEIQMLAKELENNNCELPDKFVAGGIIAKLPPSWSDFATSLKHKRQEFSVPDLIGSLGVEEKARAKDVRGKKVEGGSSANMVQKKNPHASHNNKKVKPDVKPKAATNFKKKGKGKAKGDCFVCGKSGHWAKDCPERKDRKSANMIISEGGGTSGYGKILPTVLSVFHSPDWWVDTGANIHVGRGSSLLMGNGSLAAVHGVGTVDLKFTSGKTVQLKNVQHVPSIKKNLVSGSLLCREGFRLVFESNKCVISKYGTFVGKGYDSGGLFRFSLNDMCNNHNAVNHISENDESNVWHSRLCHVNFGCMMRLANMSLIPKFTLVKGSKCHTCVQSKQPRKPHKASEARNLAPLELVHSDLCEMNGVLTKGGKKYFMTLIDDCTRFCYVYLLKTKDEALHYFKIYKAEVENQLERKIKRLRSDRGGEYFSNEFASFCKEFGIIHEMTPPYSPQSNGVAERKNRTLTEMVNAMLDTARLSKEWWGEAVLTACHVLNKIPMKHKEVNVPIVKKRKLGPKTVDCVFLGYAIHSVGYRFLIVNSGVPDMHAGTIFESRDATFFENEFPMKYTSSTSSKETVMPHEHFAPIEHNDQTPEENPEEDNIVDTRKSKRQRVAKSFGDDYIVYLVDDTPRTIEEAYSSPDADYWKEAVRSEMDSIMSNGTWEVVERPYGCKPVGCKWVFKKKLRPDGTIEKYKARLVAKGYTQKEGEDFFDTYSPVARLTTIRVLLALAASHGLLVHQMDVKTAFLNGELEEEIYMDQPDGYVLEGQEGMVCKLLKSLYGLKQAPKQWHEKFDTTLTSAGFVVNEADKCVYYRYGGGEGVILCLYVDDILIFGTSLNVIEEVKDYLSKSFEMKDLGEADVILNIKLQRGDEGGITLVQSHYVDKVLSRFGYSDCKPAPTPYDPSVLLRKNRRIARDQLRYSQIIGSLMYLASATRPDISFAVSKLSRFVSNPGDDHWQALERVMRYLKGTMSYGIHYTGYPKVLEGYSDSNWISDADEIKATSGYAFTLGGGAVSWKSCKQTILTRSTMEAELTALDTATVEAEWLRELLMDLPVVEKPVPAILMNCDNQTVIIKVNSSKDNMKSSRHIKRRLKSVRKQKNSGVIALYYVQTARNLADQFTKGLPRNVIDSASREMGLIPT

SEQ ID NO: 20375 - protein, 1268 aa, Oryza sativa
  Clone ID: TF_OSC900383j.C1.p22.fg
MQCFYVSRGKRSEPPLSPEEEAKFEASDCLFRGALISVLADNIVDVYMHMPSGKDMWDALEAKFGVSDAGSELYVMEQFYDYKMVDNRSVVEQAHEIQMLAKELENNNCELPDKFVAGGIIAKLPPSWSDFATSLKHKRQEFSVSDLIGSLGVEEKARAKDVRGKKVEGCSSANMVQKKNPHASHNNKKVKPDVKPKAATNFKKKGKGKAKGDCFVCGKSGHWAKDCPERKDRKSANMVISEGGGTSGYGKILPTVLSVFHSPDWWVDTGANIHVCADISLFSSYQVGRGSSLLMGNGSLAAVHGVGTVDLKFTSGKTVQLKNVQHVPSIKKNLVSGSLLCREGFRLVFESNKCVVSKYGTFVGKGYDSGGLFRFSLNDMCNNHNAVNHISENDESNVWHSRLCHVNFGCMTRLANMSLIPKFTLVKGSKCHTCVQSKQPRKPHKASEARNLAPLELVHSDLCEMNGVLTKGGKKYFMTLIDDCTRFCYVYLLKTKDEALHYFKIYKAEVENQLERKIKRLRSDRGGEYFSNEFASFCEEFGIIHEMTPPYSPQSNGVAERKNRTLTEMVNAMLDTAGLSKEWWGEAVLTACHVLNKIPMKHKEVTPFEEWERKKLNLSYLRTWGCLAKVNVPIAKKWKLGPKTVDCVFLGYAIHSVGYRFLIVNSGVPDMHAGTILESRDATFFENEFPMKYTPSTSSKETVMPHEHFAPIEHNDQTPEENPEEDNIVDTRKSKRQRVAKSFGDDYIVYLVDDTPRTIEEAYSSLDADYWKEAVRSEMDSIMSNGTWEVVERPYGCKPVGCKWVFKKKLRPDGTIEKYKARLVAKGYTQKEGEDFFDTYSPVARLTTIRVLLALAASHGLLVHQMDVKTAFLNGELEEEIYMDQPDGYVLEGQEGMVCKLLKSLYGLKQAPKQWHEKFDTTLTSAGFVVNEADKCVYYRYGGGEGVILCLYVNDILIFGTSLNVIEEVKDYLSKSFEMKDLGEADVILNIKLQREDEDGITLVQSHYVDKVLSRFGYSDCKPAPTPYDPSVLLRKNQRIARDQLRYSQIIGSLMYLASATRPDISFAVSKLSRFVSNPGDDHWQALERVMRYLKGTMSYGIHYTGYPKVLEGYSDSNWISDADEIKATSGYVFTLGGGAVSWKSCKQTILTRSTMEAELTALDTATVEAEWLRELLMDLPVVEKPVPAILMNCDNQTMIIKVNSSKDNMKSSRQIKRRLKSVRKQKNSGVIALDYVQKARNLADQFTKGLPRNVIDSASREMGLIPT

SEQ ID NO: 20376 - protein, 314 aa, Oryza sativa
  Clone ID: TF_OSC9356j.C1.p1.fg
MSNTGDKEKETPVNTNGGNTASNSSGGPFLGSFSVVGFAATLKPHAFDGSNYKRWKARALLWLTAMQCFYVSRGKRSEPPLSPEEEAKFEASDCLFRGALISVLADNIVDVYMYMPSGKEMWDALEAKFGVSDAGSELYVMEQFYDYKMVDDRSIVEQAHEIQMLAKELENNNCELPDKFVAGGIIAKLPPSWSDFATSLKHKRQEFSVPDLIGSLGVEEKARAKDVRGKKVEGGSSANMVQKKNPHASHNNKKVKPDVKPKAATNFKKKSKGKAKGDCFVCGKSGHWAKDCPERKDRKSANMIISEGGGTSGY

SEQ ID NO: 20377 - protein, 804 aa, Oryza sativa
  Clone ID: TF_OSC400690j.C1.p14.fg
MADNEKGNKVRSQDIGTSSSRVNEAPDTSCVTLVQHLINQNRLLIEILQQHQTPILNLSQIQPQVQLEAVQALTPRVSMPPASRRTHGDVPHVDSKEASIICFMCDEQGHYARECPQQKKKTPMRTEDEVRKMSITSTEWPPPGMTKRQRRNTFRGAPQLTEHLLANGGRVSDNEDSDQVSSDDEDEKSPQGFNQNKMERKACSRCGEIGHVASSCATTCVHCEEDHPPDRCPTSRITCFFCEGTDHVPKDCQFSFLLTKKMANQPASSNGEKHQGNTNPRQDYSFSLTPVPGQRNQNEKRKCRVREDICCFNCQGMGHFADKCPKPRNIAASTSVHATPCNQKLAPQRTVIHASRSSPIARVATAPTPASALPQGVNAQFQPQPSVDKTEASIGIVPLDVRAQQPRNQNWNNPAGTTNVQVPTVQQQCKLSEFLKTEPPTFAIAVDPMEASDWLRTIEKKLGLIQCTDQERVGFATPQLVGPASEWWDSYEASQPEGHTITWNEFSSVFRRSHVPAGMITLRKREFRYLKQADLTVTKYLHEFYRLAHYAPEDVETDEDKQEKFLQGLKDELAVQLLLEDYEDFEKLVDKAMQLESEHNRMTNCKRRIVNIPVFPCGNQRQRTEPLQITGSSVVHQEFLPQEDGRNADNNTSNTNDDDTTNNHGSCLISDHSNKACNVSSIHQDVNDSINVGIQNDNLSNFDTEKDSNGDSNYGTTDANVSKDFQPPIPTPSQNDRPQMDSSTKKTLICYNCKEPGHFSRDCPQPKRNLRHHSGHYARRRQVTRLVVTGANAIPVRPHVNPNL

SEQ ID NO: 20378 - protein, 662 aa, Oryza sativa
  unsure (1)..(662): unsure at all Xaa locations
  Clone ID: TF_OSC900144j.C1.p22.np
MDEVGSMDISRTNEGYTSCGPVVEMSWHRAGVAARGSILPTCPGVPAVGGVGSVLLSMARMGWKLCHVFRPYTVVVFCSITKMSNGXPGLAWDELGPRSGCQFGLDHRRPWVKAVLDGQVSEEEDIVSCLPKLRKTAGSASEVEEAVKPAVKQDKRLRSVKVLSLVSNLSLPFVFPLFLSKPLQQMADNEKGNKVRSQDIGTSSSRVNEAPDTSCVTLVQHLINQNRLLIEILQQHQTPILNLSQIQPQVQLEAVQALTPQVSMPPASRRTHGDVPHVDSKEASIICFMCDEQGHYARECPQQKRKTPMRTEDEVRKMIITSTEWPLPGMTKRXRRNTFRGAPQLTEHLLANGGRVSDSEDSDQVSSDDEDEKSPQGFNQNKMERKACSRCGEIGHVASSCATTCVHCEEDHPPDRCPTSRITCFFCEGTDHVPKDCQFSFLLTKKMANQPASSNGEKHQGNTNPRQDYSFSLTPVPGQRNQNEKRKCRVREDICCFNCQGMGHFADKCPKPRNIAASTSVHATPCNQKLAPQRTVIHASRSSPIARVATAPTPASALPQGVNAQFQPQPSVDKTEASIGIVPLDVPAQQPRNQVQDKEPSTKKTLICYNCKEPGHFSRDCPQPKRNLRHHSGHYARRRQVTRLVVTGANAIPVRPHVNPNL

SEQ ID NO: 20379 - protein, 1571 aa, Oryza sativa
  unsure (1)..(1571): unsure at all Xaa locations
  Clone ID: TF_OSC900371j.C1.p5.np
MASRPRRAARAPARFGFEDGRVEAEANHEPANEHSHHSNRSHRTVSRNAEVEQPRRSSRSHRTVSREAELEQSHRPHRTASHNSREERLPSPPHVENNMQHIMAVQTQILQGLTTAIANFQHNAHGNGHPHVGNNRSKLTDFLRSRPPEFSQTVEPVEADDWLKDVDRKLNLVQCTPVEKTLYASHQLRGPAADWWENYCNAHPEPTNIAWDEFATAFRAAHVPESTIDMKKEEFNRLKQGNSSVNEYLSQFNKLARYAPEEVDTDKKKIRKFLKGIAVGMRLQLLAHDFPTFQHMINKALLLEDARKEATEEYKKHKSNHQGNSSRGAPRPRYGQPMQYHQSVTQANHQPGYAPRPQMNRPAPQPQQRAPSGNTAPNSVTSFKSPQGPSAVQCFRCNXMGHYARQCPQNPTNTNSGYANGSTARTPAPAAAQSRPSSQASGQGSRASNHFGRGRVNHIQAETAQDAPDVVMGMFSVNSIPAIVLFDSGASHSFISQAFVKRNGWKTQNLHVPMIVHSPGRNIRATQICPEVNLRIEEVDFLAKPIVLDSQSLDIILGMDWLAKHKGQIDCAEKSITLQGPGGKQVRFTPNTPTASRSILTCLQVTSLESVPIVCEYPDVFPEELTRMPPDREIEFAIELAPGTAPIAKRPYRMAANELAEVKRQIEELESKGYVRPSSSPWGAPVLLVKKKDGSERMVIDYRALNEVTIKNKYPLPRIDDLFDQLKGARVFSKIDLRSGYHQLKIRSEDIPKTAFSTRYGLYEFTVMSFGLTNAPAFFMNLMNKIFMEYLDQFVVVFIDDILIYSKNEEEHAEHLRLIMEKLRDHQLFAKFSKCEFWLDRVAFLGHVISSNGVEVDPSKVEAVLAWNPPKNVSEIRSFLGLAGYYRRFIEGFSKLARPMTELLKKEKKFQWSAACEDSFQELKKRLTTAPILLPDIRKDFEIFCDASRQGLGCVLMQERKVVAYASRQLRPHEVNYPTHDLELAAVIHALKIWRHYLIGNRCEVYTDHKSLKYIFTQTELNMRQRRWLELIKDYDLGIHYHPGKANVVADALSRKAYCNVAQIRPDQDHLCRELEKLRLTVVQTGVPASLTVQPTLESQIREAQKDDEGIKELIKRIQEKKDTNFSIDDQGTVWCDSRICVPAKKELRDLILKEAHESAYSIHPGSTKMYQDIKAYFWWAGMKRDVAEYVALCDICQRVKAEHQRPAGLLQPLPIPEWKWEEIGMDFITGLPRTPSGYDSIWVIVDRLTKSAHFVPVKTTYDGRKLAELYMTHVVCRFGCPKKIVSDRGTQFTSRFWKQLHEALGTDLNFSTAYHPQTDGQTKRVNQILEDMLRACALDFEGTWDRCLPYAEFSYNNSYQASIQMSPNEAMFGRKCRTPLCWNEVGEALVFGPDILKSAEEQVKLIREXLKTAQDRQKNYADNRRHDLEFEKGDHVYLRVSPLRGMRRFGMSGKLAPRYIGPYLITARRGEVAYQLELPEGLADVHNVFHVSQLKKCLRVPEEQVPLGNIELEKNLTYKERPIKVLEEAERQTRRKTIKFYKVQWSNHSEDEATWEREDLLRAEFPELLP

SEQ ID NO: 20380 - protein, 1764 aa, Oryza sativa
  Clone ID: TF_OSC401219j.C1.p40.fg
MAVNASFSSHGFSEGHHVAQLRDLACFLGFSCPEYTGYSVDRVPPHCELSVYLYPREGIHGAGLRPHHFTVARPTLQIAYQDLSWTALRRLAHDYSHRLGGSAFRQLPRLPSGHSDARYPCPYSESQPVLTRMVELSEAQATQHDLLLEAYRSLARCYTALEARLAEEGVTSVDTISWDSGRLCHASHLSSHSSRGSACTPSGPRSPSSRAPYSPVYSPYPHPVSPSYTPGHTPVASSRRGPRFIRTARKRVVGSSTVFRFHHPAPPPPAARAAAGPRQMASRPRRAARAPARFGFEEGRAEPEANHESANEQSHRSNRSHRTVSRNAEVEQPRRSNRSHRTASRDAEMEQSHRSHRTASHNSGEERLPSPPHVENNMQHLMAVQTQILQGIAAAVAGYQHNAHGNGHPHMGNNRSKLTDFLRSRPPEFSQTVEPVEADDWLKDVDRKLNLVQCTPVEKTLYASHQLRGPAADWWENYCNAHPEPTSIAWDEFATAFRAAHVPESTIDMKKEEFNRLKQGNSSVNEYLSMFNKLARYAPEEVDSDKKKIRKFLKGIAVGMRLQLLAHDFPTFQHMINKALLLEDARKEATEEYKKRKSNHQGNSSRGAPRPRYGQPMQYHQSVTQANRQPGYAPRPQMNRPAPQPQQRAPSGNTAPNSVTSFKSPQGPSAIQCFRCNQMGHYARQCPQNPTNTNSGHANGSTARTPTPAAAQSRPSTQASGQGSRASNHFGRGRVNHIQAETAQDAPDVVMVHSPGRNIRATQICPEVNLRIEEVDFLAKPIVLDSQSLDIILGMDWLAKHKGQIDCAEKSITLQGPGEKQVRFTPNTPTASRSILTCLQVTSLESVPIVCEYPDVFPEELTRMPPDREIEFAIELAPGTAPIAKRPYRMAANELAEVKRQIEELESKGYVRPSSSPWGAPVLLVKKKDGSERMVIDYRALNEVTIKNKYPLPRIDDLFDQLKGARVFSKIDLRSGYHQLKIRSEDIPKTAFSTRYGLYEFTVMSFGLTNAPAFFMNLMNKIFMEYLDQFVVVFIDDILIYSKNEEEHAEHLRLIMEKLRDHQLFAKFSKCEFWLDRVAFLGHVISSNGVEVDPSKVEAVLAWNPPKNVSEIRSFLGLARYYRRFIEGFSKLTRPMTELLKKEKKFQWSAACEDSFQEMKKRLTTAPVLTLPDIRKDFKIFCDASRQGLGCVLMQERKVVAYASRQLRPHEVNYPTHDLELAAVVHALKIWRHYLIGNRCEVYTDHKSLKYIFTQTELNMRQRRWLELIKDYDLRIHYHPGKANVVADALSRKAYCNVAQIRPDQDHLCRELEKLRLTMVQPGVPASLTVQPTLESQIREAQKDDEGIKELIKRIQEKKDTNFSIDNQGTVWCGPRICVPAKKELRDLILKEAHESAYSIHPGSTKMYQDIKAYFWWTGMKRDVAEYVALCDVCQRVKAEHQRPAAHFVPVKTTYDGKKLAELYMTHVVCRFGCPKKIVSDRGTQFTSRFWKQLHEALGTDLNFSTAYHPQTDGQTERVNQILEDMLRSCALDFEGTWDRCLLYAEFSYNNGYQASIQMLPNEAMFGRKCRTPLCWNEVGKALVFGPDILKSAEEQVKLTRERLKTAQNRQKNYADNRRRDLEFEKGDHVYLRVSPLRGMRRFGMSGKLAPRYIGPYLITARRGEVAYQLELPEGLADVHNVFHVSQLKKCLRVPEEQVPLGNIVLEKNLTYKERPIKVLEEAERQTRRKTIKFYKVQWSNHSEDEATWEREDLLRAEFLELLL

SEQ ID NO: 20381 - protein, 468 aa, Oryza sativa
  unsure (1)..(468): unsure at all Xaa locations
  Clone ID: TF_OSC11188j.C1.p2.np
MSWHRAGVLLLGSILPACPGVGRRWVGSVLLSMARMGWKLCHVFRPYAVVMFNREKGKNVSGYASSNSSFQLNPPLASRELTRAHPWSIPSMLLSSQLPLVGSQDQNQYVFDRAFATQVNELPMPEEDVPFCHDCREQGHYALNCPWVYAKEAPSFGLAGQTSLNQPPRTKSSLQPSVQSREPNGENPLNPGKCFPPSLSYHVGSRTKQAKGKKSKNQKRKAPMRTEEEVCKMTITSTEWPPAGITIPRRQRGNTFRGARQLTQHLLSHGGRVSDSEGSDQVSSDDEDESPXHLGEEEMESKACTRCGEIGHVASMCLTLCPHCEEDHPPGECSTRKVTCFLCEGTNHVPKDCQLIVLLTKTTEIQRTTLRLSHQLVSSNHNIDDILHSTDAPPAAPDSAINHSNNTFSTNHSLHRQPQQRVVIDGRSCVSPRPTPGRGKGNQPQEGDTKQKTVIRFNQQSEGSFSYE

SEQ ID NO: 20382 - protein, 440 aa, Oryza sativa
  unsure (1)..(440): unsure at all Xaa locations
  Clone ID: TF_OSC11867j.C1.p3.np
SYLXFWSILSWLVSSLTSIPVTMFNREKGKNVSGYASSNSSFQLNPPLASRELTRAHPWSIPSMLLGSQLPLVGSQDQNQYVFDRAFATQVDELPMPEEDVPFCHDCREQGHYALNCPWVYAKEAPSFGLAGQASLNQPPRTKSSLQPSVQSREPNGENPLNPENCFPPSLSYHVGSRTKQAKGKKSKNQKRKAPMRTEEEVRKMTITSTEWPPAGITIPRRQRGNTFRGAXQLTQHLLSHGGRVSDSEGSDQVSSDDEDESPRHLGEEEMESKACTRCGEIGHVASMCLTLCPHCEEDHPPGECPTRKVTCFLCEGTNHVPKDCQLSVLLTKTAEIQRTTLRLSHQLVSSNSNIDNIIHNTNAPPAPPDSAINHSNNTFSTNHSLHRQPQQRIVVDGRSCVSPRPTPGRAKGNQSQEGDTKQNTVLCFKXQSEGSFSCE

SEQ ID NO: 20383 - protein, 455 aa, Oryza sativa
  Clone ID: TF_OSC401126j.C1.p41.fg
MVGLGWLGTSWDPGSGCQFGLNHRRPWVKAGLPFSSFFKFQLVLDGQMFNREKGKNVSGYASSNSSFQLNPPLASRELTRAHPWSIPSMLLGSQLPLVGSQDQNQYVFDRAFATQVDELPMPEEDVPFCHDCREQGHYALNCPWVYAKEAPSFGLAGQASLNQPPRTKSSLQPSVPSREPNGENPLNPENCFPPSLSYHVGSRTKQAKGKKSKNQKRKAPMRTEEEVRKMTITSTEWPPAGITIPRHQRGNTFRGARQLTQHLLSHGGRVSDSEGSDQVSSDDEDESPRHLGEEEMESKACTRCGEIGHVASMCLTLCPHCEEDHPPGECPTRKVTCFLCEGTNHVPKDCQLSVLLTKTAEIQRTTLRLSHQLVSSNSNIDNIIHNTNAPPAPPDSAINHSNNTFSTNHSLHRQPQQRIVVDGRSCVSPRPTPGRAKGNQSQEGDTKQKTVLCFK

SEQ ID NO: 20384 - protein, 341 aa, Oryza sativa
  Clone ID: TF_OSC6416j.C1.p1.np
DVPFCHDCREQGHYALNCPWVYAKEAPSFGLIGQTSLNQPPRTKSSLQPSVQSREPNGENPLNPGNCFPPSPSYHVGSRTKQAKGKKSKTQKRKAPMRTEEEVRKMTITSTEWPPAGITIPRRQRGNTFRGARQLTQHLLSHGGRVSDSEGSDQVSSDDEDESPRHLGEEEMESKACTRCGEIGHVASMCLTLCAYCEEDHPPGECPTCKVTCFLCEGTNHVPKDCQLSVLSTKTAEIQRTTLRLSHQLVSSNGNIDDIIHSTNAPPAAPDSAINHSNNTFSTNHSLHRQPQQRIVVDGRSCVSPRPTPGQAKGNQPQEGDTKQKTVIRFKQQSEGSFSCE

SEQ ID NO: 20385 - protein, 424 aa, Oryza sativa
  Clone ID: TF_OSC12281j.C1.p1.fg
MKASDWLRTVEKKLGLIQCTDQERVGFATHQLVGPTSEWWDSYEASRPEGHTITWDEFSSVFKRSHVPAGMITLRKREFRYLKQEDLTVTEYLHEFHRLAHYAPEDVETDEDKQEKFLQGLKDEVAVQLLLEDYEDFEKLVDTSHTTRKDHSDQACDVNSIHQDIDDSINEGTQNDNPSNFDSEKDSNGDSNYGTTDANVSKDFQPPIPTPSQNDRSQTNSSVKKTLICYNCKEPGHFSTDCPQPKRNLRHHSGHYARRRQVTRLVVTGANAIPVSLKGSRLKYHIVTRSIHNSRSEEYLVDKGQKMIDRRYRKRCLLPGKEVGRNVIDKRNRERTHQVDNLCEVDAEDMNHEKFWNGSIIKLPQPSLSNLKGAPWFESGEEKIPSAIGGQAKQFRVVKFCWKFVKTQQKKSDKKRRPPNLSSC

SEQ ID NO: 20386 - protein, 682 aa, Oryza sativa
  unsure (1)..(682): unsure at all Xaa locations
  Clone ID: TF_OSC13271j.C1.p1.np
MASRPRRAARAPARFGVEDGRVEPEENHESANEQSHHSNRSHRTVSRNAEVEQPRRSSRSHRTVSRDAEMEQSHRSHRTASHNSGEERLPSPPHVETNMQHLMAVQTQILQGLTTAIASFQHNAHGNGHPHMGNNRSKLTDFLRSRPPEFSQTVEPVEADDWLKDVDRKLNLVQCTPVEKTLYASHQLRGPAADWWENYCNAHPEPTNIAWDEFATAFRAAHVPESTIDMKKEEFNRLKQGNSSINEYLSQFNKLARYAPEEVDTDKKKIRKFLKGIAVGMRLQLAHDFPTFQHMINNALLLEDARKEATEEYKKRKSNHQGNSSRGAPSPRYGQPMQYHQSVTQANRKPGYAPRPQINRSAPQPQQRAPSGNTAPNSVTSFKSPXGPSAVQCFRCNQMGHYARQCPQNPTNTNSGHANGSTARTPTPAATQSRPSSQASGQGSRASNNFGRGRVNHIQAETAQDAPDVVMGMFSVNSVPAIVLFDSGASHSFISQAFVKRNGWKTQNLRVPMIVHSPGRNIRATQICPEVNLRIEEVDFLAKPIVLDSQSLDIILGMDWLAKHKGQIECAEKSITLQGPRGKQVRFTPNTPTASRSILTCLQVTSLGSGAPLKVFPFGFPENQNPPDREIEFAIELAPGTAPFGFPENQNPPDREIEFAIELAPGTAPIAKRPYRMAANEL

SEQ ID NO: 20387 - protein, 712 aa, Oryza sativa
  Clone ID: TF_OSC13981j.C1.p2.hg
MASRPCRAARAPAHFGFEEGRVEPEANHESANEQSHRSNNSHRTVSRNAEVEQPRRSNRSHRTASRDSEMEQSHRSHRTASHNSGEERLPSPPHVENNMQHLMAVQTQILQGIAAAVAGYQHNVHGNGHPHMGNNRSKLTDFLRSRPPEFSQTVEPVEADDWLKDVERKFNLVQCTPVEKTLYASHQLRGPAADWWENYCNGHPEPTNIAWDEFATAFRAAHVPESTIDMKKEEFNRLKQGNTSVNEYLSQFNKLARYAPEEVDTDKKKIRKFLKGIAVGMRLQLLAHDFPTFQHMINKALLLEDARKEATEEYKKHKSNHQGNSSRGAPRPRYGQPVQYHQSVTQANRQPGYAPRPQINRPAPQPQQRAPSGNTAPNSVTSFKSPQGPSAVQCFRCNQMGHYARQCPQNPTNTNSGHANGSTARTPTPAAAKSRPSTQASGQGSRASNHFGRGRVNHIQAETAQDAPDVVMGMFSVNSVPAIVLFDSGASHSFISQAFVKRNGWKTQNLRVPMIVHSPGRNIKATQICPEVNLRIEEVDFLAKPIVLDSQSLDIILGMDWLAKHKGQIDCAEKSITLQGPGGKQVRFTPNTPTASRSILTCLQVTSLESVPIVCEYPDVFPEELTRMPLDREIEFAIELAPGTAPIAKRPYRMAANELAEVKRQIEELESKGYVRPSSSPWGAPVLLVKKKEGSERMVIDYRALNEVTIKN

SEQ ID NO: 20388 - protein, 283 aa, Oryza sativa
  Clone ID: TF_OSC14645j.C1.p1.fg
MEASDWLRTVEKKLGLIQCTDQERVGFATHQLVGPASEWWNSYEASRPEGHTITWDEFSSVFKRSHVPAGMITLRKREFRYLKQEDLTVTEYLHEFYRLAHYAPEDVETDEDKQEKFLQGLKDEVAVQLLLEDYEDFEKLVDTSHTTRKDHSDQACDVNSIHQDIDDSINEGTQNDNPSNFDSEKDSNGDSNYGTTDANVSKDFQPPIPTPSQNDRSQTNSSVKKTLICYNCKEPGHFSTDCPQPKRNLRHHSGHYARRRQVTRLVVTGANAIPVRPRANHNP

SEQ ID NO: 20389 - protein, 1382 aa, Oryza sativa
  Clone ID: TF_OSC16108j.C1.p1.fg
MASRPRRAARAPARFGFEDGRVEPEENHESANEQSHHSNRSHRTASRNAEVEQPRRSSRSHRTVSRNAEMEQSHRSHRTASHNSGEERLPFPPHVENNMQHLMAVQTQILQGLAAAVAGFQHNAHGNGHPHMSNNRSKLTDFLRSRPPEFSQTIEPVEADDWLKDVDRKLNLVQCTPVEKTLYASHQLRGPAADWWENYCNAHPEPTNIAWDEFATAFRAAHVPESTIDMKKEEFNRLKQGNSSVNEYLSMFNKLARYAPEEVDTDKKKIRKFLKGIAVGMRLQLLAHDFPTFQHMINKALLLEDARKEATEEYKKRKSNHQGNSSRGVPRPRYGQPMQYHQSVTQANHQPGYAPRPQMNRPAPQPQQRAPSGNTAPNSVTSFKSPQGPSAVQCFRCNQMGHYARQCPQNPTNTSLGHANGSTARTPTPAAAQSRPSSQASGQVHSPGRNIRATQVCPGVNLRIEEVDFLAKPIVLDSQSLDIILGMDWLAKHKGQIDCAEKSITLQGPGGKQVRFTSNTPTASRSILTCLQVTSLESVPIVCEYPDVFPEELTSMPPDREIVFAIELAPGTAPIAKRPYRMAANELAEVKRQIEELEGKGYVRPSSSPWGAPVLLVKKKDGSERMLDQFVVVFIDDILIYSKNEEEHAEHLRLIMEKLRDHQLFAKFSKCEFWLDRVAFLGHVISSNGVEVDPSKVEAVLAWNPPKNVSEIRSFLGLAGYYRRFIEGFSKLARPMTELLKKERKFQWSAACEDSFQEMKKRLTTAPVLTLPDIQKDFEIFCDASRQGLGCVLMQERKVVAYASRQLRPHEVNYPTHDLELAAVIHALKIWRHYLIGKRCEVYTDHKSLKYIFTQTELNMRQRRWLELIKDYDLGIHYHPGKANVVADALSRKAYCNVAQIRPDQDRLCRELEKLRLTVVQSGVPASLTVQPTLESQIREAQKDDEGIKELIKRIQEKKDTNFSIDDQGTVWCGPHICVPAKKELRDLILKEAHESAYSIHPRSTKMYQDIKAYFWWARMKRDVAEYVALCDICQRVKAEHQRPAGLLQPLPIPEWKWEEIGMDFITGLPRTPSGYDSIWVIVDRLTKSAHFVPVKTTFDGKKLAELYMTHVVCRFGCPKKIVSDRGTQFTSRFWKQLHEALGTDLNLSTGYHPQTDGQTERVNQILEDMLRACALDFEGTWDRCLPYAEFSYNNSYQASIQMSPNEAMFGRKCRTPLCWNEVGEALVFGLDILKAAEEQVKLIRERLKTAQNRQKNYADNRRRDLEFEKGDHVYLRVSPLRGMRRFGMSGKLAPRYIGPYLITARRGEVAYQLELPEGLADVHNVFHVSQLKKCLRVPEEQVPLGNIELEKNLTYKERPTKVLEEAERQTRKKTIKFYKVQ

SEQ ID NO: 20390 - protein, 1851 aa, Oryza sativa
  Clone ID: TF_OSC17191j.C1.p1.fg
MAVNASFSSHGFGEGHHVAQLRDLARFLGFSCPEYTGYSVDRVPPHCELSVYLYPRGGIHGAGLRPHHFTVARPTLQIAYQDLSWTALRRLAHDYSHRLGGSAFRQLPRLPSGHSDARYPCPYSESQPVLTRMVELSEAQATQHDLLLEAYRSLARRYAALEARLAEEGVTSVDTISWDSGRLCHASHLSSHSSRGSARTPSGPRSPSSRAPYSPVYSPYPHPVSPSYTPGHTPVASSCRGPRFIRTARKRVVGSATVFRFHYPAPLPPAARAAAGPRQMASRPRRAARAPARFGFEDGRVEPEENHESANEQSHHSNRSHRTVSRNAEVEQPRRSSRSHRTVSRDAEMGQSHRSHRTASHNSGEERLPFPPHVETNMQHLMAVQTQILQGLTTAIASFQHNAHGNGHPHMGNNRSKLTDFLRSRPPEFSQTVEPVEADDWLKDVDRKLNLVQCTPVEKMLYASHQLRGPAADWWENYCNAHPEPTNIAWDEFATAFRAAHVPESTIDMKKEEFNRLKQGNSSINEYLSQFNKLARYAPEEVDTDKKKIRKFLKGIAVGMRLQLLAHDFPTFQHMINKALLLEDARKEATEEYKKRKSNHQGNSFRGAPRPRYGQPMQYHQSVTQANRQPGYAPRPQINRPAPQPQQRAPSGNTAPNSVISFKSPQGPSAVQCFRCNQMGHYARQCPQNPTNTNSGHANGSTARTPTPAAAQSRPSSQASGQGSRASNNFGRGRVNHIQAETAQDAPDVVMGMFSVNSVPAIVLFDSGASHSFISQAFVKRNGWKTQNLRVPMIVHSPGRNIRATQICPEVNLRIEEVDFLAKPIVLDSQSLDIILGMDWLAKHKGQIDCAEKSITLQGPGGKQVRFTPNTPTASRSILTCLQVTSLESVPIVCEYPDVFPEELKRMPPDREIEFAIELAPGTAPIAKRPYRMAANELAEVKRQIEELESKGYVRPSSSPWGAPVLLVKKKDGSERMVIDYRALNEVTIKNKYPLPRIDDLFDQLKGARVFSKIDLRSGYHQLKIRSEDIPKTAFSTRYGLYEFTVMSFGLTNAPAFFMNLMNKIFMEYLDQFVVVFIDNILIYSKNEEEHAEHLRRIMEKLRDHQLFAKFSKCEFWLDRVAFLGHVISSNGVEVDPSKVEAVLAWNPPKNVSEIRSFLGLAGYYRRFIEGFSKLARPMTELLKKEKKFQWSAACEDSFQELKKRLTTAPVLTLPDIRKDFEIFCDASRQGLGCVLMQEQKVVAYASRQLRPHEANYPTHDLELAAVVHALKIWRHYLIGNRCEVYTDHKSLKYIFTQTELNMRQRKWLELIKDYDLGIHYHPGKANVVADALSHKAYCNVAQIRPDQDHLCRELEKLRLTVVQSGVPASLTVQPTLESQIREAQKDDEGIKELIKRIQEKKDTNFSIDDKGTVWCGPRICVPAKKELRDLILKEAHESAYSIHPGSTKMYQDIKAYFWWAGMKRDVAEYVALCDICQRVKAEHQRPAGLLQPLPIPEWKWEEIGMDFITGLPRTPSGYDSIWVIVDRLTKSAHFVPVKTTYDGKKLAELYMTHVVCRFGCPKKIVSDRGTQFTSRFWKQLHEALGTDLNFSTAYHPQTDGQTERVNQILEDMLRACALDFEGTWDRCLPYAEFSYNNSYQASIQMSPNEAMFGRKCRTPLCWNEVGEALVFGPDILKSAEEQVKLIRERLKTAQNRQKNYADNRRRDLEFEKGDHVYLRVSPLRGMRRFGMSGKLAPRYIGPYLITARHGEVAYQLELPEGLADVHNVFHVSQLKKCLRVPEEQVPLGNIELEKNLTYKERPIKVLEEVERQTRRKTIKFYKVQWSNHSEDEATWEREDLLRAEFPDLLP

SEQ ID NO: 20391 - protein, 1177 aa, Oryza sativa
  Clone ID: TF_OSC19655j.C1.p3.gm
MAPPIAGNGRANRLSLLAGASSGRAVASSSIAAASPSPACPPFPAETPGAAFPPSPFPFIRVGRLQPPLSPCLSAGRRRHHLPRLRDAALIPGISSSSPEFRRNTVARAGFSFLLGGISSGCPFRHAHASAGAAVPSLGTPRHHHLRHRSGKVALGLASPPSKPLRGPSSSSPIVLVVDVPSVTRLVVSRRRLRRRHRSGVVHAVVGCPHRLLAGPAPVIVFVLASASSSLVPAASRRRPRIAAEVVPSPSVSAAPLSSFRRFPKRGSWSSPKHNAHGNGHPHVGNNRSKLTDFLRSRPPEFSQTVEPVEADDWLKDVDRKLNLVQCTPVEKTLYASHQLRGPAADWWENYCNAHPEPTNIAWDEFATAFRAAHVPESTIDMKKEEFNRLKQGNSSVNEYLSQFNKLARYAPEEVDTDKKKIRKFLKRIAVGMRLQLLAHDFPTFQHMINKALLLEDARKEATEEYKKRKSNHQGNSSRGTPRPRYGQPMQYHQSVTQANRQPGYAPRPQMNRPTPPPQQCAPSGNTAPNSVTSFNSPQGPSVVQCFRCNQMGHYARQCPQNPTNTNLGHANGSIAKTPTPAAAQSRPSSQASGQGSRASNHFGRGRVNHIQAETAQDAPDVVMGYHQLKIRSEDIPKTAFSTRYGLYEFTVMSFGLTNAPAFFMNLMNKIFMEYLDQFVVVFIDDILIYSKNEEEHAEHLRLIMEKLRDHQLFAKFSKWEFWLDRVAFLGHVISSNGVEVDPSKVEAVLAWNPPKNEKKDTNFSIDDQGTVWCGPRICVPAKKELRDLILKEAHESAYSIHPGSTKMYQDIKAYFWWVGMKRDVTEYVALCDICQRVKAEHQRPAGDVGPEGDVFALLLVPPRGSSRTRLGPEGRGAPTPRGFSLRVYGLDSHDSASRLLPAKVEIGSLESHLGSPAEPAKGGLRGLPVRSPTLRHLPIPEWKWEEIGMDFITGLPRTPNGYDSIWASIQMSPNEAMFGRKCRTPLCWNEVGEALVFGPDILKSAEEQVKLIRERLKTAQNRHKNYTDNRRRDLEFEKGDHVYLRVSPLRGMRRFGMSGKLAPRYIGPYLITARRGEVAYQLELPEGLADVHNVFHVSQLKKCLRVPEEQVPLGNIELEKNLTYKERPIKVLEEAERQTRRKTIKFYKVQWSNHSEDEATWEREDLLRAEFPDLLP

SEQ ID NO: 20392 - protein, 529 aa, Oryza sativa
  Clone ID: TF_OSC2188j.C1.p1.fg
MQYHQSVTQANRQPSYAPRPQMNRLAPQPQQRAPSGNTAPNSVTSFKSPPGLSAVQCFRCNQMGHYARQCPQNLTNSNSGHTNGSTARTPTPAAAQSRPSTQASGQGSRASNNFGRDRVNHIQAETAQDAPDVVMGMFSVNSAPAIVLFDSGASHSFISQAFVKRNGWKTQNLRVPMIVHSPGRDIRATKICSEVNLRIEEVDFLAKPIVLDSQSLDIILGMDWLAKHKGQIDCAERSITLQGPGGKQVRFTPNTLTASRSILTSLQATSLESVPIVCEYPDVFPKELTEMPPNREIEFAIELALGTAPIAKSPYRMAANELAEVKKQIEELESKGYVRPSSSPWGAPVLLVKKKDGSERMLKIRYEDIPKTAFSTRYGLYEFTVMSFGLTNAPAFFMNLMNKIFMEYLDQFVVVFIDDILIYSKNEEEHVEHLRLIMEKLRDHQLFAKFSKCEFWLDRVAFLGHVISSNGVEVDPSKVEAVLAWYPPKNESEIRSFLGLAGYYRRFIEGFSKLARPMTELLKKEKKFE

SEQ ID NO: 20393 - protein, 1081 aa, Oryza sativa
  Clone ID: TF_OSC23559j.C1.p4.gm
MQRWNSLTALTALPVTILEKNASLPHLIPSSPSRLKDVDRKLNLVQCTPVEKTLYASHQLRGPATDWWENYCNAHPEPTNIAWDEFATAFRAAHVPESTIDMKKEEFNRLKQGNNSVNEYLSQFNKLARYAPEEVDTDKKKIKKFLKGIAVGMRLQLLAHDFPTFQHMINKALLLEDARKEATEEYKKRKSNHQGNSSRGAPRPRYGQPMQYHQSVTQANRQPGYAPRPQMNRPAPQPQQCAPSGNTAPNSVTSFKSPQGPSAVQCFRCNQMGHYARQCPQNPTNTNSGHANGSTARTPTPAAAQSRPSSQASGQGSRASNNFGRGRVNHIQAETAQDAPDVVMEELTSMPPDREIEFAIELAPSTAPIAKRPYRMAANELAEVKRQIEELESKGYVRPSSSPWGAPVLLVKKKDGSERMVIDYRALNEVTIKNKYPLPRIDDLFDQLKGARVFSKIDLRSGYHQLKIRTEDIPKTAFSTRYGLYEFTVMSFGLTNAPAFFMNLMNKIFMEYLDQFVVVFIDDILIYSKNEEEHVEHLRLIMEKLRDHQLFAKFSKCEFWLDRVAFLGLVISFNGVEVDPSKVEAVLAWNPPKNVSEIRSFLGLTGYYRRFIEGFSKLARPMTELLKKEKKFHWSAACEDSFQEMKKRLTTAPVLTLPDIRKDFEIFCDASRQGLGCVLMQERKVVAYASRQLRPHEVNYPTHDLELAAVVHALKIWRHYLIGNRCEVYTDHKSFKYIFTQTELNMRQRRWLELIKDYDLGIHTTPSGVPASLTVQPTLESQIREAQKDDEGIKELTKRIQEKKDTDLSIDDQGTVWCGPRICVPAKKELRDLILKEAHESAYSIHPGSTKMYQDIKAYFWWAGMKRDVAEYVALCDICQRVKAEHQRPAGLLQPLPIPEWKWEEIGMDFITGLPRTPSGYDSIWNRQKNYADNRRRDLEFEKGDHVYLRVSPLRGMRRFGMSGKLAPRYIGPYLITARRGEVAYQLELPEGLADVHNVFHVSQLKKCLRVPEEQVLLGNIELEKNLTYKERPIKVLEEAERQTRRKTTKFYKVQWSNHSEDEATWEREDLLRAEFPELLP

SEQ ID NO: 20394 - protein, 1504 aa, Oryza sativa
  Clone ID: TF_OSC27040j.C1.p1.fg
MASRPRRAARAPARFGFEDGRVEAEANHESANEQSHRSNRSHRTVSRNAEVEQPRRSSRSHRTVSRDAEMEQSHLSHCTVSHNSGEERLPSPPHVENNMQHIMAVQTQILQGLTTAIASFQHNVHGHPHVGNNRSKLTDFLRSRPPEFSQTVEPVEADDWLKDVDRKLNLVQCTPVEKTLYASHQLRGPAADWWENYCNAHPEPNNIAWDEFATAFRAAHVPESTIDMKKEEFNRLKQGNNSVNEYLSQFNKLARYAPEEVDTDKKKIRKFLKGIAVGMRLQLLAHDFPTFQHMINKALLLEDARKEATEEYKKRKSNHQGNSSRGAPRPRYGQPMQYHQSITQTNRQPGYAPRPQINRPAPPPQQRAPSGNTAPNSVTSFKSPQGPSAVQCFRCNQMGHYARQCPQNPANTNSGHANGSTARTPTPAAAQSRPSSQASGQGSRASNHFGRGRVNHIQAETAQDAPDVVMGMFSVNSVPAIVLFDSGASHSFISQAFVKRNGWKTQNLRVPMIVHSPGRNIRAIQICPEVNLRIEEVDFLAKPIVLDSQSLDIILGMDWLAKHKGQIDCAEKSITLQGPGGKQVRFTPNTPTASRSILTCLQVTSLESVPIVSEYPDVFPEELTTNELAEVKRQIEELESKGYVRPSSSPWGAPVLLVKKKDGSERMVIDYRALNEVTIKNKYPLPRIDDLFDQLKGARVFSKIDLRSGYHQLKIRSEDIPKTAFSTRYGLYEFTVMSFGLTNAPAFFMNLMNKIFMEYLDQFVVKCEFWLDRVAFLGHVISSNGVEVDPSKVEAVLAWNPPKNVSEIRSFLGLAGYYRRFIEGFSKLARPMTELLKKEKKFQWSAACEDSFQEMKKRLTTAPVLTLPDIRKDFEIFCDASRQGLGCVLMQERKVVAYASRQLRPHEVNYPTHDLELAAMVHALKIWRHYLIGNRCEVYTDHKSLKYIFTQTELNMRQRRWLELIKDYDLGIHYHPGKANVVADALSRKAYCNVAQTRPNQDHLCRELEKLRLTVVQSGVPASLTVQPTLESQIREAQKDDEGIKELIKRIREKKDTNFSIDEQGTVWCGPRICVPAKKELRDLILKEAHESAYSIHPGSTKMYQDIKAYFWWAGMKRDVAEYVALCDICQRVKAEHQRPAGLLQPLPIPEWKWEEIGMDFITGLPRTPCGYDSIWVIVDRLTKSAHFVPVKTTYDGKKLAELYMTHVVCRFGCPKKIVSDRGTQFTSRFWKQLHETLGTDLNFSTAYHPQTDGQTERVNQILEDMLRACALDFEGTWDRCLPYAEFSYNNSYQASIQMSPNEAMFGRKCRTPLCWNEVGEALVFGPDILKSAEEQVKLIRERLKTAQNRQKNYADNRRRDLEFKKGDHVYLRVSPLRGMRRFGMSGKLAPRYIGPYLIAARRGEVAYQLELPEGLADVHNVFHVSQLKKCLRVPEEQVPLGSIELEKNLTYKERPIKVLEEAERQTRRKTIKFYKVQWSNHSEDEATREREDLLRAEFPELLP

SEQ ID NO: 20395 - protein, 1657 aa, Oryza sativa
  Clone ID: TF_OSC29124j.C1.p1.fg
MAVNASFSSHGFGEGHHVAQLRDLAHFLGFSCPEYTGYSVDRVPPHCELSVYLYPRGGIHGAGLRPHHFTVARPTLQIAYQDLSWTALRRLAHDYSHRLGGSAFRQLPRLPSGHSDARYPCPYSEPQPVLTRMVELSEAQATQHDLLLEAYRSLARRYAALEARLAEEGVTSVDTISWDSGRLCHASHLSSHSSRGSTRTPSGPRSPSSRAPYSPVYSPYPHPVSPSYTPGHTPVASSRRGPRFIRTARKRVVGSATVFRFHYPAPLPPAARAAAGPRQMASRPRRAARAPAHFGFEDGRVEPEENHESANEQSHRSNRSHRTASRNAEMEQSHRSHHTVSHNSGEERLPSPPHVENNMQHLMAVQTQILQGLAAAVAGFQHNAHGNGHPHMSNNRSKLTNFLRSRPPEFSQTVEPVEADDWLKDVDRKLNLVQCTPVEKTLYASHQLRGPAADWWENYCNAHPEPTNIAWDEFATAFRAAHVPESTIDMKKEEFNRLKQGNSSVNEYLSMFNKLARYAPEEVDTDKKKIRKFLKGIAVGMRLQLLAHDFPTFQHMINKALLLEDARKEATEEYKKRKSNHQGNSFRGAPRPRYGQPMQYHQSVTQANRQPGYAPRPQMNHPAPQPQQRAPSGNTAPNSVTSFKSPQGPSAVQCFRCNQMGHYARQCPQNPTNNNSGHANGSTARTPTPAAAQSRPSSQASGQGSRASNNFGRGRVNHIQAETAQDALDVVMGPGGKQVRFTPNTPTASRSILTCLQVTSLESVPIVCEYPDVFPEELTRMPPDREIEFAIELAPGTAPIAKRPYRMAANELAEVKSKLKNWKVKVMCDLAHPLGEPQCFWLRKRMALREWSGYHQLKIRSEDIPKTAFSTRYGLYEFTVMSFGLTNAPAFFMNLMNKIFMEYLDQFVVVFIDDILIYSKNKEEHAEHLRLIMEKLRDHQLFAKFSKCEFWLDRVAFLGHVISSNGVEVDPSKVEAVLAWNPPKNVSEIRSFLGLAGYYRRFIEGFSKLARPMTELLKKEKKFQWSAACEDSFQEMKKRLTTAPVLTLPDIRKDFEIFCNASRQGLGCVLMQERKVVAYASRQLRPHEVNYPTHDLELAAVVHALKIWRHYLIGNRCEVYTDHKSLKYIFTQTELNMRQRRWLELIKDYDLGIHYHPGKANVVADALSRKAYCNVAQIRPDQDHLYRELDKLRLTVVQSGVPASLTVQPTLESQIREAQKDDEGIKELIKRIQEKKDANFSIDDQGTVWCGPRICVPAKKELRDLILKEAHESAYSIHPGSTKMYQDIKAYFWWAGMKRDVAEYIALCDICQRVKAEHQRPAGLLQPLPIPGWKWEEIGMDFITGLPRTPSGYDSIWVIVDRLTKSAHFVPVKTTYDGRKLAELYITHVVCRFGCPKKIVSDRGTQFTSRFWKQLHEALGTDLNFSTAYHPQTDGQTERVNQILEDMLRACALDFEGTWDRCLPYAEFSYNNSYQASIQMSPNEAMFGRKCRTPLCWNEVGEALVFGPDILKRDLEFEKGDHVYLRVSPLRGMKRFGMSGKLAPRYIGPYLITARRGEVAYQLELPEGLADVHNVFHVSQLKKCLRVPEEQVPLGNIELEKNLTYKERPIKVLEEAERQTRRKTIKFYKVQWSNHSEDEATWEREDLLRAEFPELLP

SEQ ID NO: 20396 - protein, 1472 aa, Oryza sativa
  unsure (1)..(1472): unsure at all Xaa locations
  Clone ID: TF_OSC31735j.C1.p1.np
MASRPRRAARAPAHFGFEEGRVEPEANHESANEQSHHSNRSHHTASRNAEVEQPHRSNRSHRTVSRNAEVEQSHRSPRAAIHNSREERIPSPPHVENNMQHLMAVQTQILQGLATAIAGIQHNAHGNGHPHTGNNRSKLTDFLRSRPPEFSQTVEPVEADDWLKDVERKLNLVQCTPVEKTLYASHQLRGPAADWWENYCNAHPEPTNIPWDEFAAAFRAAHVPESTIDMKKEEFNRLKQGNTSVNEYMSQFNKLARYAPEEVDTDKKKIRKFLKGVTVGMRLXLLAHDFPTFXHMINKRLLLEDARKEATEEYKKRKSTHQGNSSRGEPRPRFGQPMQYHQSVTQANRQPSYAPRPQMNRLAPQPQQRAPSGNTAPNSVTSFKSPPGLSAVQCFRCNQMGHYARQCPQNLTNSNSGHTNGSTARTPTPAAAQSRPSTQASGQGSRASNNFGRDRVNHIQAETAQDAPDVVMGMFSVNSAPAIVLFDSGASHSFISQAFVKRNGWKTQNLRVPMIVHSPGRDIRATKICSEVNLRIEEVDFLAKPIVLDSQSLDIILGMDWLAKHKGQIDCAERSITLQGPGGKQVRFTPNTLTASRSILTSLQATSLESVPIVCEYPDVFPKELTEMPPNREIEFAIELALGTAPIAKSPYRMAANELAEVKKQIEELESKGYVRPSSSPWGAPVLLVKKKDGSERMVIDYRALNEVTKKNKYPLPRIDDLFDQLXGAKVFSKIDLRSVYHQLKIRYEDIPKTAFSTRYGLYEFTVMSFGLTNAPAFFMNLMNKIFMEYLDQFVVVFIDDILIYSKNEEEHVEHLRLIMEKLRDHQLFAKFSKCEFWLDRVAFLGHVISSNGVEVDPSKVEAVLAWYPPKNESEIRSFLGLAGYYRRFIEGFSKLARPMTELLKKEKKFEWSAACEDSFQEMKKRLTTAPVLTLPDIRKDFEIFCDASRQGLGCVLMQERKVVAYASRQLRPHEVNYPTHDLELAAVVHALKIWRHYLIGNRCEVYTDHKSLKYIFTQTELNMRQRRWLELIKDYDLGIHYHPGKANVVADTLSRKTYCNAAQIWPDQDRLCRELEKLRLTVVQSGVPASLTVQPTLESQIREAQKDDEGIKELIKRIQKMKDTDFSIDDQGTVWCGPRICVPAKKELRDLILKEAHESAYSIYPGSTKMYQDIKAYFWWVGMKRDVAEYVALCDICQRVKAEHQRPAGLLQPLPIPEWKWEEIGMDFITGLPRTPSGYDSIWVIVDRLTKSAHFVPAKTTFDGKKLAELYMTHVVCRFGCPKKIVSDRGTQFTSRFWKQLHEALGTDLNFSTAYHPXTDGQTERVNQILEDMLCACALDFEGTWDRCLLYAEFSYNNSYQASIQMSPNEAMFGRKCRTPLCWNKVGEALVFGPDILKAAEEQVKLIRQCLKTTQNRQKNYADNRRRDLEFEKGDLVYLRVSPLRGMRRFGMSGKLAPRYIGPYLITARRG

SEQ ID NO: 20397 - protein, 1573 aa, Oryza sativa
  unsure (1)..(1573): unsure at all Xaa locations
  Clone ID: TF_OSC33740j.C1.p1.np
MASRPRRAARAPARFGFEDGRVEAEANHESANEQSHHSNRSHRTVSRNAEVEQPRRSNRSHRIVFRNAEMEQSHRSHHTASHNSGEERLPSPPHVENNMQHIMAVQTQILQGITTAIAGFQHNAHGNGHPHVGNNRSKLTDFLRSRPPEFSQTVEPVEADDWLKDVDRKLNLVQCTPVEKTLYASHQLRGPAADWWENYCNAHPEPTNIAWDEFAMAFHAAHVPESTIDMKKEEFNRLKQGNSSVNEYLSQFNKLARYAPEEVDTDKKKIRKFLKGIAVGMRLQLLAHDFPTFQHMINKALLLEDARKEATEEYKKRKSQVNHQGNSSRGAPRPRYGQPMQYHQSVTQANRQPGYAPRPQMNRPAPPPQQRAPSGNTAPNSVTSFKSPQGPSAVQCFRCNQMGHYARQCPQNPTNTNSGHANGSTARTPTPAAAQSRPSSQASGXGSRASNHFGRGRVNHIQAETAQDAPDVVMGMFSVNSVPAIVLFDSGASHSFISQAFVKRNGWKTQNLRVPMIVHSPGRNIRATQICPEVNLRIEEVDFLAKPIILDSQSLDIILGMDWLAKHKGQIDCAEKSITLQGPGGKQVRFTPNTPTASRSILTCLQVTSLESVPIVCEYPDVFPEELTSMPPDREIEFAIELAPGTAPIAKRPYRMAANELAEVKRQIEELESKGYVRPSSSPWGALVLLVKKKDGSERMVIDYRALNEVTIKNKYPLPRIDDLFDQLKGARVFSKIDLRSGYHQLKIRSEDIPKTAFSTRYGLYEFTVMSFGLTNAPAFFMNLMNQIFLEYLDQFVVVFIDDILIYSKNEEEHTEHLRLIMEKLRDHQLFAKFSKCEFWLDRVAFLGHVISSNGVEVDPSKVEAVLAWNPPKNVSEIRSFLGLAGYYRRFIEGFSKLARPMTELLKKEKKFQWSAACEDSFQEMKKRLTTAPVLTLPDIRKDFEIFCDASRQGLGCVLMQERKVVAYASRQLRPHEVNYPTHDLELAAVVHALKIWRHYLIGNRCEVYTDHKSLKYIFTQTELNMRQRRWLELIKDYDLGIHYHPGKANVVADALSRKAYCNVAQIRPDQEHLCRELEKLRLTVVQSGVPASLTVQPTLESQIREAQKDDEGIKELIKRIQEKKDTNFSIDDQGTVWCGPRICVPAKKELRDLILKEAHESAYSIHPGSTKMYQDIKAYFWWAGMKRDVAEYVALCDICQRVKAEHQRPAGMLQPLPIPEWKWEEIGMDFITGLPRTPNGYDSIWVIVDRLTKSAHFVPVKTTYDGKKLAELYMTHVCRFGCPKKIVSDRGTQFTSRFWKQLHEALGTDLNFSTAYHPXTDGQTERVNQILEDMLRACALDFEGTWDRCLPYAEFSYNNSYQASIQMSPNEAMFGRKCRTPLCWNEVGEALVFGPDILKSAEEQVKLIRERLKTAQNRXKNYADNRRRDLEFEKGDHVYLRVSPLRGMRRFGMSGKLAPRYIGPYLITARRGEVAYQLELPEGLADVHNVFHVSQLKKCLRVPEEQVPLGNIELEKNLTYKERPIKVLEEAEHQTRRKTIKFYKVQWSNHSEDEATWEREDLLRAEFPELFP

SEQ ID NO: 20398 - protein, 1203 aa, Oryza sativa
  Clone ID: TF_OSC34202j.C1.p14.gm
MAVQTQILQGLTTAIASFQHNAHGNGHPHVGNNRSKLTDFLRSRPPEFSQTIEPVEADDWLKDVDRKLNLVQCTPVEKTLYASHQLRGPAADWWENYCNAHPEPTNIAWDEFATAFRVAHVPESTIDMKKEEFNRLKQGHSSVNEYLSQFNKLARYAPEEVDTDKKKIRKFLKGIAVGMRLQLLAHDFPTFQHMINKALLLEDARKEATEEYKKRKSNHQGNSSRGAPRPRYGQPMQYHQSVTQANRQSSYAPRPQMNRPAPPPQQRAPSGNTAPNSVTSFKSPQGPSAVQCFRCNQMGHYARQCPQNPTNTSPGHANGSTARTPTPAAAQSRPSSQASGQGSRASNHFGRGRVNHIQAETAQDAPDVVMGYHQLKIRSEDIPKTAFSTRYGLYEFTVMSFGLTNAPAFFMNLMNKIFMEYLDQFVVVFIDDILIYSKNEEEHAEHLRLIMEKLRDHQLFAKFSKCEFWLDRVAFLGHVISSNGVEVDPSKVEAVLAWNPPKNVSEIRSFLGLAGYYRRFIEGFSKLARPMTELLKKEKKFQWSTACEDSFQEMKKRLTTAPVLTLPDIRKDFEIFCDASRQGLGCVLMQERKVVAYASRQLRPHEVNYPTHDLELAAVIHALKIWRHYLIGNRCEVYTDHKSLKYIFTQTELNMRQRRWLELIKDYDLGIHYHPGKANVVADALSRKAYCNIAQIRPDQDHLCRELEKLRLTVVQSGVPASLTVQPTLESQIREAQKDDEGIKELIKRIQEKKDTNFSIDDQGTIWCGPRICVPAKKELRNLILKEAHESAYSIHPGSTKMYQDIKAYFWWAGMKRDVAEYVALCDICQRVKAEHQRPAGLLQPLPIPEWKWEEIGMDFITGLPRTPSGYDSIWVIVDRLTKSAHFVPVKTTYDGKKLAELYMTHVVCRFGCPKKIVSDRGTQFTSRFWKQLHEALGTDLNFSTAYHPQTDGQTERVNQILEDMLRACALDFEGTWDRCLPYAEFSYNNSYQASIQMSPNEAMFGRRCRTPLCWNEVGEALVFGPDILKSAEEQVKLIRERLRTAQNRQKNYADNRRRDLEFEKGDHVYLRVSPLRGMRRFGMSGKLAPRYIGPYLITARRGEVAYQLELPEGLADVHNVFHVSQLKKCLRVPEEQVPLGNIELEKNLTYKERPIKVLEEAERQTRRKTIKFYKVQWSNHSEDEATWEREDLLRAEFPELLP

SEQ ID NO: 20399 - protein, 1776 aa, Oryza sativa
  Clone ID: TF_OSC400014j.C1.p36.fg
MAVNASFSSHGFGEGHHVAQLRDLARFLGFSCPEYTGYSVDRVPPHCELSVYLYPRGGIHGAGLRPHHFTVARPTLQIAYQDLSWTALRRLAHDYSHRLGGSAFRQLPRLPSGHSDARYPCPYSESQPVLTRMVELSEAQATQHDLLLEAYRSLARRYAALEARLAEEGVTSVDTISWDSGRLCHASHLSSHSSRGSARTPSGPRSPSSRAPYSPVYSPYPHPVSPSYTPGHTPVASSRRGPRFIRTARKRVVEVEQPRRSSRSHRTVSREAELEQSHRPHRTASHNSGEERLPSPPHVENNMQHIMAVQTQILQGLTTAIASFQHNAHGNGHPHMGNNRSKLTDFLRSRPPEFSQTVEPVEADDWLKDVDRKLNLVQCTPVEKTLYASHQLRGPAADWWENYCNAHPEPTNIAWDEFATAFRAAHVPESTIDMKKEEFNRLKQGHSSVNEYLSQFNKLARYAPEEVDTDKKKIRKFLKEIAVGMRLQLLAHDFPTFQHMINKALLLEDARKEATEEYKKRKSNHQGNSSRGAPRPRYGQPMQYHQSVTQANRQPGYAPRPQINRPAPQPQKHAPSGNTAPNSVTSFKSPQGPSAVQCFRCNQMGHYARQCPQNPTNTNSGHANGSTARTPTPAAAQSRPSSQASGQGSRASNHFGRGRVNHIQAETAQDAPDVVMGMFSVNSVPAIVLFDLGASHSFISQAFVKRNGWKTQNLRVPMIVHSPGRNIRATQICPEVNLRIEEVDFLAKPIVLDSQSLDIILGMDWLAKHKGQIDCAEKSITLQGPGGKQVRFTPNTPTASRSILTCLQVTSLESVPIVCEYPDVFPEELTRMPPDREIEFAIELAPGTAPIAKRPYRMAANELAEVKRQIEELESKGYVRPSSSPWGAPVLLVKKKDGYERMVIDYRALNEVTIKNKYPLPRIDDLFDQLKGARVFSKIDLRSGYHQLKIRSEDIPKTAFSTRYGLYEFTVMSFGLTNAPAFFMNLMNKIFMEYLDQFVVVFIDDILIYSKNEEEHAEHLRLIMEKLRDHQLFAKFSRCEFWLDRVAFLGHVISSNGVEVDPSKVEAVLAWNPPKNVSEIRSFLGLAGYYRRFIEGFSKLARPMTELLKKEKKFQWSTACEDSFQEMKKRLTTAPVLTLPDIRKDFEIFCDASRQGLGCVLMQERKVVAYASRQLRPHEVNYPTHDLELAAVIHALKIWRHYLIGNRCEVYTDHKSLKYIFTQTELNMRQRRWLELIKDYDLGIHYHPGKANVVADALSRKAYCNVAQIRPDQDHLCRELEKLRLTVVQSGVPASLTVQPTLESQIREAQKDDEGVKELIKRIQEKKDTNFSIDDQGTVWCGSRICVPAKKELRDLILREAHESAYSIHPGSTKMYQDIKAYFWWAGMKRDVAEYVALCDICQRVKAEHQRPAGLLQPLPIPGWKWEEIGMDFITGLPRTPSGYDSIWVIVDRLTKSAHFVPVKTTYDGKKLAELYMTHVVCRFGCPKKIVSDRGTQFTSRFWKQLHEALGTDLNFSTAYHPQTDGQTERVNQILEDMLRACALDFEGTWDRCLPYAEFSYNNSYQASIQMSPNEAMFGRKCRTPLCWNEVGEALVFGPDILKSAEEQVKLIRERLKTAQNRQKNYADNRRRDLEFEKGDHVYLRVSPLRGMRRFGMSGKLAPRYIGPYLITARRGEVAYQLELPEGLADVHNVFHVSQLKKCLRVPEEQVPLGNIELEKNLTYKERPIKVLEKAERQTRRKTIKFYKVQWSNHSEDEATWEREDLLRAEFSELLP

SEQ ID NO: 20400 - protein, 1670 aa, Oryza sativa
  Clone ID: TF_OSC400028j.C1.p11.fg
MAVNSSFSSHGFGEGHHVAQLRDLARFLGFSCPEYTGYSVDRVPPHCELSVYLYPRGGIHGAGLRPHHFTVARPTLQIAYQDLSWTALRRLAHDYSHRLGGSAFRQLPRLPSGHSDARYPCPYSESQPVLTRMVELSEAQATQHDLLLEAYRSLARRYAALEARLAEEGVTSVDTISWDSGRLCHASHLSSHSSRGSARTPSGPRSPSSRAPYSPVYSPYPHPVSPSYTPGHTPVASSRRGPRFIRTARKRVVGSSTVFRFHYPAPPPPAARAAAGPRQTQILQGLAAAIAGFQHNTHGNGHPHMSNNRSKLTDFLRSRPPEFSQTVEPVEADDWLKDVDRKLNLVQCTPVEKTLYASHQLRGPAADWWENYCNAHPEPTNIAWDEFATAFRAAHMPESTIDMKKEEFNRLKQGNSSVNEYLSMFNKLARYAPEEVDTDKKKIRKFLKGIAVGMRLQLLAHDFPTFQHMINKALLLEDARKEAIEEYKKRKSNHQGNSSRGAPRPRYGQPMQYHQSVTQANRQPGYAPRPQMNHPAPQPQQRAPSGNTAPNSVTSFKSPQGPSAVQCFRCNQMGHYARQCPQNPTNTNSVHANGSTARTPTPATAQSRPSSQASGQGSRASNHFGRGRVNHIQAETAQDAPDVVMGMFSVNSVPAIVLFDSGASHSFISQAFVKRNGWKTQNLRVPMIVHSPGRNIRATQICPEVNLKIEEVDFLAKPIVLDSQSLDIILGMDWLAKHKGQIDCAEKSITLQGPGGKQVRFTPNTPTASRSILTCLQVTSLESVPIVCEYPDVFPEELTSMPPDREIEFAIELAPGTAPIAKRPYRMAANELAEVKRQIEELESKGYVRPSSSPWGAPVLLVKKKDGSERMVIDYRALNEVTIKNKYPLPRIDDLFDQLKGARVFSKIDLRSGYHQLKIRSEDIPKTAFSTRYGLYEFTVMSFGLTNAPAFFMNLMNKIFMEYLDQFVVVFIDDILIYSKNEEEHAEHLRLIMEKLRDHQLFAKFSKCKFWLDRVAFLGHVISSHGVEVDPSKVEAVLAWNPPKNVSEIRSFLGLAGYYRRFIEVFSKLARPMTELLKKENKFHWSASCEDSFQEMKKRLTTAPVLTLPDIRKDFEIFCDASRQGLGCVLMQERKVVAYASRQLRPHEVNYPTHDLELAAVVHALKIWRHYLIGNRCEVYTDHKSLKYIFTQTELNMRQRRWLELIKDYDLGIHYHPGKANVVADALSRKAYCNVAQIRPDHDHLCRELEKLRLTVVQSGVPASLTVQPTLESQIREAQKDNEGIKELIKRNTGEERHQFLHRRSRHSLKELRDLILKEAHESAYSIHPGSTKMYQDIKAYFWWAGMKRDVAEYVALCDICQRVKAEHQRPAGLLQPLPIPEWKWEEIGMDFITGLPRTPNGYDSIWVIVDRLTKSAHFVPVKTTFDGKKLAELYMTHVVCRFGCPKKIVSDRGTQFTSRFWKQLHEALGTDLKFSTAYHPQTDGQTERVNQILEDMLRACALDFEGTWDRCLPYAEFSYNNSYQASIQMSPNEAMFGRKCRTPLCWNEVGEALLAPRYIGPYLITARRGEVAYQLELPEGLADVHNVFHVSQLKKCLRVPEEQVPLGNIELEKNLTYKERPIKVLEEAERQTRRKTIKFYKVQWSNHFEDEATWEREDLLRAEFPELLP

SEQ ID NO: 20401 - protein, 1829 aa, Oryza sativa
  Clone ID: TF_OSC400049j.C1.p32.fg
MPTVMGGCEMAVNASFSSHGFGEGHHVAQLRDLARFLGFSCPEYTGYSVDRVPPHCELSVYLYPRGGIHGAGLRPHHFIVARPTLQIAYQDLSWTALRRLAHDYSHRLGGSAFRQLPRLPSGHSDARYPCPYSESQPVLTRMVELSEAQATQHDLLLKAYRSLARRYAALEARLAEEGVTSVDTISWDSGRLCHASHLSSHSSRGSARTPSGPRSPSSRAPYSPVYSPYPHPVSPSYTPGHTPVASSRRGPCFIRTARKRVVGSSTVFRFHHLAPPPPAMASRPRRAACAPARFGFEEGRVKPEANHESANEQSHRSNRSHRTVSRNAKVEQPCRSNRSHRTASRDVEMEQSHRSHRTASHNSGEECLPSPHHVENNMQHLMAVQTQILQGIAAAVAGYKHNSHGNGHPHMGNNRSKLTDFLRSRPPEFSQTVEPVEADDWLKDVDRKLNLVQCTPVEKTLYASHQLRGPAANWWENYCNAHPEPTNIAWDEFATAFRAAHVPESTIDMKKEKFNRLKQGNSSVNEYLSMFNKLARYALEEVDSDKKKIRKFLKGIAVGMRLQLLAHDFPTFQHMINKALLLEDARKEATEEYKKRKSNHQGNSSRGAPRPRYGQPMQYHQSVTQANRQPGYAPRPQMNRSAPQPQQHAPSGNTAPNSVTSFKSPQGPSAVQCFRCNQMGHYARQCPQNPTNTNSGHANGSTARTPTPAAAQSRLSTQASGQGSRASNHFGRGCVNHIRAETAQDAPDVVMGMFSVNSVPAIVLFDSGASHSFISQAFVKRNGWKTQNLRVPMIVHSPGRNIRATQICPEVNLRIEEVDFLAKPIVLDSQSLDIILGMDWLAKHKGQIDCAEKSITLQGPGGKQVRFTPNTPTASRSILTCLQVTSLESVPIVCEYPDVFPEELTRMPPDREIEFAIELAPGTAPIAKRPYQMAANELTEVKRQIGELESKGYVRPSSSPWGAPVLLVKKKDGSERMVIDYRALNEVTIKNKYPLPRIDDLFDQLKGARVFSKIDLRSGYHQLKIRSEDIPKTAFSTRYGLYEFTVMSFGLTNAPTFFMNLMNKIFMEYLDQFVVVFIDDILIYSKNEEEHAEHLRLIMEKLRDHQLFAKFSKCEFWLDRVAFLGHVISSNGVEVDPSKVEAVLAWNPPKNVSEIRSFLGLAGYYRRFIEGFSKLARPMTELLKKEKKFRWSAACEDSFQEMKKRLTTAPVLTLPDIRKDFEIFCDASRQGLGCVLIQERKVVAYASRQLRPHEVNYPTHDLELAAVVHALKIWRHYLIGNRCEVYTDHKSLKYIFTQTELNMRQRRWLELIKDYDLGIHYHPGKANVVADALSRKTYCNVAQIRPDQDHLCRELEKLRLTVVQSGVPASLTVQPTLESQIREAQKDDEGIKELIKRIQEKKDTNFSIDNQGTVWCGPRICVPAKKELRDLILKEAHESAYSIHPGSTKMYQDIKAYFWWAGMKRDVAEYVALCDICQRVKAEHQRPAGLLQPLPIPEWKWEEIGMDFITGLPRTPNGYDSIWVIVDRLTKSAHFVPVKTTFDGKKLAELYMTHVVCRFGCPKKIVSDRGTQFTSRFWKQLHEALGTDLNFSMAYHPQTDGTWDRCLPYAEFSYNNSYQASIHMSPNEAMFGRKCHTPLCWNEVGEALVFGPDILKSAEEQVKLIRERLKTAQNRQKSYADNRRRDLEFEKGDHVYLRVSPLRGMRRFGMSGKLAPRYIGPYLITARRGEVAYQLELPEDLADVHNVFHVSQLKKCLRVPEEQVPLGNIVLEKNLTYKERPIKVLEEAERQTRRKTIKFYKVQWSNHSEDEATWEREDLLRAEFPELLP

SEQ ID NO: 20402 - protein, 1694 aa, Oryza sativa
  Clone ID: TF_OSC400197j.C1.p6.fg
MAVNASFSSHGFGEGHHVVQLRDLARFLGFSCSEYTGYSVDRVPPHCELSVYLYPRGGIHGAGLRPHHFTVARPTLQIAYQDLSWTVLRRLAHDYSHRLGGSAFRQLPRLPSGHSDARYPCPYSESQPVLTRMVELSEAQATQHDLLLEAYRSLARRYAALEARLAEEGVTSVDTISWDSGRLCHASHLSSHSSRGSARTPSGPRSPSSRAPYSPVYSPYPHPVSPSYTPGHTPVASSRHGPRFIRTARKRVVGSSTVFRFRHPAPPPMASRPRRAARAPARFGFEDGRVEAEANHESANEQSHHSNRSHRTVFRNAEVEQPHRSNRSHRTVFRNAEMEQSHRSHRTASHNSGEERLPSPPHVENNMQHIMAVQTQILQGLTTAIASFQHNAHGNGHPHVGNNRSKLTDFLRSHPPEFSQTVEPVEADDWLKDVDRKLNLVQCTPVEKTLYASHQLRGPAADWWENYCNAHPEPTNIAWDEFATAFRAAHVPESTIDMKKEEFNRLKQGNSSVNEYLSMFNKLARYAPEEVDTDKKKIRKFLKGIAVGMRLQLLAHDFPTFQHMINKALLLEDARKEATEEYKKRKSNHQGNSSRGAPRPRYGQPMQYHQSVTQANRQPGYAPRPQMNRPAPPPQQRAPSGNTAPNSVTSFKSPQGPSAVQCFRCNQMGHYARQCPQNPTNTNSGHANGSTARTPTPVAAQSRPSSQASGQGPRASNHFGRGRVNHIQAETAQDAPDVVMVCEYPDVFLEELTRMPPDREIEFAIELAPGTAPIAKRPYRMAANELAEVKRQIEELESKGYVRPSSSPWGAPMLLVKKKDGSERMVIDYRALNEVTIKNKYPLLRIDDLFDQLKGARVFSKIDLRSGYHQLKIRSEDIPKTAFSTRYGLYEFTVMSFGLTNALAFFMNLMNKIFMEYLDQFVVVFIDDILIYSKNEEEHAEHLRLIMEKLRDHQLFAKFSKCEFWLDRVAFLGHVISSNGVEVDPSKVEAVLSWNPPKNVSEIRSFLGLAGYYRRSIEGFSKLARPMTELLKKEKKFQWSAACEDSFQEMKKRLTTAPVLTLPDIRKDFEIFCDASRQGLGCVLMQERKVVAYASRQLRPHEVNYPTHDLELAAVVHTLKIWRHYLIGNRCEVYTDHKSLKYIFTQTELNMRQRRWLELIKDYDLGIHYHPGKANVVADALSRKAYCNVAQIRPDQDHMCRELEKLRLTVVQSGVPASLTVQPTLESQIQEAQKDDEGIKELIKRIQEKKDTNFSIDDQGTVWCGPHICVPAKKELRDLILKEAHESAYSIHPGSTKMYQDIKAYFWWAGMKRDVAEYVALCDICQRVKAEHQRPAGLLQPLPIPEWKWEEIGMDFITGLPRTPSGYDSIWVIVDRLTKSAHFVPVKTTYDGKKLAELYMTHVVCRFGCPKKIVSDRGTQFTSRFWKQLHEALGTDLNFSTAYHPQTDGQTERVNQILEDMLRACALDFEGTWDRCLPYAEFSYNNSYQASIQMSPNEAMFGRKCRTPLCWNEVGEALVFGPDILKSEEEQVKLIRERLKTTQNRQKNYADNRRRDLEFEKGDHVYLRVSPLRGMRRFGMSGKLAPRLITARRGEVAYQLELPEGLADVHNVFHVSQLKKCLRVPEEQVPLGNIELEKNLTYKERPIKVLEEAERQTRRKTIKFYKVQWSNHSDDEATWEREDLLRAEFPELLS

SEQ ID NO: 20403 - protein, 1851 aa, Oryza sativa
  Clone ID: TF_OSC400239j.C1.p3.fg
MAVNASFSSHGFGEGHHVAQLRDLARFLGFSCPEYTGYSVDRVPPHCELSVYLYPRGGIHGVGLRPHHFTVARPTLQIAYQDLSWTALRRLAHDYGHRLGGSAFRQLPRLPSGHADARYPCPYSESQPVLTRMVELSEAQATQHDLLLEAYRSLARRYAALEARLAEEGVTSVDTISWDSGRLCHASHLSSHSSRGSARTPSGPRSPSSRAPYSPVYSPYPHPVSPSYTPGHTPVASSRRGPRFIRTARKRVVGSSTVFRFRHPAPPPPAARAAAGPRQMASRPRRTARAPVRFGFEDGRVEAEANHEPANEHSHHSNRSHRTVSRNAEVEQPRRSSRSHRTVSREAELEQSHRSHRTASHNSGEERLPSPPHVENNMQHIMAVQTQILQGLTTAIASFQHNAHGNGHPHVGNNRSKLTDFLRSRPPEFSQTIEPVEADDWLKDVDRKLNLVQCTPVEKTLYASHQLRGPAADWWENYCNAHPEPTNIAWDEFATAFRVAHVPESTIDMKKEEFNRLKQGHSSVNEYLSQFNKLARYAPEEVDTDKKKIRKFLKGIAVGMRLQLLAHDFPTFQHMINKALLLEDARKEATEEYKKRKSNHQGNSSRGAPRPRYGQPMQYHQSVTQANRQSSYAPRPQMNRPAPPPQQRAPSGNTAPNSVTSFKSPQGPSAVQCFRCNQMGHYARQCPQNPTNTSPGHANGSTARTPTPAAAQSRPSSQASGQGSRASNHFGRGRVNHIQAETAQDAPDVVMGMFSVNSVPAIVLFDSGASHSFISQAFVKRNGWKTQNLRVPMIVHSPGRNIRATQICPEVNLRIEEVNFLAKPIVLDSQSLDIILGMDWLAKHKGQIDCAEKSITLQGPGGKQVRFTPNTPTASRSILTCLQVTSLESVPIVCEYPDVFPEELTRMPPDREIEFAIELAPGTAPIAKRPYRMAANELAEVKRQIEELESKGYVRPSSSPWGAPVLLVKKKDGSERMVIDYRALNEVTIKNKYPLPRIDDLFDQLKGARVFSKIDLRSGYHQLKIRSEDIPKTAFSTRYGLYEFTVMSFGLTNAPAFFMNLMNKIFMEYLDQFVVVFIDDILIYSKNEEEHAEHLRLIMEKLRDHQLFAKFSKCEFWLDRVAFLGHVISSNGVEVDPSKVEAVLAWNPPKNVSEIRSFLGLAGYYRRFIEGFSKLARPMTELLKKEKKFQWSTACEDSFQEMKKRLTTAPVLTLPDIRKDFEIFCDASRQGLGCVLMQERKVVAYASRQLRPHEVNYPTHDLELAAVIHALKIWRHYLIGNRCEVYTDHKSLKYIFTQTELNMRQRRWLELIKDYDLGIHYHPGKANVVADALSRKAYCNIAQIRPDQDHLCRELEKLRLTVVQSGVPASLTVQPTLESQIREAQKDDEGIKELIKRIQEKKDTNFSIDDQGTIWCGPRICVPAKKELRNLILKEAHESAYSIHPGSTKMYQDIKAYFWWAGMKRDVAEYVALCDICQRVKAEHQRPAGLLQPLPIPEWKWEEIGMDFITGLPRTPSGYDSIWVIVDRLTKSAHFVPVKTTYDGKKLAELYMTHVVCRFGCPKKIVSDRGTQFTSRFWKQLHEALGTDLNFSTAYHPQTDGQTERVNQILEDMLRACALDFEGTWDRCWPYAEFSYNNSYQASIQMSRNEAMFGRRCRTPLCWNEVGEALVFGPNILKSAEEQVKLIRERLRTAQNRQKNYADNRRRDVEFEKGDHVYLRVSPLRGMRRFGMSGKLAPRYIGPYLITARRGEVAYQLELPEGLADVHNVFHVSQLKKCLRVPEEQVPLGNIELEKNLTYKERPIKVLEEAERQTRRKTIKFYKVQWSNHSEDEATWEREDLLRAEFPELLP

SEQ ID NO: 20404 - protein, 1199 aa, Oryza sativa
  Clone ID: TF_OSC400259j.C1.p3.fg
MGNNRSKLTDFLRSRPPEFSQTVEPVEADDWLKDVDRKLNLVQCTPVEKTLYASHQLSGPAADWWENYCNAHPEPTNIAWDEFATAFRAAHVPEITIDMKKEEFNRLKQGNSSVNEYLSQFNKLARYAPEEVDTDKKKIRKFLKGIAVGMRLQLLAHDFPTFQHMINKALLLEDARKEATEEYKKRKSNHQGNSSRGAPRPRYGQPMQYHQSVTQANRQPGYAPRPQINRPAPQPQQRAPSSDTAPNSVTSFKSPQGPSAVQCFRCNQMGHYARQCPQNPTNTNSGHANGSTARTPTPAAAQSRPSSQASGQGSRASNNFGRGRVNHIQAETAQDAPDVVMGPGGKQVRFTPNTPTASRSILTCLQVTSLESVPIVCEYPDVFPEELTRMPPDREIEFAIELAPGTAPIAKRPYQMAANELAEVKRQIEELESKGYVRPSSSPWGAPVLLVKKKDGSERMVIDYRALNEVTIKNKYPLPRIDDLFDQLKGARVFSKIDLRSGYHQLKIRSEDIPKTTFSTRYGLYEFTVMSFGLTNAPAFFMNLMNKIFMEYLDQFVVVFIDDILIYSKNEEEHAEHLRLIMEKLRDHQLFAKFSKCEFWLDRVAFLGHVISSNACEDSFQELKKKLTTAPVLTLPDIRKYFEIFCDASRQGLGCVLMQEQKVVAYASRQLRPHEANYPTHDLELAAVVHALKIWRHYLIGNRCEVYTDHKSLKYIFTQTELNMRQRRWLELIKDYDLGIHYHPGKANVVADALSRKAYCNVAQIRPDQDHLCRELEKLRLTVIQSGVPASLTVQPTLESQIREAQKDDEGIKELIKRIQEKKDTNFSIDDQGTVWCGPRICVPAKKELRDLILKEAHESAYSIHPGSTKMYQDIKAYFWWAGMKRDVAEYVALCDICQRVKAEHQRPAGLLQPLPIPEWKWEEIGMDFITGLPRTPNGYDSIWIWLSQENCVRPRHSVHLKVLNFSTAYHPQTDGQTERVNQILEDMLRACALDFEGTWDRCLPYAEFSYNNSYQASIQMSPNEAMFGRKCRTPLCWNEVGKALVFGPDILKSAEEQVKLIRERLKTAQNRQKNYADNRRRDLEFEKGDHVYLRVSPLRGMRRFGMSGKLAPRYIGPYLITARRCEVAYQLELPEGLANVHNVFHVSQLKKCLRVPEEQVPLGNIELEKNLTYKERPIKVLEEAERQTRRKTIKLYKV

SEQ ID NO: 20405 - protein, 1640 aa, Oryza sativa
  Clone ID: TF_OSC400530j.C1.p1.fg
MAVNASFSSHGFGEGHHVAQLRDLARFLGFSCPEYTGYSVDRVPPHCELSVYLYPRGGIHGAGLCPHHFTVARPTLQIAYQDLSWTALRRLAHDYSHRLGGSAFRQLPHLPSGHSDARYPCPYSESQPVLTRMVELSEAQATQHDLLLEAYRSLARRYAALEARLAEEGVTSVDTISWDSGRLCHASHLSSHSSRGSARTPSGPRSPSSRAPYSPVYSPYPHPVSPSYTPGHTPVASSRRGPRFIRTARKRVVGSSTVFRFHYPAPPPPAARAAAGPRQMASRPRRAARAPARFGFEDGRVEPEENHESANEQSHHSNRSHRTVSRNTEVEQPRRSSRSHRTVSRDAEMEQSHRSHRTASHNSGEERLPSPPHVETNMQHLMAVQTQILQGLTTAIASFQHNAHGNGHPHMGNNRSKLTDFLRSRPLEFSQTVEPVEADDWLKDVDRKLNLVQCTPVEKTLYASHQLRGPTADWWENYCNAHPEPTNIAWDEFATAFRAAHVPESTIDMKKEEFNRLKQGNSSVNEYLSQFNKLARYAPEEVDTDKKKIRKFLKEIAVGMRLQLLAHDFPTFQHMINKALLLEDARKEATEEYKKRKSNHQGNSSRGAPRPRYGQPMQYHQSVTQANRQPGYAPRPQINRPAPQPQQRAPSSDTAPNSVTSFKSPQGPSAVQCFRCNQMGHYARQCPQNPTNTNSGHANGSTARTPTPAAAQSRPSSQASRQGSRASNHFGRGRVNHIQAETAQDAPDAVMGMFSVDSVPAIVLFDSGASHSFISQAFVKRNGWKTQKLRVPMIVHSPGRNIRATQICPEVNLRIEEVDFLAKPIVLDSQSLDIILGMDWLAKHKGQIDCAEKSITLQGPAGKQVRFTPNTPTASRSILTCLQVTSLESVPIVYEYPDVFLEELTRMPPDREIEFAIELAPGTAPIAKRPYRMAANELAEVKRQIEELESKGYVRPSSSPWGAPVLLVKKKDGSERMVIDYRALNEVTIKNKYPLPRIDDLFDQLKGARVFSKIDLRSGYHQLKIRSEDIPKTAFSTRYGLYEFTVMSFGLTNAPAFFMNLMSKIFMEYLDQFVVVFIDDILIYSKNEEEHAEHLRLIMEKLRDHQLFAKFSKCEFWLDRVAFLGHVISPNGVEVDPSKVEAVLAWNPPKNVSEIRSFLGLAGYYRRFIEGFSKLARPMTELLKKEKKFQWSAACEDSFQEMKKRLTTAPVLTLPDIRKDFEIFCDASRQGLGCVVMQERKVVAYASRQLRPHEVNYPTHDLELAAVVHALKIWRHYLIGNRCEVYTDHKSLKYIFTQTELNMRQRRWLELIKDYDLGIHYHPGKANVVADALSRKAYCNVAQIRPDQDHLCRELEKLRLTVVQSGVPASLTVQPTLESQIREAQKDDEGIKELIKRIQEKKDTNFSIDDQGTVWCGPRICVPAKKELRDLILKEAHESTYSIHPGSTKMYQDIKAYFWWAGMKRDVAEYVALCDICQRVKAEHQRPAGLLQPLPIPEWKWEEIGMDFITGLPRTPNGYDSIWVIVDRLTKSAHFVPVKTTYDGKKLAELYMTHVVCRFGCPKKIVSDRGTQFTSRFWKQLHEALGTDLNFSTAYHPQTDGQTERVNQILEDMLRACALDFEGTWDRCLPYAEFSYNNSY

SEQ ID NO: 20406 - protein, 1732 aa, Oryza sativa
  Clone ID: TF_OSC400630j.C1.p10.fg
MASRPRRAARAPARFGFEDGRVEAEANHESANEQSHHSNRSHHTVSRNAEVEQPRRSNRSHRTVFRNAEMEQSHRSHRTASHNSGEERLPSPPHVENNMQHLMAVQTQILQGLTTAIASFQHNAHGNGHPHVGNNRSKLTDFLRSRPPEFSHTVEPVEADDWLKDVDRKLNLVQCTPVEKTLYASHQLRGPAADWWENYCNAHPEPTNIAWDEFAMAFRTAHVPESAIDMKKEEFNRLKQGNSSVNEYLSMFNKLARYAPEEVDTDEKKIRKFLKGIAVGMRLQLIAHDFPTFQHMINKALLLEDARKEATEEYKKRKSNHQGNSSRGAPRPRYGQPMQYHQSVTQANRQPGYAPRPQMNRPAPQPQQRAPSGNTAPNSVTSFKSPQGPTVVQCFRCNQMGHYARQCPQNPTNTSSGHANGSTARTPTQRQLSLVLALRQVDKDASDIVMGMFSVNSIPAIVLVDSGASHSFISQAFVKRNGWKTQNLRVPMIVHSPGRNIRATQICPEVNLRIEEVDFLAKPIVLDSQSLDIILGMDWLAKYKGQIDCAEKSITLQGPGGKQVRFTPNTPTASRSILTCLQVTSLESVPIVCEYPDVFPEELTRMPPDREIEFAIELAPGTAPIAKRPYRMAANELAEVKRQIEELESKGFVRPSSSPWGAPVLLVKKKDGSERMVIDYRALNEVTIKNKYPLPRIDDLFDQLKGARVFSKIDLRSGYHQLKIRSEDIPKTAFSTRYGLYEFTVMSFGLTNAPAFFMNLMNKIFMEYLDQFVVVFIDDILIYSKNEEEHAEHLRLIMEKLRDRQLFAKFSKCEFWLDRVAFLGHVISSNGVEVDPSKVEAVLAWNPPKNVLEIRSLLGLAGYYRRFIKGFSKLARPMTELLKKEKKFQWSAACEDSFQEMKKRLTTAPVLTLPDIRKDFEIFCDASRQGLGCVLMQERKVVAYASRQLRPHEVNYPTHDLELAAVVHALKIWRHYLIGNRCEVYTDHKSLKYIFTQTELNMRQRRWLELIKDYDLGIHYHPGKANVVADALSRKAYHNVAQIRPDQDHLCRELEKLRLTVVQSGVPASLTVQPTLESQIREAQKDDEGIKELIKRIQEKKDTNFSIDNQGTVWCGPRICVPAKKELRDLILKEAYESAYSIHPGSTKMYQDIKAYFWWAGMKRDVAEYVALCDICQRVKAEHQRPAGLLQPLPIPEWKWEEIGMDFITGLPRTPNGYDSIWVIVDRLTKSAHFVPVKTTFDGKKLAELYMTHVVCRFGCPKKIMSDRGTQFTSRFWKQLHEALGTDLNFSTAYHPQTDGQTERVNQILEDMLRACALDFEGTWDRCLPYAEFSYNNSYQASIQMSPNEAMFGRKCRTPLCWNEVGEALAFGPDILKSAEEQVKLIRERLKTAQDRQKSYANNRRRDLEFEKGDHVYLRVSPLRGMRRFGMSGKLAPRYIGPYLITARRGEVAYQLELPEGLADVHNVFHVSQLKKCLRVPEEQVPLGNIVLEKNLTYKERPTKVLEEAEHDIIVASSTQSAVSALLQDLKEDFALKDLGDLHYFLGIEVNKVNDGLLLSQGKYTADLLKKTNMSDCKPFNTPLSTSEKLSLHEGDLLGSSDATQYRSIVGALQYLTLTRPDISFSVNKVCQFLHAPTTVHWATVKRILRYLKYTASLGLKFEKSKSGLVSAFTDADWAGSLDDRRSTGGFAIYLGSNLVSWSARKQATVSRSSTEAEYKALANVTAELMWI

SEQ ID NO: 20407 - protein, 1689 aa, Oryza sativa
  unsure (1)..(1689): unsure at all Xaa locations
  Clone ID: TF_OSC400662j.C1.p1.np
MTVLLLYNKETSVAVIFYLPVIPALFPGTGIDXQMAVNASFSSHGFGEGHHVAQLRDLARFLGFSCPEYTGYSVDRVPPHCELSVYLYPRGGIHGAGLRPHHFTVARPTLQIAHRLGGSAFRQLPRLPHRLGGSAFRQLPRLPSGHSDARYPCPYSESQPVLTRMVELSEAQATQHDLLLEAYRSLARRYAALEARLAEEGVTSVDTISWDSGRLCHASHLSSHSSRGSARTPSGPRSPSSRAPYSPVYSPYPHPVSPSYTPGHTPVASSRRGPRFIRTARKRVVGSSTVFRFHYPAPPPPAARAAAGPRQVPPVPSRQPIDVSSTEEPTTGARFGFEDGRVEAEANHESANEQSHHSNRSHRTISRNAEVEQPRRSNRSHRTASRDAEMEQSHRSHRTASHNSGEERLPSPPHVENNMQHLMAVQTQILQGIAAAVAGYQHNAHGNGHPHMGNNRSKLTDFLRSRPPEFSQTVEPVEADDWLKDVNRKLNLVQCTPVEKTLYASHQLRGPAADWWENYCNAHPEPTNIAWDEFATAFCAAHVPESTIDMKKEEFNRLKQGNSSVNEYLSMFNKLARYAPEEVDSDKKKIRKFLKGIAALLLEDARKEATEEYKKRALLLEDARKEATEEYKKRKSNHQGNSSQGAPRPRYGQPMQYHQSVTQANRQPGYAPRPQMNRPAPQPQQRAPSGNIAPNSVTSFKSPQGPSAVQCFRCNQMGHYARQCPQNPTNTNSGHANGSTARTPTPAAAQSRPSTQASGQGSRASNHFGRGRVNHIQAETAQDAPDVVMGMFSVNSVPAIVLFDSGASHSFISQAFVKRNGWKTQNLRVPMIVHSPGRNIRATQICPEVNLRIEEIDFLAKPIVLDSQSLDNILGMDWLAKHKGQIDCAEKSITLQGPGGKQVRFTPNTPTASRSILTCLQVTSLESVPIVCEYPDVFPEELTRMPPDREIEFAIELAPGTAPIAKKPYRMAANELAEIKRQIEELESKGYVRPSSSPWGAPVLLVKKKDGSERMLKIRSEDIPKTAFSTRYGLYEFTVMSFRLTNAPAFFMNLMNKIFMEYLDQFVVVFIDDILIYSKNEEEHAEHLRLIMEKLRDHQLFAKFSKCEFWLVRVAFLGHVISSNGVEVDPSKVEAVLAWNPPKNVSEIRSFLGLAGYYRRFIEGFSKLARPMTELLKKEKKFQWSAACEDSFQEMKKRLTTAPVLTLPDIRKDFEIFCDASRQGLGCVLMQERKVVAYASRQLRPHEVNYPTHDLELAAVVHALKIWRHYLIGNRCEVYTDHQSLKYIFTQTELNMRQRRWLELIKDYDLGIHYHPGKAKVVADALSRKAYHNVAQIRPDQDHLCRELEKLRLTVVQSGVPASLTVXPTLESQIREAQKDDEGIKELIKGIQEKKDTNFSIDNQGTVWCGPRICVPAKKELRDLILKEAHESAYSIHPGSTKMYQDIKAYFWWAGMKRDVTEYVALCDICQRVKAEHQRPVGLLQPLPTPEWKWEEIGMDFITGLPRTPNGYDSIWVIVDRLTKSAHFVPVKITYDGKKLAELYMTYVVCRFGCPKKIVSDRGTQFTSSYQASIQMSPNEAMFGRKCRTPLCWNEVGEALVFGPDILKSAEEQVKLIRERLKTARQKNYADNRRCDLEFEKGDHVYLRVSPLRALASKGQTGSGRPRSVPPRARDPPRAVRLRVGPPHL

SEQ ID NO: 20408 - protein, 1663 aa, Oryza sativa
  Clone ID: TF_OSC400702j.C1.p32.fg
MTVLLLCNKETSVAMIFCLPVIPALFPGTGIDEQMAVNASFSSHGFGEGHHVAQLRDLARFLGFSCPEYTGYSVDRVPSRYELSVYLYPRGGIHGAGLRPHHFTVARPTLQIAHRLGGSAFRQLLRLPSGRTDTRYPCPYSESQPVLTRMVELSEAQATQHDLLLEAYRSLARRYAALEARLAEEGVTSVDTASWDLGRLCHASHLSSHSSRGSVRTPSGPRTPSSRVPYSPVHSPYPHPVSPSYTPGHTPVASSCRGPRFIRTVRKRVVGSSTVFRFDHPARPPPAARAAAGPRQVPPISSRQPIDVSSTEEPTTGAHFGFEEGRVEPEANHESANEQSHHSNRSHHTASRNAEVEQPHRSNRSHRTVSRNAEVEQSHRSPRAAIHNSREERIPSPPHVENNMQHLMAVQTQILQGLATAIAGIQHNAHGNGHPHTGNNRSKLTDFLRSRPPEFSQTVEPVEADDWLKDVERKLNLVQCTPVEKTLYASHQLRGPAADWWENYCNAHPEPTNIPWDEFAAAFRAAHVPESTIDMKKEEFNRLKQGNTSVNEYMSQFNKLARYAPEEVDTDKKKIRKFLKGVTHMINKRLLLEDARKEATEEYKKRKSTHQGNSSRGEPRPRFGQPMQYHQSVTQANRQPSYAPRPQMNRLAPQPQQRAPSGNTAPNSVTSFKSPPGLSAVQCFRCNQMGHYARQCPQNLTNSNSGHTNGSTARTPTPAAAQSRPSTQASGQGSRASNNFGRDRVNHIQAETAQDAPDVVMGMFSVNSAPAIVLFDSGASHSFISQAFVKRNGWKTQNLRVPMIVHSPGRDIRATKICSEVNLRIEEVDFLAKPIVLDSQSLDIILGMDWLAKHKGQIDCAERSITLQGPGGKQVRFTPNTLTASRSILTSLQATSLESVPIVCEYPDVFPKELTEMPPNREIEFAIELALGTAPIAKSPYRMAANELAEVKKQIEELESKGYVRPSSSPWGAPVLLVKKKDGSERMLKIRYEDIPKTAFSTRYGLYEFTVMSFGLTNAPAFFMNLMNKIFMEYLDQFVVVFIDDILIYSKNEEEHVEHLRLIMEKLRDHQLFAKFSKCEFWLDRVAFLGHVISSNGVEVDPSKVEAVLAWYPPKNESEIRSFLGLAGYYRRFIEGFSKLARPMTELLKKEKKFEWSAACEDSFQEMKKRLTTAPVLTLPDIRKDFEIFCDASRQGLGCVLMQERKVVAYASRQLRPHEVNYPTHDLELAAVVHALKIWRHYLIGNRCEVYTDHKSLKYIFTQTELNMRQRRWLELIKDYDLGIHYHPGKANVVADTLSRKTYCNAAQIWPDQDRLCRELEKLRLTVVQSGVPASLTVQPTLESQIREAQKDDEGIKELIKRIQKMKDTDFSIDDQGTVWCGPRICVPAKKELRDLILKEAHESAYSIYPGSTKMYQDIKAYFWWVGMKRDVAEYVALCDICQRVKAEHQRPAGLLQPLPIPEWKWEEIGMDFITGLPRTPSGYDSIWVIVDRLTKSAHFVPAKTTFDGKKLAELYMTHVVCRFGCPKKIVSDRGTQFTSSYQASIQMSPNEAMFGRKCRTPLCWNKVGEALVFGPDILKAAEEQVKLIRQCLKTTQNRQKNYADNRRRDLEFEKGDLVYLRVSPLRGMRRFGMSGKLAPRYIGPYLITARRGVTPRTSPERN

SEQ ID NO: 20409 - protein, 1322 aa, Oryza sativa
  Clone ID: TF_OSC400719j.C1.p29.fg
MASRPRRAAHAPARFGFEQGRVEPEANHESANEQSHHSNRSHHTVSRNAEIEQPHRSNRSHHTASRNAEVEQSHRSHRTASHNSGEERLPSPPHVENNMQHLMAVQTQIVQGLAAAIAGFQHNAHGNGHPHRGNNRSKLTDFLRSRPPEFSQTVKPAEADDWLKDVDRKLNLVQCTPVEKTLYASHQLRGPAADWWENYCNAHPEPTNIAWDEFVMAFHAAHVPKSTIDMKKEEFNRLKQGNNSVNEYLSQFNKLARVTSFKSPLGPSAVQCFRCNQMGHYARQCPQNPTNTNSGHANGSTARTPTPAAAQSRPSSQASGQGSRASNNFGRGRVNHIQAETAQDAPDVVMGMFSVNSVPAIVLFDSGASHSFISQAFVKRNGWKTQNLRVPMIVHSPGRNIRATQIYPEVNLRIEEVDFLAKPIVLDSQSLDIILGMDWLAKHKGQIDCAEKSITLQGPGGKQVRFTSNTPTASRSILTYLQVTSLESVPIVCEYPDVFPEELTSMPSDREIEFAIELAPGTAPIAKRPYRMAANELAEVKRQIEELESKGYHQLKIRSEDIPKTAFSTRYGLYEFTVMSFGLTNAPAFFMNLMNKIFMEYLDQFVVVFIDDILIYSKNEEEHAEHLMLIIEKLRDHQLFAKFSKCEFWLDRVAFLGHVISSNGVEVDPSKVEAVLAWNPPKNVSEIRSFLGLAGYYRRFIEGFSKLARPMTELLKKEKKFQWSTACEDSFQEMKKRQGLGCVLMQERKVVAYASRQLRPHEVNYPTHDLELAAVVHALKIWRHYLIGSRCEVYTDHKSLKYIFTQTELNMRQRRWLELIKDYDLGIHYHPGKANVVADALSRKTYCNVAQIWPDQDHLCRELEKLRLTVENKGTDFSIDDQGTVWCGPRICVPAKKELRDLILKEAHESAYSIHPGSTKMYQDIKAYFWWAGMKRDVAEYIALCDICQRVKAEHQRPAGLLQPLPIPEWKWEEIGMDFITGLPRTPSGYDSIWVIVDRLTKSAHFVPVKTTFDGKKLAELYMTHVVCRFGCPKKIVSDRGTQFTSRFWKQLHEALGTDLNFSTAYHPQTDGQTERVNQILEDMLRACALDFEGTWDRCLPYTEFSYNNSYQASIQMSPNEAMFGRKCRTPLCWNEVGEALVFGPDMLKAAEEQVKLIRERLKTSQNCQKNYADNRRRDLEFEKGDHVYLRVSPLRGMRRFGMSGKLAPRYIGPYLITARRGEVAYQLELPEGLADVHNVFHVSQLKKCLRVPEEQVPLGNIELEKNLAYKERPIKVLEEAERQTRRKTIKFDKVQWSNHSEDEATWEREDLLRAEFPELLP

SEQ ID NO: 20410 - protein, 1851 aa, Oryza sativa
  Clone ID: TF_OSC400741j.C1.p10.fg
MAVNASFSSHGFGEGHHVAQLRDLARFLGFSCPEYTGYSVDRVPPHCELSVYLYPRGGIHGAGLRPHHFTVARPTLQIAYQDLSWTALRRLAHDYSHRLGGSAFRQLPRLPSGHSDARYPCPYSESQPVLTRMVELSEAQATQHDLLLEAYRSLARRYAALEARLAEEGVTSVDTISWDSGRLCHASHLSSHSSRGSARTPSGPRSPSSRALYSPVYSPYPHPVSPSYTPRHTPAASSRRGPRFIRTARKRVVGSSTGFRFHYPAPLPPAARAAAGPRQMASRPRRAARAPARFGFEDGRTEPEANHESANEQSHHSNRSHRTASRNAEVEQPRRSNRSHRTASRDAEMEQSHRSHRTASHNSGEERLSSPPHVENNMQHLMAVQTQILQGLAAAIAGFQHNTHGNGHPHISNNRSKLTDFLRSRPPEFSQTVEPVEADDWLKDVDRKLNLVQCTPVEKTLYASHQLRGPAADWWENYCNAHPEPTNIAWDEFATAFRTAHVPESAIDMKKEEFNRLKQGNSSVNEYLSMFNKLARYAPEEVDTDKKKIRKFFKGIVVGMRLQLIAHDFPTFQHMINKALLLEDARKEATEEYKKRKSNHKGNSSRGAPRPCYGQPMQYHQSVTQANRQPGYAPRPQMNRPAPQPQQRAPSGNTAPNSVTSFKSPQGPSAVQCFRCNQMGHYARQCPQNPTNTNSGHANGSTARTPTPAAAQSRPSSQASGQGSHVSNNFGRGRVNHIQAETAQDATDVVMGMFSVNSVPAIVLFDSGASHSIISQAFVKRNGWKTQNLRVPMIIHSPGRNIRATQICPEVNLRIEEVNFLAKPIVLDSQSLDIILGMDWLAKHKGQIDCAKKSITLQGPRGKQVRFTSNTPTTSRSILTCLQVTTLESVPIVCEYPDVFPEELTSMPPDREIEFAIKLAPGTAPIAKRPYRMAANELAEVKRQIEELESKGYVRPSSSPWGAPVLLVKKKDGSERMVIDYRALNEVTIKNKYPLPRIDDLFDQLKGARVFSKIDLRSGYHQLKIRSEDIPKTAFSTRYGLYEFTVMSFGLTNAPAFFMNLMNKIFMEYLDQFVVVFIDDILIYSKNEEEHAEHLRLIMEKLRDHQLFAKFSKCEFWLDRVAFLGHVISSNGVEVDPSKVEAVLAWNPPTNVSEIRSFLGLAGYYRRFIEGFSKLARPMTELLKKEKKFQWSVACEDSFQEMKKRLTTAPVLTLPDIRKDFEIFCDASRQGLGCVLMQERKVVAYASRQLRPHEVNYPTHDLELAAVVHALKIWRHYLIGNRCEVYTDHKSLKYIFTQTELNMRQRRWLELIKDYDLGIHYHPGKANVVADALSRKVYCNVAQIWPDQDRLCRELEKLRLTVVQSGVPASLTVQPTLESQIREAQKDDEGIKELIKRIQEKKDTNFSIDDQGTVWCGPRICVPAKKELRDLILKEAHESAYSIHPGSTKMYQDIKAYFWWAGMKRDVAEYVALCDVCQRVKAEHQKPAGLLQPLPIPEWKWEEIGMDFITGLPRTPSGYDSIWVIVDRLTKSAHFVPVKTTFDGKKLAELYMTRVVCRFGCPKKIVSDRGTQFTSRFWNQLHEALGTDLNFSTAYHPQTDGQTERVNQVLEDMLRACALDFEGTWDRCLPYAEFSYNNSYQASIQMSPNEAMFGRKCRTPLCWNEAGEALVFGPDILKTAEEQVKLIRERLKTAQNGQKNYADNRRRDLEFEKGDHVYLRVSPLRGMKRFGMSGKLAPRYIGPYLITARRGEVAYQLELPEGLADVHNVFHVSQLKKCLRVPEEQVPLGNIELEKNLTYKKRPIKVLEEAERQTRRKTIKFYKVQWSNHSEDEATWEQEDLLRAEFPELLP

SEQ ID NO: 20411 - protein, 1545 aa, Oryza sativa
  Clone ID: TF_OSC400773j.C1.p127.fg
MAVNASFSSHGFGEGHHVAQLRDLARFLGFSCPEYTGYSVDRVPPHCELSVYLYPRGGIHGAGLRPHHFTVARPTLQIAYQDLSWTALRRLAHDYSHRLGGSAFRQLPRLPSGHADARYPCPYSESQPVLTRMVELSEAQATQHDLLLEAYRSLARRYAALEARLAEEGVTSVDTISWDSGRLCRASHLSSHSSSGSARTPSGPRSPSSRAPYSPVYSPYPHPVSPSYTPGHTPVASSRRGPRFIRTARKRVVGSSTVFRFHYPAPPPPAPRAAAGPRQLRGPAVDWWENYCNAHPEPTNIAWDEFATAFRAAHVPESTIDMKKEEFNRLKQGNSNVNEYLSMFNKLARYAPEEVDTDKKKIRKFLKGIAVGMRLQLLAPDFPTFQHMINKALLLEDARKEATKEYKKRKSNHQGNSSRGAPRPRYGQPMQYHQSVTQANRQPGYTPRPQMNRPAPQPQQRAPSGNPAPNSVTSFKSPQGPSAVQCFRCNQMGHYARQCPQNPINTNSGHANGSTARTSTPAAAQSRPSSQASGQGSRASNNFGRGRVNHIQAETAQDAPDVVMGMFFVNSIPTIVLFDSGASHSFISQAFVKRNGWKTQNLRVPMIVHSPGRNIRATQICPEVNLRIEEVDFLAKPIVLDSQSLDIILGMDWLAKHKGQIDCAEKSITLQGPGGKQVRFTSNTPTASRSILTCLQVTTLESVPIVCEYPDVFPEELTGMPPDREVEFAIELAPGTAPIAKRPYRMAANELAEVKRQTEELESKGYFVVVFIDNILIYSKNEEEHAEHLRMIIEKLRDHQLYAKFLKCEFWLDRVAFLGHVISSNGVEVDPSKVEAVLAWNPPKNVSEIRSFLGLAGYYRRFIEGFSKLARPMTELLKKEKKFQWTAACEDSFQEMKKRLTTAPVLTLPDIQKDFEIFCDASRQGLGCVLMQERKVVAYASRQLRPHEVNYPTHDLELAAVVHALKIWRHYLIGNRCEVYTDHKSLKYIFTQTELNMRQRRWLELIKDYDLGIHYHPGKANVVADALSRKAYCNIAQIRPDQDRLCREMEKLRLTVVQSGVPASLTVQPTLESQIREAQKDDEGIRELIKRIQEKKDTNFSIDDQGTVWCGPRICVPAKKELRDLILKEAHESAYSIHLGSTKMYQDIKAYFWWAGMKRDVAEYVALCDICQRVKAEHQRPAGLLQPLPIPEWKWEEIGMDFITGLPRTPSGYDSIWVIVDRLTKSAHFVPVKTTFDGKKLVELYMTHVVCRFGCPKKIVSDRGTQFTSRFWKQLHEALGTDLNFSTAYHPQTDGQTERVNQILEDMLRACALDFEGTWDRCLPYAEFSYNNSYQASIQMSPNEAMFGRKCRTPLCWNEVGEALVFGPDILKAAEEQVKLIRERLKTAQNRQKNYADNRRRDLEFKKGDHVYLRVSPLRGMRRFGMSGKLAPRYIGPYLITARCGEVAYQLELPEGLADVHNVFHVSQLKKCLRVPEEQVPLGNIKLEKNLTYKERPIKVLEEAERQTRRKTTKFYKVQWSNHSEDKATWEREDLLRAEFPELLN

SEQ ID NO: 20412 - protein, 1542 aa, Oryza sativa
  Clone ID: TF_OSC400964j.C1.p53.fg
MAVNASFSSHGFGEGHHVAQLRDLARFLGFSCPEYTGYSVGRVPPHCELSVYLYPRGGIHGAGLAHTTSLWPGPLSRSRTRTSPGLRFVAWPTTTATVSGAPPSGSFHAFLLATQTPARAPARFGFEDGRAEPEVNHEQSPHSNRSHRTASRNAEVEQPRRSNRSHRTASCDAEMEQSHRSHHTASHNSGEERLPSPPHVENNMQHLMAVQTQILQGLAAAVAGFQHNAHGNGHPHMSNNRSKLTDFLRSRPPEFSQTVEPVEADDWLKDVDRKFNLVQCTPVEKTLYASHQLRGPAADWWENYCNAHPEPTNIAWDEFATAFRAAHVPESTIDMKKEEFNRLKQGNSNVNEYLSQFNKLARYAPEEVDTDKKKIRKFLKGIAVGMRLQLLAHDFPTFQHMINKALLLEDARKEATEEYKKRKSNHQGNSSRGAPRPRYGQPMQYHQSVTQANRQPGYAPRPQMNRPAPQPQQRAPSGNTAPNSVTSFKSPQGPSAVQCFRCNQMGHYARQCPQNPTNTSSGHANGSTARTPTPAAAQSRPSSQASGQGSHASNNFGRGRVNHIQAETAQDAPDVVMGMFSVNSIPAIVLFDSGASHSFISQAFVKRNGWKTQNLRVPMIVHSPGRDIRATQICPEVNLRIEEVDFLAKPIVLDSQSLDIILGMDWLAKHKGQIDCAEKSITLQGPGGKQVRFTSNSPTASRSILTCLQVTSLESVPIVCEYPDVFPEELTSMPPDREIEFAIELAPGTAPIAKRPYRMAANELAEVKRQIEELESKGYVRPSSSPWGAPVLLVKKKDGSERMFVVVFIDDILIYSKNEEEHAEHLRLIMEKLRDHQLFAKFLKCEFWLDRVAFLGHVISSNGVEVDPSKVEAVLAWNPPKNVSEIRSFLGLAGYYRRFIEGFSKLARPMTELLKKEKKFQWSAACEDSFQEMKKRLTTAPVLTLPDIRKDFEIFCDASRQGLECVLMQERKVVAYASRQLRPHEVNYPTHDLELAAVVHALKIWRHYLIGNRCEVYTDHKSLKYIFTQTELNMRQRRWLELIKDYDLGIHYHPCKANVVADALSRKAYCNVARIRPDQDRLCRELEKLRLTVVQSGVPASLTVQPTLESQIREAQKNDEGIKELIKRIQEKKDTNFSIDDQGTVWCGPRICVPAKKELRDLILKEAHESAYSIHPGSTKMYQDIKAYFWWAGMKRDVAEYVALCDICQRVKAEHQRPAGLLQPLPIPEWKWEEIGMDFITGLPRTPSGYDSIWVIVDQLTKPAHFVPVKTTYDGKKLAELYMTHVVCRFGCPKKIVSDRGTQFTSRFWKQLHEALGTDLNFSTAYHPQTDGQTERMSPNEAMFGRKCRTPLCWNEVGEALVFGPDILKAAEEQVKLIREHLKTAQNRQKNYADNRRRDLKFEKGDHVYLRVSPLRGMRRFGMSGKLAPRYIGPYLITARRGEVAYQLELPEGLADVHNVFHVSQLKKCLRVPEEQVPLGNIELEKNLTYKGRPIKVLEEAERQTRRKTIKFYKVQWSNHSEDEATWEREDLLHAEFPELLP

SEQ ID NO: 20413 - protein, 1681 aa, Oryza sativa
  Clone ID: TF_OSC400966j.C1.p1.fg
MGGMGDMWIHRGGVWEDPWASWHSMVWDLTCCWSGTPLVGIWPTLQIAYQDLSWTALRRLAHDYSHRLGGSAFRQLPRLPSGHSDARYPCPYSESQPVLTRMVELSEAQATQHDLLLEAYRSLARRYAALEARLAEEGVTSVDTISWDSGRPCHASHLSSHSSRGSARTPSGPRSPSSRAPYSPVYSPYPHPVSPSYTPGHTPVASSRRGPRFIRTARKRVVGSSTVFHFHYPAPLPPAARAAAGPRQMASRPRRAARAPARFGFEDGRAEPEVNHEQSPHSNRSHRTASRNAEVEQPRRSNRSHRTASCDAEMEQSHRSHHTASHNSGEERLPSPPHVENNMQHLMAVQTQILQGLAAAVAGFQHNAHGNGHPHMSNNRSKLTDFLRSRPPEFSQTVEPVEADDWLKDVDRKFNLVQCTPVEKTLYASHQLRGPAADWWENYCNAHPEPTNIAWDEFATAFRAAHVPESTIDMKKEEFNRLKQGNSNVNEYLSQFNKLARYAPEEVDTDKKKIRKFLKGIAVGMRLQLLAHDFPTFQHMINKALLLEDARKEATEEYKKRKSNHQGNSSRGAPRPRYGQPMQYHQSVTQANRQPGYAPRPQMNRPAPQPQQRAPSGNTAPNSVTSFKSPQGPSAVQCFRCNQMGHYARQCPQNPTNTSSGHANGSTARTPTPAAAQSRPSSQASGQGSHASNNFGRGRVNHIQAETAQDAPDVVMGMFSVNSIPAIVLFDSGASHSFISQAFVKRNGWKTQNLRVPMIVHSPGRDIRATQICPEVNLRIEEVDFLAKPIVLDSQSLDIILGMDWLAKHKGQIDCAEKSITLQGPGGKQVRFTSNSPTASRSILTCLQVTSLESVPIVCEYPDVFPEELTSMPPDREIEFAIELAPGTAPIAKRPYRMAANELAEVKRQIEELESKGYVRPSSSPWGAPVLLVKKKDGSERMFVVVFIDDILIYSKNEEEHAEHLRLIMEKLRDHQLFAKFLKCEFWLDRVAFLGHVISSNGVEVDPSKVEAVLAWNPPKNVSEIRSFLGLAGYYRRFIEGFSKLARPMTELLKKEKKFQWSAACEDSFQEMKKRLTTAPVLTLPDIRKDFEIFCDASRQGLECVLMQERKVVAYASRQLRPHEVNYPTHDLELAAVVHALKIWRHYLIGNRCEVYTDHKSLKYIFTQTELNMRQRRWLELIKDYDLGIHYHPCKANVVADALSRKAYCNVARIRPDQDRLCRELEKLRLTVVQSGVPASLTVQPTLESQIREAQKNDEGIKELIKRIQEKKDTNFSIDDQGTVWCGPRICVPAKKELRDLILKEAHESAYSIHPGSTKMYQDIKAYFWWAGMKRDVAEYVALCDICQRVKAEHQRPAGLLQPLPIPEWKWEEIGMDFITGLPRTPSGYDSIWVIVDQLTKPAHFVPVKTTYDGKKLAELYMTHVVCRFGCPKKIVSDRGTQFTSRFWKQLHEALGTDLNFSTAYHPQTDGQTERMSPNEAMFGRKCRTPLCWNEVGEALVFGPDILKAAEEQVKLIREHLKTAQNRQKNYADNRRRDLKFEKGDHVYLRVSPLRGMRRFGMSGKLAPRYIGPYLITARRGEVAYQLELPEGLADVHNVFHVSQLKKCLRVPEEQVPLGNIELEKNLTYKERPIKVLEEAERQTRRKTIKFYKVQWSNHSEDEATWEREDLLHAEFPELLP

SEQ ID NO: 20414 - protein, 1763 aa, Oryza sativa
  Clone ID: TF_OSC400993j.C1.p80.fg
MAVNASFSSHGFGEGHHVAQLRDLARFLGFSCPEYTGYSVDRVPPRCELSVYLYPRGGIHGAGLRPHHFTVARPTLQIAYQDLSCRDREKYIFPKASVLIPVPGKAGTEPQTKPYPLDMWKYGSALQQRPELNPYIGRGATSHNWHAPKPHRKTGFRGFERGREGGTMNRVPTSWDFVYPRVNKVDGDDEKAAGAEEGGGAARVDGDGGAPTIDERNGGVDEVGEDAAKPKEAAPRWEVVQGDDVGGPELGGDGGERERRRELDSAEEEGRREAETDGGGRDISWTTLRRLAHDYSHRLGGSAFRQLPRLPSGQADARYPCPYSESQPVLTRMVELSEAQATQHDLLLEAYHSLARRYAALEARLAEEGVTSVDTVSWDSGRLCHASHLSSHSSRGSARTPSGPRSPSSRAPYSPVYSPYPHPVSPSYTPGHTPVASSRRGPRFIRTARKRVVGSSTVFRFDYPAPPPPAARAAAGPRQMASRPRRAAHAPARFGFEEGRVVTEANHESANEQSHHSNSSHRTASRNAEVEQPRRSNRSHHTASHNAEVEQSHRSHRTASHNSGEERLPSPPHVENNMQYLMAVQTQILQGLAAAIAGFQHSAHGNGHPHMGNNRSKLTDFLRSRPPEFSQTVEPVEADDWLKDIDRKLNLVQCTPVEKTLYASHQLRGPAADWWENYCNAHPEPTNIAWDEFATAFRAAHVPESTIDMKKEEFNKLKQGNNSVNEYLSLFNKLARYAPEEVDTDKKKIRKFLKGIAVGMRLQLLAHDFLTFQHMINKALLLEDARKEATEEYKKRKSPLGPSAVQCFRCNQMGHYARQCPQNPTNTNSGHANGSTARTPTPAAAQSRPSSQASGQGSRPSNNFGRGRVNHIQAETAQDAPDVVMEELTSMPPDREIEFAIELAPGTAPIAKRPYRMAANELAEVKRQIEELESKGYVRPSSSPWGAPVLLVKKKDGSERMVIDYRALNEVTIKNKYPLPRIDDLFDQLKGARVFSKIDLRSGYHQLKIRSEDIPKTAFSTRMFVVVFIDDILIYSKNEEEHAEHLRLIMEKLRDHQLFAKFSKCEFWLNRVAFLGHVISSNGVEVYPSKVEAVLAWNPPKNVSEIRSFLGLAGYYRRFIEGFSKLARPMTELLKKEKKFQWSAACEDSFQEMKKRLTTAPVLTLPDIRKDFKIFCDASRQSLGCVLMQKRRVVAYASRQLRPHEVNYPTHDLELAAVVHALKIWRHYLIGNRCEVYTDHKSLKYIFTQTELNMRQRRWLELIKDYDLGIHYHPGKANVVADALSRKTYCNVAQIRPNQDRLCKELEKLRLTVVQSGVPASLTVQPTLESQIREAQKDDEGIKELIKKIREKKDTDFSIDDQGTVWCGPRICVPAKKDLRDLILKEAHESAYSIHPGSTKMYQDIKAYFWWAGMKRDVAEYVALCDICQRVKAEHQRPAGLLQPLPIPEWKWEEIGMDFITGLPRTPSGYDSIWVIVDRLTKSAHFVPVKTTFDGKKLAELYMTHVVCRFGCPKKIVSDRGTQFTSRFWKQLHEALGTDLNFSTAYHPQTDGQTERVNQILEDMLRACALDFEGTWDRCLPYAEFSYNNSYQASIQMSPNEAMFGRKCRTPLCWNEVGEALVFGPDILKAAEEQVKLIRERLKTAQNSQKNYADNRRRDLEFEKGDHVYLRVSPLRDVHNVFHVSQLKKCLRVPEEQVPLGNIELEKNLTYKERPIKVLEEAERQTRRKTVKFYKVKWSNHSEDEATWEREDLLRAEFPELLP

SEQ ID NO: 20415 - protein, 1787 aa, Oryza sativa
  Clone ID: TF_OSC401121j.C1.p38.fg
MAVNASFSSHGFGEGHHVAQLRDLARFLGFSCPEYTGYSVDRVPPHCELSVYLYPRGGIHGAGLRPHHFTVARPTLQIAYQDLSWTALRRLAHDYSHRLGGSAFRQLPRLPSGHSDARYPCPYSESQPVLTRMVELSEAQATQHDLLLEAYRSLARRYAALEARLAEEGVTSVDTVSWDSGRLCHASHLSSHSSRGSARTPSGPRSPSSRAPYSPVYSPYPHPVSPSYTPGHTPVASSRRGPRFIRTARKRVVGSSTVFRFHYPAPPPPAARAAAGPRQMASRPRRAARAPARFGFENGRVEPEENHESANEQSHHSNRSHRTASRNAEVEQPRRSSRSHRTVSRNAEMEQSHRSHRTASHNSGEERLPSPPHVENNMQHLMAVQTQILQGLAAAVAGFQHNAHGNGHPHMSNNRSKLTDFLRSRPPEFSQTVEPVEADDWLKDVDRKLNLVQCTPVEKTLYASHQLRGPAADWWENYCNAHPEPTNIAWDEFATAFRAAHVPESTIDMKKEEFNRLKQGNSSVNEYLSMFNKLARYAPEEVGTDKKKIRKFLKGIAVGMRLQLLAHDFPTFQHMINKALLLEDARKEATEEYKKRKSNHQGNSSRGAPCPRYGQPMQYHQSVTQANRQPGYAPRPQMNRPAPQPQQRAPSGNTAPNSVTSFKSPQGPSAVQCFRCNQMGHYARQCPQNPTNTSLGHANGSTARTPTPAAAQSRPSSQASGQGSRASNNFGRGRVNHIQAETAQDAPDVVMGMFSVNSIPAIVLFDSGASHSFISQAFVKRNGWKTQNLRVPMIVHSPGRNIRATQVCPEVNLRIEEVDFLAKPIVLDSQSLDIILGMDWLAKHKGQIDCAEKTITLQGPGGKQVRFTSNTPTASRSILTCLQVTSLESVPIVCEYPDVFPEKLTSMPPDREIEFAIELAPSTAPIAKRPYRMAANELAEVKRQIEELESKGYVRPSSSPWGAPVLLVKKKDGSERMVIDYRALNEVTIKNKYPLPRIDDLFDQLKGARVFSKIDLRSGYHQFKIRSEDIPKTAFSTRYGLYEFTVMSFGLTNAPAFFMNLMNKIFMEYLDQFVVVFIDDILIYSKNEEEHAEHLRLIMEKLRDHQLFAKFSKCKFWLDRVAFLGHVISSNGVEVDPSKVEAVLAWNPPKNVSEIRSFLGLAGYYRRFIEGFSKLARPMSELLKKGKKFQWSAACEHSFQEMKKRLTTAPVLTLPDIRKDFEIFCDASRQGVGCVLMQERKVVAYASRQLRPHEVNYPTHDLELAAVVHALKIWRHYLIGNRCEVYTDHKSLKYIFTQTELNMRQRRWLELIEDYDLGIHYHPGKANVVADALSRKAYCNVAQIRPDQDRLCRELEKLRLTMELRDLILKEAHESAYSIHPGSTKMYQDIKAYFWWAGMKRDVAEYVALCDICQRVKAEHQRPAGMLQPLPIPEWKWEEIGMDFITGLPRTPSGYDSIWVIVDRLTKSAHFVPVKTTYDGKKLAELYMTHVVCRFGCPKKIVSDRGTQFTSRFWKQLHEALGTDLNFSTAYHPQTDGQTERVNQILEDMLRACALDFEGTWDRCLPYAEFSYNNSYQASIQMSPNEAMFGRKCRTPLCWNEAGEALVFGPDILKTAEEQVKLIRERLKTAQNRQKNLADNRRRDLEFEKGDHVYLRVSPLRGMKRFGMSGKLAPRYIGPYLITARRGEVAYQLELPEGLADVHNVFHVSQLKKCLRVPEEQVPLGNIVLEKNLTYKERPIKVLEEAERQTRRKTIKFYKVQWSNHSEDEATWEREDLLRAEFPELLP

SEQ ID NO: 20416 - protein, 852 aa, Oryza sativa
  unsure (1)..(852): unsure at all Xaa locations
  Clone ID: TF_OSC401123j.C1.p15.np
MTVLLLYNKETSVAVIFCLPVIPALFPGTGIDXQMAVNASFSSHGFGEGHHVAQLRDLARFLGFSCPEYTGYSVDRVPPHCELSVYLYPRGGIHGAGLRPHHFTVARPTLQIAHRLGGSAFRQLPRLPSHRLGGSAFRQLPRLPSGHSDARYPCPYSESQPVLTRMVELSEAQATQHDLLLEAYRSLARRYAALEARLAEEGVTSVDTVSWDSGRLCHASHLSSHSSRGSARTPSGPRSPSSRAPYSPVYSPYPHPVSPSYTPGHTPVASSRRGPRFIRTARKRVVGSSTVFRFHYPAPPPPAARAAAGPRQVPPVPSRQPIDVSSTEEPTTGARFGFENGRVEPEENHESANEQSHHSNRSHRTASRNAEVEQPRRSSRSHRTVSRNAEMEQSHRSHRTASHNSGEERLPSPPHVENNMQHLMAVQTQILQGLAAAVAGFQHNAHGNGHPHMSNNRSKLTDFLRSRPPEFSQTVEPVEADDWLKDVDRKLNLVQCTPVEKTLYASHQLRGPAADWWENYCNAHPEPTNIAWDEFATAFRAAHVPESTIDMKKEEFNRLKQGNSSVNEYLSMFNKLARYAPEEVGTDKKKIRKFLKGIAALLLEDARKEATEEYKKRKSNHQGNSSRGAPCPRYGQPMQYHQSVTQANRQPGYAPRPQMNRPAPQPQQRAPSGNTAPNSVTSFKSPQGPSAVQCFRCNQMGHYARQCPQNPTNTSLGHANGSTARTPTPAAAQSRPSSQASGQGSRASNNFGRGRVNHIQAETAQDAPDVVMGMFSVNSIPAIVLFDSGASHSFISQAFVKRNGWKTQNLRVPMIVHSPGRNIRATQVCPEVNLRIEEVDFLAKPIVLDSQS

SEQ ID NO: 20417 - protein, 1848 aa, Oryza sativa
  Clone ID: TF_OSC401138j.C1.p20.fg
MAVNASFSSHGFGEGHHVAQLRDLSRFLGFSCPEYTGYSVDRVPPHCELSVYLYPRGGIHGAGLRPHHFTVARPTLQIAYQDLSWTALRRLAHDYSHRLGGSAFRQLPRLPSGHSDARYPCPYSESQPVLTRMVELSEAQATQHDLLLEAYRSLARRYAALEARLAEEGVTSVDTISWDSGRLCHASHLSSHSSRGSARTPSGPRSPSSRAPYSPVYSPYPHPVSPSYTPGHTPVASSRRGPRFIRTARKRVVGSSTVFRFHYPAPPPSAARAAAGPRQMASRPRHAARAPARFGFEDGRVEAEANHESANEQSHHSNRSHRTVSRNAEVEQPRRSSRSHRTVSRDAKMEQSHRTASHNSGEERLPSPSHVETNMQHIMAVQTQILQGLTTAIASFQHNAHGNGHPHVGNNRSKLTDFLRSRPPEFSQTVEPVEADDWLKDVDRKLNLVQCTPVEKTLYASHQLRGPAADWWENYCNAHPEPTNIAWDEFATAFRAAHVPESTIDMKKEEFNRLKQGNSSVNEYLSQFNKLARYAPEEIDTDKKKIRKFLKGIAVGMRLQLLAHDFPTFQHMINKALLLEDARKEATEEYKKRKSNHQGNSSRGAPRPRYGQPMQYHQSVTQANRQPSYAPRPQINRPAPQPQQRAPSGNTAPNSVTSFKSPQGPSAVQCFRCNQMGHYARQCPQNPTNTNSGHANGSTARTPTPAAAQSRPSSQASGQGSRASNHFGRGRVNHIQAETAQDAPDVVMGMFSVNSVPAIVLFDSGASHSFISQAFVKRNGWKTQNLRVPMIVHSPGRNIRATQICPEVNLRIEEVDFLAKPIVLDSQSLDIILGMDWLAKHKGQIDCAEKSITLQGPGGKQVRFTPNTPTASRSILTCLQVTSLESVPIVCEYPDVFPEELTRMPPDREVEFAIELAPGTAPIAKRPYRMAANELAEVKRQIEELESKGYVRPSSSPWGAPVLLVKKKDGSERMVIDYRALNEVTIKNKYPLPRIDDLFDQLKGARVFSKIDLRSGYHQLKIRSEDIPKTAFSTRYGLYEFTVMSFGLTNAPAFFMNLMNKIFMEYMDQFVVVFIDDILIYSKNEEEHAEHLRLIMEKLRDHQLFAKFSKCEFWLDRVAFLGHVISSNGVEVDPSKVEAVLAWNPPKNVSEIRSFLGLAGYYRRFIEGFSKLARPMTELLKKEKKFQWSAACEDSFQEMKKRLTTAPVLTLPDIRKDFEIFCDASRQGLGCVLMQERKVVAYASRQLRPHEVNYPTHDLELAAVVHALKIWRHYLIGNRCEVYTDHKSLKYIFTQTELNMRQRRWLELIKDYDLGIHYHPGKANVVADALSRKAYCNVAQIRPDQDHLCRELEKLRLTVVQSGVPASLTVQPTLESQIREAQKDDEGIKELIKRIQEKKDTNFSIDDQGTVWCGPRICVPAKKELRDLILKEAHESAYSIHPGSTKMYQDIKAYFWWAGMKRDVAEYVALCDICQRVKAEHQRPAGLLQPLPIPEWKWEEIGMDFITGLPRTPSGYNSVWVIVDRLTKSAHFVPVKTTYDGKRLAELYMTHVVCRFGCPKKIVSDRGTQFTSRFWKQLHEALGTDLNFSTAYHPQTDGQTERVNQILEDMLRACALDFEGTWDRCLPYAEFSYNNSYQASIKMSPNEAMFGRKCRTPLCWNEVGEALVFGPDILKSAEEQVKLIRERLKTAQSRQKNYADNRRRDLEFEKGDHVYLRVSPLRGMRRFGMSGKLAARYIGPYLITARRGEVAYQLELPEGLADVHNVFHVSQLKKCLRVPEEQVPLGNIELEKNLTYKERPFKVLEEAERQTRRKIIKFYKVQWSNHSEDEATWEREDLLRAEFPELLP

SEQ ID NO: 20418 - protein, 1571 aa, Oryza sativa
  Clone ID: TF_OSC401196j.C1.p71.fg
MASRPRRAARAPARFGFEDGRVEPEENHESANEQSRRSNRSHRTASRNAEVEQPRRGSRSHRAVSRDAEMEQSHRSHRTASHNSGEERLPSPPHVENNMQHIMAVQTQILQGLTTAIASFQHNAHGNGHPHVGNNRSKLTDFLRSRPPEFSQTVEPVEADDWLKDVDRKLNLVQCTPVEKTLYASHQLRGPAADWWENYCNAHPEPTNIAWDEFATAFRAAHVPESTIDMKKEEFNRLKQGNSSVNEYLSQFNKLARYAPEEVDTDKKKIRKFLKRIAVGMRLQLLAHDFPTFQHMINKALLLEDARKEATEEYKKRKSNHQGNSSRGTPRPRYGQPMQYHQSVTQANRQPGYAPRPQMNRPTPPPQQCAPSGNTAPNSVTSFNSPQGPSVVQCFRCNQMGHYARQCPQNPTNTNLGHANGSIAKTPTPAAAQSRPSSQASGQGSRASNHFGRGRVNHIQAETAQDAPDVVMGMFSVNSVPAIVLFDSGASHSFISQAFVKRNGWKTQNLRVPMIVHSPGRNIRATQICPEVNLKIEEVDFLAKPIVLDSQSLDIILGMDWLAKHKGQIDCAEKSITLQGPGGKQVRFTPNTPTASRSILTSLQVTSLESVPIVCEYPDVFPEELTSMPPDREIEFAIELAPGTAPIAKRPYRMAANELAEVKRQIEELESKGYVRPSSSPWGAPVLLVKKKDGSERMVIDYRALNEVTIKNKYPLPRIDDLFDQLKGARVFSKIDLRSGYHQLKIRSEDIPKTAFSTRYGLYEFTVMSFGLTNAPAFFMNLMNKIFMEYLDQFVVVFIDDILIYSKNEEEHAEHLRLIMEKLRDHQLFAKFSKWEFWLDRVAFLGHVISSNGVEVDPSKVEAVLAWNPPKNVSEIRSFLGLAGYYRRFIEGFSKLARPMTELLKKEKKFHWSTACEDSFQEMKKRLTTAPVLTLPDIRKDFEIFCDASRQGLGCVLMQERKVVAYASRQLRPHEVNYPTHDLELATVVHALKIWRHYLIGNRSNVVADALSRKAYCNIAQIRPDQDHLCRELEKLRLTVVQSGVPASLTVQPTLESQIREAQKDDEGIKELIKRIQEKKDTNFSIDDQGTVWCGPRICVPAKKELRDLILKEAHESAYSIHPGSTKMYQDIKAYFWWVGMKRDVTEYVALCDICQRVKAEHQRPAADSHDSASRLLPAKVEIGSLESHLGSPAEPAKGGLRGLPVRSPTLRHLPIPEWKWEEIGMDFITGLPRTPNGYDSIWVIVDRLTKSAHFVPVKTTYDGKKLAELYMTHVVCRFGCPKKIVSDRGTQFTSRFWKQLHEALGTDLNFSTAYHPQTDGQTERVNQILEDMLRACALDFEGTWDRCLPYAEFSYNNSYQASIQMSPNEAMFGRKCRTPLCWNEVGEALVFGPDILKSAEEQVKLIRERLKTAQNRHKNYTDNRRRDLEFEKGDHVYLRVSPLRGMRRFGMSGKLAPRYIGPYLITARRGEVAYQLELPEGLADVHNVFHVSQLKKCLRVPEEQVPLGNIELEKNLTYKERPIKVLEEAERQTRRKTIKFYKVQWSNHSEDEATWEREDLLRAEFPDLLP

SEQ ID NO: 20419 - protein, 1851 aa, Oryza sativa
  Clone ID: TF_OSC401200j.C1.p41.fg
MAVNASFSSHGFGEGHHVAQLRDLSRFLGFSCPEYTGYSVDRVPPHYELSVYLYPRGGIHGAGLRPHHFTVARPTLQIAYQDLSWTALRRLAHDYSHRLGGSAFRQLPRLPSGHSDARYPCPYSESQPVLTRMVELSEAQATQHDLLLEAYRSLARRYAALEARLAEEGVTSVDTISWDSGRLCHASHLSSHSSRGSARTPSGPRSPSSRAPYSPMYSPYPHPVSPSYTPGHTPVASSRRGPRFIRTARKRVVGSSTVFRFRHPAPPPPAARAAAGPRQMASHPRHAARAPARFGFEDGRVEPEENHESANEQSHHSNRSHHTVSRNAEIGQPRRSNRSHRTVSRDAEMGQSHRSHRTASHNSGEERLPSLPHVENNMQHIMTVQTQILQGLTTAIASFQHNAHGNGHPHVGNNRSKLTDFLRSRPPEFSQTVEPVEADDWLKDVDRKLNLVQCTPVEKTLYASHQLRGPAADWWENYCNAHPEPTNIAWDEFATAFRAAHVPESTIDMKKEEFNRLKQGNSSVNEYLSQFNKLARYAPEEVDTDKKKIRKFLKGIAVGMRLQLLAHDFPTFHHMINKALLLEDARKEATEEYKKRKSNHQGNSSRGAPRPRYGQPMQYHQSVTQANHQPGYAPRPQMNRPAPQPQQRAPSGNTAPNSVTSFKSPQGPSAVQCFRCNQMGHYARQCPQNPTNTNSGHANGSTARTPAPAAAQSRPSSQASGQGSRASNHFGRGRVNHIQAEIAQDAPDVVMGMFSVNSVPAIVLFDSGASHSFISQAFVKRNGWKTQNLRVPMIVHSPGRNIRATQICPEVNLRIEEVDFLAKPIVLDSQSLDIILGMDWLAKHKGQIDCAEKSITLQGPGGKQVRFTPNTPTASRSILTCLQVTSLESVPIVCEYPDVFPEELTRMPPDREIEFAIELAPGTAPIAKRPYRMAANELAEVKRQIEELESKGYVRPSSSPWGAPVLLVKKKDGSERMVIDYRALNEVTIKNKYPLPRIDDLFDQLKGARVFSKIDLRSGYHQLKIRSEDIPKTAFSTRYGLYEFTVMSFGLTNAPAFFMNLMNKIFMEYLDQFVVVFIDDILIYSKNEEEHAEHLRLIMEKLRDHQLFAKFSKCEFWLDRVAFLGHVISPNGVEVDPSKVEAVLAWNPPKNVSEIRSFLGLAGYYRRFIEGFSKLARPMTELLKKEKKFQWSVACEDSFQEMKKRLTTAPVLTLPDIRKDFEIFCDASRQGLGCVLMQERKVVAYASRQLRPHEVNYPTHDLELAAVVHALKIWRHYLIGNRCEVYTDHKSLKYIFTQTELNMRQRRWLELIKDYDLGIHYHPGKANVVADALSRKAYCNVAQIRPDQDHLCRELEKLRLTVVQSGVPASLTVQPTLESQIREAQKDDEGIKELIKRIQEKKDTNFSIDDQGTVWCGPRICVPAKKELRDLILKEAHESAYSIHPGSTKMYQDIKAYFWWAGMKRDVAEYVALCDICQRVKAEHQRPAGLLQPLPIPEWKWEEIGMDFITGLPRTPSGYDSIWVIVDRLTKSAHFVPVKTTYDGKKLAELYMTHVVCRFGCPKKIVSDRGTQFTSRFWKQLHEALGTDLNFSTAYHPQTDGQTERVNQILEDMLRACALDFEGTWDRCLPYAEFSYNNSYQASIQMSPNEAMFGRKCRTPLCWDEVGEALVFGPDILKSAEEQVKLIRERLKTAQNRQKNYADNRRRDLEFEKGDHVYLRVSPLRGMRRFGMSGKLAPRYIGPYLITARRGEVAYQLELPEGLADVHNVFHVSQLKKCLRVPEEQVPLGNIELEKNLTYKERPIKVLEEAERQTRRKTIKFYKVQWSNHSEDEATWEREDLLRAEFPDLLP

SEQ ID NO: 20420 - protein, 1851 aa, Oryza sativa
  Clone ID: TF_OSC401215j.C1.p49.fg
MAVNASFSSHGFGEGHHVAQLRDLARFLGFSCPEYTGYSVDRVPPHCELSVYLYPRGGIHGVGLRPHHFTVARPTLQIAYQDLSWTALRRLAHDYGHRLGGSAFRQLPRLPSGHADARYPCPYSESQPVLTRMVELSEAQATQHDLLLEAYRSLARRYAALEARLAEEGVTSVDTISWDSGRLCHASHLSSHSSRGSARTPSGPRSPSSRAPYSPVYSPYPHPVSPSYTPGHTPVASSRRGPRFIRTARKRVVGSSTVFRFRHPAPPPPAARAAAGPRQMASRPRRTARAPVRFGFEDGRVEAEANHEPANEHSHHSNRSHRTVSRNAEVEQPRRSSRSHRTVSREAELEQSHRSHRTASHNSGEERLPSPPHVENNMQHIMAVQTQILQGLTTAIASFQHNAHGNGHPHVGNNRSKLTDFLRSRPPEFSQTIEPVEADDWLKDVDRKLNLVQCTPVEKTLYASHQLRGPAADWWENYCNAHPEPTNIAWDEFATAFRVAHVPESTIDMKKEEFNRLKQGHSSVNEYLSQFNKLARYAPEEVDTDKKKIRKFLKGIAVGMRLQLLAHDFPTFQHMINKALLLEDARKEATEEYKKRKSNHQGNSSRGAPRPRYGQPMQYHQSVTQANRQSSYAPRPQMNRPAPPPQQRAPSGNTAPNSVTSFKSPQGPSAVQCFRCNQMGHYARQCPQNPTNTSPGHANGSTARTPTPAAAQSRPSSQASGQGSRASNHFGRGRVNHIQAETAQDAPDVVMGMFSVNSVPAIVLFDSGASHSFISQAFVKRNGWKTQNLRVPMIVHSPGRNIRATQICPEVNLRIEEVNFLAKPIVLDSQSLDIILGMDWLAKHKGQIDCAEKSITLQGPGGKQVRFTPNTPTASRSILTCLQVTSLESVPIVCEYPDVFPEELTRMPPDREIEFAIELAPGTAPIAKRPYRMAANELAEVKRQIEELESKGYVRPSSSPWGAPVLLVKKKDGSERMVIDYRALNEVTIKNKYPLPRIDDLFDQLKGARVFSKIDLRSGYHQLKIRSEDIPKTAFSTRYGLYEFTVMSFGLTNAPAFFMNLMNKIFMEYLDQFVVVFIDDILIYSKNEEEHAEHLRLIMEKLRDHQLFAKFSKCEFWLDRVAFLGHVISSNGVEVDPSKVEAVLAWNPPKNVSEIRSFLGLAGYYRRFIEGFSKLARPMTELLKKEKKFQWSTACEDSFQEMKKRLTTAPVLTLPDIRKDFEIFCDASRQGLGCVLMQERKVVAYASRQLRPHEVNYPTHDLELAAVIHALKIWRHYLIGNRCEVYTDHKSLKYIFTQTELNMRQRRWLELIKDYDLGIHYHPGKANVVADALSRKAYCNIAQIRPDQDHLCRELEKLRLTVVQSGVPASLTVQPTLESQIREAQKDDEGIKELIKRIQEKKDTNFSIDDQGTIWCGPRICVPAKKELRNLILKEAHESAYSIHPGSTKMYQDIKAYFWWAGMKRDVAEYVALCDICQRVKAEHQRPAGLLQPLPIPEWKWEEIGMDFITGLPRTPSGYDSIWVIVDRLTKSAHFVPVKTTYDGKKLAELYMTHVVCRFGCPKKIVSDRGTQFTSRFWKQLHEALGTDLNFSTAYHPQTDGQTERVNQILEDMLRACALDFEGTWDRCLPYAEFSYNNSYQASIQMSPNEAMFGRRCRTPLCWNEVGEALVFGPDILKSAEEQVKLIRERLRTAQNRQKNYADNRRRDLEFEKGDHVYLRVSPLRGMRRFGMSGKLAPRYIGPYLITARRGEVAYQLELPEGLADVHNVFHVSQLKKCLRVPEEQVPLGNIELEKNLTYKERPIKVLEEAERQTRRKTIKFYKVQWSNHSEDEATWEREDLLRAEFPELLP

SEQ ID NO: 20421 - protein, 1817 aa, Oryza sativa
  Clone ID: TF_OSC401237j.C1.p36.fg
MAVNASFSSHGFGEGHHVAQLRDLARFLGFSCPEYTGYSVDRVPPRCELSVYLYPRGGIHGAGLRPHHFTVARPTLQIACQDLSWTALRRLAYDYSHRLGGSAFRQLPRLPSGHANARYPCPYSEFQPVLTRMVELSEAQATQHDLLLEAYRSLARRYAALEARLAEEGVTSVDTVSWDSGRLYHASHLSSHSSRGSARTPSGLRSPSSRAPYSPVYSPYPHPVSPSYTPGHTPVASSHRGPRFIRTARKRVVGSSTVFRFDYPAPTPPAARAAVGPRQMASRPRRAARAPARFGFEEGRVEPEANHESANEQSHHSNRSHRTTSRNAEVEQPRRSNRSHHTASRNAEMEQSHRSHRTASHNSGEERLPSPPHVENNMQHLMAVQTQILQGLAAAVAGYQHNAHGNGHPHMGNNRSNLTDFLRSRPPEFSQTVEPVEADDWLKDVDRKLNLVQCTPVEKTLYASHQLKGPAADWWENYCNAHPEPTNIAWDEFATAFRAAHVPESTIDMKKEEFNRLKQGNNSVNEYLSMFNKLARYAPEEVDTDKKKIRKFLKGIAVGMRLQLLAHDFPTFQHMINKALLLEDARKEATEEYKKRKSNHQGNSSRGAPRPRYGQPMQYHQSVTQANRQPGYAPRPQMNRPAPQPQQRAPSGNTAPNSVTSFKSPLGPSAVQCFRCNQMGHYARQCPQNPTNTNSGHANGSTARTPTPAAAQSRPSSQASGQGSRASNNFGRGRVNHIQAETAQDAPDVVMGMFSVNSVPAIVLFDSEASHSFISQAFVKRNGWKTQNLRVPMIVHSPGRNIRATQICPEVNLRIEEVDFLAKPIVLDSQSLDIILGMDWLAKHKGQIDCAEKSITLQGPGGKQVRFTSNTPTASRSILTCLQVTSLESVPIVCEYPDVFPEELTSMPPDREIEFAIELAPGTAPIAKRPYRMAANELAEVKRQIEELESKGYVRPSSSPWGAPVLLVKKKDGCERMVIDYRALNEVTIKNKYPLPRIDDLFDQLKGARVFSKIDLRSGYHQLKIRSEDIPKTAFSTRYGLYEFTVMSFGLTNAPAFFMNIMNKIFMEYLDQFVVVFIDDILIYSKNEEEHAEHLRLIMEKLRDHQLFAKFSKCEFWLDRVAFLGHVISPNGVEVDPSKVEAVLAWNPPTNVSEIRSFLGLAGYYRRFIEGFSKLARPMTELLKKEKKFQWSTACEDSFQEMKKRFTTAPVLTLPDIRRDFEIFYDATRQGLGCVLMQERKVVAYASRQLRPHEVNYPTHDLELAAVVHALKIWRHYLIGNRCEVYTNHKSLKYIFTQTELNMRQRKWLELIKDYDLGIHYHPSKANVVTDALSRKAYCNVAQIRSYQDRLCRELEKLRLTVVQSGVPASLTVQPTLESQIREAQKDDEGIKELIKRIQEKNDTNFSIDDQGTVWCGPRICVPAKKELRDLILKEAHESAYSIHPGSTKMYQDIKAYFWWAGMKRDVAECVALCDICQRVKAEHQRPAGLLQPLPIPEWKWEEIGMDFITGLPRTPSGYNSIWVIVDRLTKSAHFVLVKTTFDGKKLAELYMTHVVCRFGCPKKIVSDRGTQFTSKFWKQLHEALGTDLNLLQPTIRRPMVRQKGYQASIQMSPNEAMFGRKCRTPLCWNEVGEALVFGPDVLKAAEEQVKLIRERLKTAQNRQKNYADNRRRDLEFEKGDHVYLRVSPLRGIRRFGMSGKLAPRYIGPYLITARRGEVAYQLELPEGLAYVHNVFHVSQLKKCLRVPEEQVPLGNIELEKNLTYKERLIKIFEEAERQTRRKTIKFYKVQWSNHSEDEATWEQEDLLRAEFPELLP

SEQ ID NO: 20422 - protein, 1562 aa, Oryza sativa
  Clone ID: TF_OSC401329j.C1.p28.fg
MAVNASFSSHGFGEGHHVAQLRDLARFLGFSCPEYTGYSVDRVPPHCELSVYLYPRGDARYPCPYSESQPVLTRMVELSEAQATQHDLLLEAYRSLARRYAALEACLAEEGVTSVDTISWDSGRLCHASHLSSHSSRGSARTPSGPRSPSSRAPYSPVYSPYPHPVSPSYTPGHTPVASSRRGPRFIRTARKRVVGSSTVFRFHYPAPPPLAMASRPRRTARAPARFGFEDGRVEPEANHESANEQSHHSNRSHRTVSRNAEVEQPRRSSRSHRTVSRDAEMEQSHRSHHTASHNSGEERLPSPPHVENNMQHLMAVQTQILQGLTTAIASFQHNAHGNGHPHMGNNRSKLTDFLRSRPPEFSQTVEPVEADDWLKDVDRKLNLVQCTPVEKTLYASHQLRGPAADWWENYCNAHLEPTNIAWDEFATAFRAAHVPESTIDMKKEEFNRLKQGNSSVNEYLSQFNKLARYAPEEVDTDKKKIRKFLKGIAVGMRLQLLAHDFPTFQHMINKALLLEDARKEATEEYKKRKSNHQGNSSRGAPRPRYGQPMQYHQSVTQANRQPGYAPRPQMNRPAPPPQQRAPSGNTAPNSVTSFKSPQGPSAVQCFRCNQMGHYARQCPQNPTNTNSGHANGSTARTPTPAAAQSRPSSQASGQGSRASNNFGRGRVNHIQAETAQDAPDVVMGPGGKQIRFTPNTPTASRSILTCLQVTSLESVPIVCAYPDVFPEELTRMPPDREIEFAIELALGTAPIAKRPYRMAANELAEVKRQIEELESKGYVRPSSSPWGAPVLLVKKKDGSERMVIDYRALNEVTIKNKYPLPRIDDLFDQLKGARVFSKIDLRSGYHQLKIRSEDIPKTAFSTRYGLYEFTFVVVFIDDILIYPKNVSEIRSFLGLAGYYRRFIKGFSKLARPMTELLKKEKKFQWSAACEDSFQEMKKRLTTAPVLTLPDIRKDFEIFCDASRQGLGCVLMQERKVVAYASRQLRPHEVNYPTHDLELAAVVHALKIWRHYLIGNRCEVYTDHKSLKYIFTQTELNMRQRRWLELIKDYDLGIHYHPGKANVVADALSRKAYCNVAQIRPDQDHLCRELEKLRLTMVQSGVPASLTVQPTLESQIREAQKDDEGIKELIKRIQEKKDTNFSIDDQGTVWCGPRIYVPAKKELRDLILKEAHESAYSIHPGSTKMYQDIKAYFWWAGMKRDVAEYVALCDICQRVKAEHQRPAGLLQPLPIPEWKWEEIGMDFITGLPRTPSGYDSIWVIVDRLTKSAHFVLVKTTYDGKKLAELYMTHVVCRFGCPKKIVSDRGTQFTSRFWKQLHEALGTDLNFSTAYHPQTDGQTERVNQILEDMLRACALDFEGTWDRCLPYAEFSYNNSYQASIQMSPNEAMFGRKCRTPLCWNEVGEALVFGPDILKSAEEQVKLIRERLKTAQNRQKNYADNRRRDLEFEKGDHVYLRVSPLHGMRRFGMSGKLAPRYIGPYLITARRGEVAYQLELPEGLADVHNVFHVSQLKKCLRIPEEQVPLVSEPEDPQCEDFEDQAPDLEQGKPPLNILNLYLKFNYVA

SEQ ID NO: 20423 - protein, 1529 aa, Oryza sativa
  unsure (1)..(1529): unsure at all Xaa locations
  Clone ID: TF_OSC401436j.C1.p1.np
MTVLLLYNKETSVAVIFCLPVIPALFPGTGIDXQMAVNASFSSHGFGEGHHVAQLRDLARFLGFSCPEYTGYSVDRVPPHCELSVYLYPRGGIHGAGLRPHHFTVARPTLQIAHHLGGFAFRQLPRLPHHLGGFAFRQLPRLPSGHSDARYPCPYSESQPVLTRMVELSEAQATQHDLLLEAYRSLARRYARLCHGSHLSSHSSRGSARTPSGPRSPSSRAPYSPVYSPYPHPVSPSYTPGHTPVASSRRGPRFIRTARKRVVGSSTVFRFHYPAPPPPAARAAVGPRQVPPVPSRQPIDISSTEEPTTGARFGFEDGRAEPEANHEQSHHSNRSHRTASRNAEVEQPRRSNRSHRTASCDVEMEQSHRSHRTASHNSGEERLPSPPHVENNMQHLMAVXTQILQGLAAAVAGFQHTAHGNGHRHMSNNRSKLTDFLRSRPPEFSQTVEPVEADDWLKDVDRKLNLVQCTPVEKTLYASHQLRGPAADWWENYCNAHPEPTNIAWDEFATSFRAAHVPESTIDMKKVEFNRLKQGNSSVNEYLSMFNNLARYAPEEVDTDKKKIRKFVKGIAALLLEDARKEATEEYKKRALLLEDARKEATEEYKKRNSNHQGNSSRGAPRPHYGQPMQYHQSVTQANRQPGYAPRPQMNCPAPQPQQRAPSGNTAPNSVTSFKSPQGPSAVQCFRCNQMGHYARQCPQNPTNTSSGHANGSTARTPTPAAAQSRPSSQASGQGSRVSNNLGRGRVNHIQAETAQDAPDVVMGMFSVNSIPAIVLFDSGASHSFISQAFVKRNGWKTQNLRVPMIVHSPGRDIRATQICLEVNLRIEEVDFLAKPIVLDSQSLDIILGMDWLAKHKGQIDCAEKSITLQGPGGKQVRFTPNTPTASRSILTCLQVTSLESVPIVCEYPDVFPEELTSMPPDREIEFAIELAPGTAPIAKRPYRMAANELVEVKRQIEELESKGYVRPSSSPWGAPVLLVKKKDGSERMLKIRSEDIPKTAFSTRYGLYEFTEMSFGLTNAPAFFMNLMNKIFMEYLDQFVVVFIDDILIYSKNEEEHAEHLRLIMEKLRDHQLFAKFSKCEFWLDRVAFLGHVISSNGVEVDPSKVEAVLAWNPPKNVSEIRSFLGLVGYYRRFIEEFSKLARPMTELLKKEKKFQWSAACEDSFQEMKKRLTTAPVLTLPDIRKDFEIFCDASRQGLGCVLMQERKVVAYASRQLRPHEVNYPTHDLELAAVVHALKIWRHYLIGNRCEVYTDHKSLKYIFTQTELNMRQRRWLELIKDYDLGIHYHPGKANVVADALSRKAYCNVAQIRPDQDRLCRELEKLRLTVVQSGVPASLTVQPTLESQIREAQKDDEGIKELIKRIQEKKDTNFSIDDQGTVWCGPRICVPAKKELRDLILKEAHESAYSIHPGSTKMYQDIKAYFWWAGMKRDVAEYVALCDICQRVKAEHQRPAGLLQPLPIPEWKWEEIGMDFITGLPRTPSGYDSIWVIVDRLTKLAHFVPVKTTWEREDLLRAEFPHIIFVFKFS

SEQ ID NO: 20424 - protein, 1799 aa, Oryza sativa
  Clone ID: TF_OSC401685j.C1.p111.fg
MAVNASFSSHGFGEGHHVAQLRDLARFLGFSCPEYTGYSVDRVPPHCELSVYLYPRGGIHGAGLRPHHFTVARPTLQIAYQDLSWTALRRLAHDYSHRLGGSAFRQFPRLPSGHSDARYPCPYSESQPVLTHMVELSEAQATQHDLLLEAYRSLARRYAALEARLAEEGVTSVDTISWDSGRLCHASHLSSHSSRGSARTPSGPRSPSSRAPYSPVYSPYPHPVSPSYTPGHTPVASSRRGPRFIRTARKRVVGSSTVFRFHYPAPPPPAARAAAGPRQMASRPRRAARAPARFGFEDGRVEAEANHESANEQSHHSNRSHRTVSRNAEVEQPRRSNCSHRTVSRDAEMEQSHRSYRTASHNSGEERLPSPPHVENNMQHLMAVQTQILQGLTTAIASFQHNAHGNGHPHMGNNRSKLIDFLRSRPLEFSQTVEPVEADDWLKDVDRKLNLVQCTPVEKTLYASHQLRGPAADWWENYCNAHPEPTNIAWDEFATAFRAAHVPESTIDMKKEEFNRLKQGNSSVNEYLSQFNKLARYAPEEVDTDKKKIRKFLKGAPRPRYGQPMQYHQSVTQTNRQPGYAPRPQMNRPAPPPQQRAPSGNTAPNSVTSFKSPQGPSAVQCFRCNQMGHYARQCPQNPTNTNSGHANGSNARTPTPAAAQSRPSSQASGQGSRASNNFGRGRVNHIQAETAQDAPEVVMGMFSVNSVPAIVLFDSGASHSFISQAFVKRNGWKTQNLRVPMIVHSPGRNIRATQICPEVNLRIEEVDFLAKPIVLDSQSLDIILGMDWLAKHKGQIDCAEKSITLQGPGGKQVRFTPNTPTANRSILTCLQVTSLESVPIVCEYPDVFPEELTRMPPDREIEFAIELAPGTAPIAKRPYRMAANELAEVKRQIEELESKGYVRPSSSPWGAPVLLVKKKDGSERMVIDYRALNEVTIKNKYPLPRIDDLFDQLKGARVFSKIDLRSGYHQLKIRSEDIPKTAFSTRYGLYEFTVMSFGLTNAPAFFMNLMNKIFMEYLDQFVVVFIDDILIYSKNEKEHAEHLRLIMEKLRNHRLFTKFLKCEFWLDRVAFLGHVISSNGVEVDPSKVEAVLAWNPPKNVSEIRSFLGLAGYYRRFIEGFSKLARPMTELLKKEKKFQWSAACEDSFQEMKKRLTTAPVLTLPDIRKDFEIFCDASRQGLGCVLMQERKVVAYASRQLRPHEVNYPTHDLELAAVVHALKIWRHYLIGNRCEVYTDHKSLKYIFTQTELNMRQRRWLELIKDYDLGIHYHPGKANVVADALSRKAYCNIAQIRPDQDHLCKELEKLRVTVVQSGVPASLTVQPTLESQIREAQKDDEGIKELIKRIQEKKDTNFSIDDQGTVWCGPRICVPAKKELRDLILKEAHESAYSIHPGSTKMYQDIKAYFWWAGMKRDVAEYVALCDICQRVKAEHQRPAGLLQPLPIPEWKWEEVGMDFITGLPRTPSGYDSIWVIVDRLTKSAHFVPVKTTYDGKKLAELYMTHVVCRFGCPKKIVSDRGTQFTSRFWKQLHEALGTDLNFSTAYHPQTDGQTERVNQILEDMLRACALDFEGTWDRCLPYAEFSYNNSYQASIQMSPNEAMFGRKCRTPLCWNEVGEALVFGPDILKSAEEQVKLIRERLKTAQNRQKNYADNRRRDLEFEKGDHVYLRVSPLRGMRRFGMSGKLAPRYIGPYLITARRDEVAYQLELPEGLADVHNVFHVSQLKKCLRVPEEQVPLGNIDLEKNLTNKERPIKVLEEAERQTRRKTIKFYKVQWSNHSEDEATWEREDLLRAEFPELLP

SEQ ID NO: 20425 - protein, 1572 aa, Oryza sativa
  unsure (1)..(1572): unsure at all Xaa locations
  Clone ID: TF_OSC401686j.C1.p1.np
MASRPRRAARAPARFGVEDGRVEPEENHESANEQSHHSNRSHRTVSRNAEVEQPRRSSRSHRTVSRDAEMEQSHRSHRTASHNSGEERLPSPPHVETNMQHLMAVQTQILQGLTTAIASFQHNAHGNGHPHMGNNRSKLTDFLRSRPPEFSQTVEPVEADDWLKDVDRKLNLVQCTPVEKTLYASHQLRGPAADWWENYCNAHPEPTNIAWDEFATAFRAAHVPESTIDMKKEEFNRLKQGNSSINEYLSQFNKLARYAPEEVDTDKKKIRKFLKGIAVGMRLQLLAHDFPTFQHMINNALLLEDARKEATEEYKKRKSNHQGNSSRGAPRPRYGQPMQYHQSVTQANRQPGYAPRPQINRPAPQPQQRAPSGNTAPNSVTSFKSPXGPSAVQCFRCNQMGHYARQCPQNPTNTNSGHANGSTARTPTPAATQSRPSSQASGQGSRASNNFGRGRVNHIQAETAQDAPDVVMGMFSVNSVPAIVLFDSGASHSFISQAFVKRNGWKTQNLRVPMIVHSPGRNIRATQICPEVNLRIEEVDFLAKPIVLDSQSLDIILGMDWLAKHKGQIECAEKSITLQGPRGKQVRFTPNTPTASRSILTCLQVTSLESVPIVCEYPDVFPEELTRMPPDREIEFAIELAPGTAPIAKRPYRMAANELAEVKRQIEELESKGYVRPSSSPWGAPVLLVKKKDGSERMVIDYRALNEVTIKNKYPLPRIDDLFDQLKGARVFSKIDLRSGYHQLKIRSEDIPKTAFSTRYGLYEFTVMSFGLTNAPAFFMNLMNKIFMEYLDQFVVVFIDDILIYSKNEEEHAEHLRLIMEKLRDHQLFAKFSKCEFWLDRVAFLGHVISSNGVEVDPSKVEAVLAWNPPKNVSEIRSFLGLAGYYRRFIEGFSKLARPMTELLKKEKKFQWSAACEDSFQELKKRLTTAPVLTLLDIQKDFEIFCDASRQGLGCVLMQEQKVVAYASRQLRPHEANYPTHDLELAAVVHALKIWRHYLIGNRCEVYTDHKSLKYIFTQTELNMRQRRWLELIKDYDLGIHYHPGKANVVADALSRKAYCNVAQIRPDQDHLCGELEKLRLTVVQSGVPASLTVQPTLESRIREAQKDDEGIKELIKRIQEKKDTNFSIDDQGTVWCGPRICVPAKKELRDLILKEAHESAYSIHPGSTKMYQDIKAYFWWAGMKRDVAEYVALSDICQRVKAEHQRPAGLLQPLPIPEWKWEEIGMDFITGLPRTPNGYDSIWVIVDRLTKSAHFVPVKTTYDGKKLAELYMTHVVCRFGCPKKIVSDRGTQFTSRFWKQLHEALGTDLNFSTAYHPQTDGQTERVNQILEDMLRAYALDFEGTWDRCLPYAEFSYNNSYQASIQMSPNEAMFGRKCRTPLCWNEVGKALVFGPDILKSAEEQVKLIRERLKTAQNRQKNYADNRRRDLEFEKGDHVYLRVSPLRGMRRFGMSGKLAPRYIGPYLITARRGEVAYQLELPEGLADVHNVFHVSQLKKCLRVPEEQVPLGNIELEKNLTYKERPIKVLEEAERQTRRKTIKFYKVQWSNHSEDEATWEREDLLRAEFPDLLP

SEQ ID NO: 20426 - protein, 1852 aa, Oryza sativa
  Clone ID: TF_OSC401716j.C1.p78.fg
MAVNASFSSHGFGEGHHVAQLRDLARFLGFSCPEYTGYSVDRVPPHCELSVYLYPRGGIHGVGLRPHHFTVARPTLQIAYQDLSWTALRRLAHDYGHRLGGSAFRQLPRLPSGHSDARYPCPYSESQPVLTRMVELSEAQATQHDLLLEAYRSLARRYAALEARLAEEGVTSVDTISWDSGRLCHASHLSSHSSRGSARTPSGPRSPSSRAPYSPVYSPYPHPVSPSYTPGHTPVASSRRGPRFIRTARKRVVGSSTVFRFRHPAPPPPAARAAAGPRQSGSPRRCAHSQARRSSVTSPHPLYQMASRPRRTARAPVRFGFDDGRVEAEANHEPANEHSHHSNRSHRTVSRDAEVEQPRRSNRSHRTVSREAELEQSHRSHHTASHNSGGERLPSPPHVENNMQHIMAVQTQILQGLTTAIASFQHNAHGNGHPHVGNNRSKLTDFLRSRPPEFSQTVEPVEADDWLKDVDRKLNLVQCTPVEKTLYASHQLRGPAADWWENYCNAHPEPTNIAWDEFAAAFRAAHVPESTIDMKKEEFNRLKQGHSSVNEYLSQFNKLARYAPEEVDTDKKKIRKFLKGIAVGMRLQLLAHDFPTFQHMINKALLLEDARKEATEEYKKRKSNHQGNSSRGAPRPRYDKPSGTSATEACPSGNTAPNSVTSFKSPQGPSAVQCFRCNQMGHYARQCPQNPTNTNSGHANGSTARTPTPAAAQSRPSSQASGQGSRASNHFGRGRVNHIQAETAQDAPDVVMGMFSVNSVPAIVLFDSGASHSFISQAFVKRNGWKTQNLRVPMIVHSPGRNIRATQICPEVNLRIEEVDFLAKPIVLDSQSLDIILGMDWLAKHKGQIDCAEKSITLQGPGGKQVRFTPNTPTASRSILTCLQVTSLESVPIVCEYPDVFPEELTRMPPDREIEFAIELAPGTAPIAKRPYRMAANELAEVKRQIEELESKGYVRPSSSPWGAPVLLVKKKDGSERMVIDYRALNEVTIKNKYPLPRIDDLFDQLKGARVFSKIDLRSGYHQLKIRSEDIPKTAFSTRYGLYEFTVMSFGLTNAPAFFMNLMNKIFMEYLDQFVVVFIDDILIYSKNEEEHAEHLRLIMEKLRDHQLFAKFSKCEFWLDRVAFLGHVISSNGVEVDPSKVEAVLAWNPPKNVSEIRSFLGLAGYYRRFIEGFSKLARPMTELLKKEKKFQWSTACEDSFQEMKKRLTTAPVLTLPDIRKDFEIFCDASRQGLGCVLMQERKVVAYASRQLRPHEVNYPTHDLELAAVIHALKIWRHYLIGNRCEVYTDHKSLKYIFTQTELNMRQRRWLELIKDYDLGIHYHPGKANVVADALSRKAYCNIAQIRPDQGQLCRELEKLRLTVVQSGVPASLTVQPTLESQIREAQKEDEGIKELIERIQEKKDTNFSIDDQGTVWYGPRICVPAKKELRDLILKEAHESAYSIHPGSTKMYQDIKAYFWWAGMKRDVAEYVALCDICQRVKAEHQRPAGLLQPLPIPEWKWEEIGMDFITGLPRTPSGYDSIWVIVDRLTKSAHFVPVKTTYDGKKLAELYMTHVVCRFGCPKKIVSDRGTQFTSRFWKQLHEALGTDLNFSTAYHPQTDGQTERVNQILEDMLRACALDFEGTWDRCLPYAEFSYNNSYQASIQMSPNEAMFGRRCRTPLCWNEVGEALVFGPDILKSAEEQVKLIRERLKTAQNRQKNYADNRRRDLEFEKGDHVYLRVSPLRGMRRFGMSGKLAPRYIGPYLITARRGEVAYQLELPEGLADVHNVFHVSQLKKCLRVPEEQVPLGNIELEKNLTYKERPIKVLEEAERQTRRKTIKFYKVQWSNHSEDEATWEREDLLRAEFPELLP

SEQ ID NO: 20427 - protein, 1347 aa, Oryza sativa
  Clone ID: TF_OSC401828j.C1.p26.fg
MASRPCRAARAPAHFGFEEGRVEPEANHESANEQSHRSNNSHRTVSRNAEVEQPRRSNRSHRTASRDSEMEQSHRSHRTASHNSGEERLPSPPHVENNMQHLMAVQTQILQGIAAAVAGYQHNVHGNGHPHMGNNRSKLTDFLRSRPPEFSQTVEPVEADDWLKDVERKFNLVQCTPVEKTLYASHQLRGPAADWWENYCNGHPEPTNIAWDEFATAFRAAHVPESTIDMKKEEFNRLKQGNTSVNEYLSQFNKLARYAPEEVDTDKKKIRKFLKGIAVGMRLQLLAHDFPTFQHMINKALLLEDARKEATEEYKKHKSNHQGNSSRGAPRPRYGQPVQYHQSVTQANRQPGYAPRPQINRPAPQPQQRAPSGNTAPNSVTSFKSPQGPSAVQCFRCNQMGHYARQCPQNPTNTNSGHANGSTARTPTPAAAKSRPSTQASGQGSRASNHFGRGRVNHIQAETAQDAPDVVMGMFSVNSVPAIVLFDSGASHSFISQAFVKRNGWKTQNLRVPMIVHSPGRNIKATQICPEVNLRIEEVDFLAKPIVLDSQSLDIILGMDWLAKHKGQIDCAEKSITLQGPGGKQVRFTPNTPTASRSILTCLQVTSLESVPIVCEYPDVFPEELTRMPLDREIEFAIELAPGTAPIAKRPYRMAANELAEVKRQIEELESKGYVRPSSSPWGAPVLLVKKKEGSERMVIDYRALNEVTIKNKYPLPRIDDLFDQLKGARVFSKIDLRSGYHQLKIRSEDIPKTAFSTRYGLYEFTVMSFGLTNAPAFFMNLMNKIFMEYLDQFVVVFIDDILIYSKNEEEHAEHLRLIMENLRDHQLFAKFSKCEFWLDRVAFLGHVISSNGVEVDPSKVEAVLAWNPPKNVSEIRSFLGLAGYYRRFIEGFSKLARPMTELLKKEKKFQWSAACEDSFQEMKKRLTTAPVLTLPDIRKDFEIFCDASRQGLGCVLMQERKVVAYASRQLRPHEVNYPTHDLELAAVVHALKIWRHYLIGNRCEVYTDHKSLKYIFTQTELNMRQRRWLELIKDYDLGIHYHPGKANVVADALSRKAYCNVAQIRPDQDHLCRELQKLMLTVVQSGVPASLTVQPTLESQIREAQKDDEGIKELIKRIQEKKDTNFSIDNQGTVWCGPRICVPAKKELRDLILKEAHESAYSIHPGSTKMYQDIKAYFWWAGMKRDVAEYVALCDICQRVKAEHQRPAGLLQPLPIPEWKPVRRFGMSGKLAPRYIGPYLITARRGEVAYQLELPEGLADVHNVFHVSQLKKCLRVPEEQVPLGNIVLEKNLTYKERPIKVLEEAERQTRRKTIKFYKVQWSNHSEDEATWEREDLLRAEFPELLP

SEQ ID NO: 20428 - protein, 1759 aa, Oryza sativa
  Clone ID: TF_OSC401909j.C1.p14.fg
MAVNASFSSHGFGEGHHVAQLRDLARFLGFSCPEYTGYSVDRVPPRCELSVYLYPRGDRVPGPLLDCASSLGPRLQPPSRGLCLPAASTPSFWPCRRQATQHYLLLETYRSLARRYAALEARLAEEGVTSVDTVSWDSGRLCHASHLSSHSSRGSARTPSGPRSPSSRAPYSPVYSPYPHPVSPSYTPGHTPVASSRRGPRFIRTARKRVVGSSTVFRFDYPAPPPPAARAAIGPRQMASRPRRAARAPARFGFEEGRVEPEENHESANERSHHSNRSHRTASRNAEVEQPRRSNRSHHTASRNAEMEQSHRSHRTASHNSGEERLPSPPHVENNMQHLMAVQTQILQGLAAAIAGFQHSAHGNGHPHMGNNRSKLTDFLRSRPPEFSQTVEPVEADDWLKDVDRKLNLVQCTPVEKTLYASHQLRGPAADWWENYCNAHPEPTNIAWAEFATAFRAAHVPESAIDMKKEEFNKLKQGNNSVNEYLSLFNKLARKEATEEYKKRKSNHQGNSSRGAPRPRYGQPMQYHQSVTQANRQPGYAPRPQMNRQAPQPQQRAPSGNTAPNNVTSFKSSLGPSAVQCFRCNQMGHYARQCPQNPTNTNSGHANGSTARTPTPAAAQSRPSSQASGQGSRVSNNFGRGRVNHIQAETAQDAPDVVMGMFSVNSVPAIVLFDSGASHSFISQAFVKRNGWKTQNLRVPMIVHFPGRNIRATQICPEVNLRIEEVDFLAKPIVLDSQSLDIILGMDWLAKHKGQIDCAEKSITLQGPGGKQVRFTSNTPTASRSILTCLQVTSLESVPIVCEYPNVFPEELTSMPPDREIEFAIELAPGTAPIAKRPYRMAANELAEVKRQIEELESKGYVRPSSSPWGAPVLLVKKKDGSERMVIDYRALNEVTIKNKYPLPRIDDLFDQLKGARVFSKIDLRSGYHQLKIRSEDIPKTAFSTRYGLYEFTVMSFGLTNAPAFFMNLMNKIFMEYLDQFVVVFINDILIYSKNEEEHAEHLRLIMEKLRDHQLFAKFSKYEFWLDRVAFLGHVISPNGVEVDPSKVEAVLAWNPPKNVSEIRSFLGLAGYYRRFIEGFSKLARPMTELLKKEKKFQWSTACEDSFQEMKKRLTTAPVLTLPDIRKDFEIFCDASRQGLGCVLMQERKVVAYASRQLRPHEVNYPTHDLELAAVVHALKIWRHYLIGNRCEVYTDHKSLKYIFTQTELNMRQRRWLELIKDYDLGIHYHPGKANVVADALSRKTYCNVDQIRPDQDRLCRDLEKLRLTVVQSGVAASLTVQPTLESQIRKAQKDDEGIKELIKRIQEKKDTDFSIDDQGTVWYGPRICVPAKKELRDLILKEAHESAYSIHPGSTKMYQDIKAYFWWAGMKRDVAEYVALCDICQRVKAEHQRPAGLLQPLPIPEWKWEEIGMDFITGLPRTPSGYDSIWVIVDRLTKSAHFVPMKTTFDGKKLAELYMTHVVCRFGCPKKIVSDRGTQFTSRFWKQLHEALGTDLNFSTAYHPQTDGQTERVNQILEDMLRACALDFEGTWDRCLPYAEFSYNNSYQASIQMSSNEEMFGRKCRTPLCWNEVGEALVFGPDILKAAEEQVKLIRERLKAAQNRQKNYVDNRRRDLEFEKGDHVYLRVSPLRGIRRFGMSGKLAPRYIGPYLITARRGEVAYHLELPEGLADVHNVFHVSQLKKCLRVPEEQVPLGNIELEKNLTYKERPIKVLEEAERQTRRKTIKFYKVQWSNHSEDEATWEQEDLLRAEFPELLP

SEQ ID NO: 20429 - protein, 1685 aa, Oryza sativa
  Clone ID: TF_OSC404112j.C1.p3.fg
MAVSASFSSHGFGEGHHVAQLRDLACFLGFSCPEYTGYSVDRVPPHCELSVYLYPRGGIHGAGLRPHHFTVARPTLQIAYQDLSWTALHRLAHDYNHRLGGSAFRQLPRLPSGHSDARYPCPYSESQLVLTRMVELSEAQATQHDLLLEAYRSLARRYAALEARLAEEGVTSVDTISWDSGRLCHASHLSSHSSRGSARTPSGPRSPSSRAPYSPVYSPYPHPVSPSYTPGHTPVASSRRGPRFIRTARKRVVGSSTMFRFRHPAPPPPAARAAAGPRQLTDFLRSRPPEFSQTVEPVEADDWLKDVDRKLNLVQCTPVEKTLYASHKLRGPAADWWENYCNAHPEPTNIAWDEFATAFRAAHVPESTIDMKKEEFNRLKQGNSSVNEYLSQFNKLAQHAPEEVDTDKKKIRKFLKGIAVGMRLQLLAHVFPTFQHMINKALLLEDARKEATEEYKKRKSNHQGNSSRGTPRPRYGQSMQYHQSVTQANRQPGYAPRPQMNRPAPQPQQRAPSGNTAPNSVTSFKSPQGPSAVQCFRCNQMGHYARQCPQNPTNTNSGHANGSTARTPTPAAALSRPSSQASGQSSRASNHFGRGRVNHIQAETAQDAPDVVMGMFSVNSVPAIVLFDSGASHSFISQAFVKRNGWKTQNLRVPMIVHSPGRNIRATQICPEVNLRIEEVDFLAKPIVLDSQSMDIILGMDWLAKHKGQIDCAEKSITLQGPGGKQVRFTPNTPTANRSILTSLQVTSLESVPVVCEYPDVFPEELTRMPPDREIEFAIELAPGTAPIAKRPYRMAANELAEVKRQIEELESKGYVRPSSSTWGAPVLLVKKKDGSERMVIDYRALNEVTIKNKYPLPRIDDLFDQLKGARVFSKIDLRSGYHQLKIRSADIPKTAFSTCYGLYEFTVMSFGLTNAPAFFMNLMNKIFMEYLDQFVVVFIDDILIYSKNGEEHAEHLRLIMEKLRDHQLFAKFSKCEFWLDRVAFLGHVISSNGVKVDPSKVEAVLAWNPPKNVSEIRSFLGLAGYYRRFIEGFSKLARPMTELLKKEKKFQWSAACEDSFQEMKKRLTTAPVLTLPDIRKDFEIFCDASRQGLGCVLMQERKVVAYASRQLRPHEVNYPTHDLELAAVVHALKIWRHYLIGNRCEVYTDHKSLKYIFTQTELNMRQRRWLELIKDYDLGIHYHPGKANVVADALSRKAYCNVAQIRPDQDHLCRELEKLRLTVVQSGVPASLTVHPTLESQIREAQKDDEGIKELIKRIQEKKDTNFSIDDQGTVWCGPRICVPAKKELRDLILKEAHESAYSIHPGSTKMYQDIKAYFWWAGMKRDVAEYWKWEEIGMDFITGLPRTPSGYDSIWVIVDRLTKSAHFVPVKTTYDGKKLAELYMTHVVCRFGCPKKIVSDRGTQFTSRFWKQLHEALGTDLNFSTAYHPQTDGQTERVNQILEDMLRACALDFEGTWDRCLPYAEFSYNNSYQASIQMSPNEAMFGRKCRTPLCWNEVGEALVFGPDILKSAEEQVKLIRERLKTAQNRQKNYADNRTRDLEFEKGDHVYLRVSPLRGMRRFGMSGKLAPRYIGPYLITARRGEVAYQLELPEGLADVHNVFHVSQLKKCLRVPEEQVPLGNIELEKNLTYKERPIKVLEEAERHTRRKTIKFYKVQWSNHSEDEATWEREDLLRAEFPELLP

SEQ ID NO: 20430 - protein, 1851 aa, Oryza sativa
  Clone ID: TF_OSC408311j.C1.p20.fg
MAVNASFSSHGFGEGHHVAQLRDLARFLGFSCPKYTGYSVDRVPPHCELSVYLYPRGGIHGAGLRPHHFTVARPTLQIAYQDLSWTALRRLAHDYSHRLEGSAFRQLPRLPSGHSDARYPCPYSESQPVLTRMVELSEAQATQHDLLLEAYRSLARRYAALEARLAEEGVTSVDTISWDSGRLCHASHLSSHSSRGSARTPSGPRSPSSRAPYSPVYSPYPHPVSPSYTPGHTPVASSRRGPRFIRTARKRVVGSSTVFRFHYPAPPPPAACAAAGPRQMASRLRRAARALARFGFEDGRVEPEENHESANEQSHHSNRSHRTVSRNAEVEQPRRSSRSHRIVSRDAEMEQSHRSHRTASHNSGEERLPSRPHVETNMQHLMAVQTQILQGLTTAIASFQHNAHGNGHPHMGNNRSKLTDFLRSRPPEFSQTVEPVEADDWLKDVDRKLNLVQFTPVEKTLYASHQLRGPAADWWENYCNAHPEPTNIAWDEFATAFRAAHVPESTIDMKKEEFNRLKQGNSSVNEYLSMFNKLARYAPEEVDTDKKKIRKFLKGIVVGMRLQLLAHDFPTFQHMINKALLLEDARKEATEEYKKRKSNHQGNSSRGAPRPRYGQPMQYHQSVTQANRQPGYAPRPQMNCPAPQPQQRAPSGNTAPNSVTSFKSPQGPSAVQCFRCNQMGHYARQCPQNPTNTNSGHANGSTARTPTPAAAQSRPSTQASGQGSRASNHFGRGRVNHIQAETAQDAPDVVMGMFSVNSVPAIVLFDSGASHSFISQAFVKRNGWKTQNLRVPMIVHSPRRNIRATQICPEVNLRIEEVDFLAKPIVLDSQSLDIILGIDWLAKHKGQIDCAEKSITLQGPGGKQVRFTPNTPTASRSILTCLQVTSLESVPIVCEYPDVFREELTRMPPDREIEFAIELAPGTAPIAKRPYRMTANELAEVKRQIEELESKGYVRPSSSPWGAPVLLVKKKDGSERMVINYRALNEVTIKNKYPLPRIDDLFDQLKGARVFSKIDLRSGYHQLKIRSEDIPKTAFSTRYGLYEFTVMSFGLTNAPAFFMNLMNKIFMEYLDQFVVVFIDDILIYSKNEEEHAEHLRLIMEKLRDHQLFAKFSKCEFWLDRVAFLGHVISSNGVEVDPSKVEAVLAWNPPKNVSEIRSFLGLAGYYRRFIEGFPKLARPMTELLKKEKKFQWSAACEDSFQEMKKRLTTAPVLTLPDIRKDFEIFCDASRQGLGCVLMQERKVVAYASRQLRPHEVNYPTHDLELAAVVHALKIWRHYLIGNRCEVYTDHKSLKYIFTQTELNMRQRRWLELIKDYDLGIHYHPGKANVVADALSRKAYLNVAQIRPDQDHLCRELEKLRLTVVQSGVPASLTVQPTLESQIREAQKDDEGIKELIKRIQEKKDINFSIDDQSTVWCGPRICVPAKKELRDLILKEAHESAYSIHPGSTKMYQDIKAYFWWAGMKRDVAEYVALCDVCQRVKAEHQRPAGLLQPLPIPEWKWEEIGMDFITGLPRTPNACDSIWVIVDRLTKSAHFVPVKTTYDGKKLAELYMTHVVCRFGCPKKIVSDRGTQFTSRFWKQLHEALGTDLNFSTAYHPQTDGQTERVNQILEDMLRACALDFEGTWDRCLPYAEFSYNNSYQASIQMSSNEAMFGRKCRTPLCWNEVGEALVFGPDILKSAEEQVKLIRERLKTAQNRQKNYADNRRRDLEFEKGDHVYLRVSPLRGMRRFGMSGKLAPRYIGPYLITTRRGEVAYQLELPEGLADVHNVFHVSQLKKCLRVPEEQVPLGNIVLEKNLTYKERPTKVLEEAECQTRRKTIKFYKVQWSNHSEDEATWEREDLLRAEFPELLP

SEQ ID NO: 20431 - protein, 1363 aa, Oryza sativa
  Clone ID: TF_OSC408596j.C1.p1.fg
MSNNRSKLTDFLRSRPPEFSQTVEPVEADDWLKDVDRKLNLVQCTPVEKTLYASHQLRGPAADWWENYCNAHPEPTNIAWDEFATAFRVAHVPESTIDMKKEEFNRLKQGNSSVNEYLSMFNKLARYAPEEVDTDKKKIRKFLKGIAVGMRLQLLAHDFPTFQHMINMALLLEDARKEATEEYKKRKSNHQGNSSRGAPRPRYGQPMQYHQSVTQANRQPGYAPRPQMNRPAPQPQQRAPSGNTAPNSVTSFKSPQGPSAVQCFRCNQMGHYARQCPQNPTNTNSGHANGSTARTPTPAAAQPRPSSQASGQGSRASNNFGRGRVNHIQAETAQDAPDVVMGMFSVNSVPAIVLFDSGAFHSFISQAFVKRNGWKTQNLRVPMIVHSPGRNIRATQICPEVNLRIEEVDFLAKPIVLDSQSLDIILGMDWLAKHKGQIDCAEKSITLQGPGGKQVRFTSNTPTASRSILTCLQVTSLESVPIVYEYPDVFPEELTSMPPDREIEFTIELAPGTAPIAKRPYRMAANELAEVKRQIEELESKSYVRPSSSPWGALVLLVKKKDGSERMVIDYRALNEVTIKNKYPLPQIDDLFDQLKGARVFSKIDLRSGYHQLKIRSEDIPKTAFSTRYGLYEFTVMSFGLTNAPAFFMNLMNKIFMEYLDQFVVVFIDDILIYSKNKEEHAEHLRLIMEKLRDHQLFAKFSKCEFWLDRVAFLGHVISSNGVEVDPSKVEAVLAWNPPKNVSEIRSFLDLAGYYRRFIEGFSKLARPMTELLKKENKFQWSAACEDSFQKMKKRLTTAPVLTLLDIRKDFEIFCDASRQGLGCVLMQERKRHYLIGNRCEVYTDHKSLKYIFTQTELNMRQRRWLELIKDYDLGIHDHPGKANVVGDALSRKAYSNVAQIRPDQDRLCRELEKLRLTVVQSGVPASLTVQPTLESQIREAQKDDEGIKELIKRIQEKKDTDFSIDDQGTVWCGPRICVPAKKELRDLILKEAHESAYSIHPGSTKIVKAEHQRPAGLLQPLPIPEWKWEEIGMDFITGLPRTPSGYDSIWVIVDRLTKSAHFVPVKTTFDGKKLAELYMTHVVCRFGCPKKIVSDRGTQFTSRFWKQLHEALGTDLNFSTAYHPQTDGQTERVNQILEDMLRACALDFEGTWDCCLPYAEFSYNNSYQASIQMSPNEAMFGRKCRTPLCWNEVGEALVFGPDILKAAEEQVKLIRERLKTAQNRQKNYADNRRRDLEFEKGDHVYLRVSPLRGMRRFGMSGKLAPRYIGPYLITARRGEVAYQLELPEGLVDVHNVFHVSQLKKCLRVPEEQVPLGNIVLEKNLTYKERPIKVLEEAERQTRRKTIKFYKVQWSNHSEDEAT

SEQ ID NO: 20432 - protein, 1761 aa, Oryza sativa
  Clone ID: TF_OSC414072j.C1.p1.fg
MTVPLLYNKETSVAVIICLPMIPALFPGSGINLQMAVNASVSSHGFGEGHHVAQLRDLARFLGFSCPEYTGYSVDRVPPRCELSVYLYPRGGIHGAGLRPHHFTVARPTLQIAYQDLSWTALRRLAHDYSHRLGGSAFRQLPRLPSGHADARYPCPYSESQPVLTRMVELSEAQATQHDLLLEAYRSLARRYAALEAHMAEEGVTSVDTVSWDSGRLCHASHLSSHSSRGSARTPSGPRSPSSRAPYSPVYSPYPHPVSPSYTPGHTPVASSRRGPRFIRTARKRVVGSSTVFRFHYPAPPPPAACAAAGPRQHLMAVQIQILQGLAAAVAGYQHNAHGNGHPHMGNNRSKLTDFLRSRPPEFSQTVEPVEADDWLKDVDRKLNLVQCTPVEKTLYASHQLRGPTADWWENYCNAYPEPTNIAWDEFATAFRAAHVPESTIDMKKEEFNRLKQGNSSVNEYLSMFNKLARYAPEEVDTDKKKIRKFLKGIAVGMRLQLLAHDFPTFQHMINKALLLEDARKEATEEYKKRKSNHQGNSSRGAPRPRYGQPMQYHQSVTQANRQPGYAPCPQMNRPAPQPQQRAPSGNTAPNSVTSFKSPQGPSAVQCFRCNQMGHYARQCPQNPTNTSSRHANGSTARTPTPAAAQSRPSSQASGQGTCASNNFGRGRVNHIQAETAQDAPDVVMGMFSVNSVPAIVLFDSGASHSFISQAFVKRNGWKTQNLRVPMIVHSPGRNIRATQICPEVNLRIEEVDFLAKPIVLDSQSLDIILGMDWLAKHKGQIDCAEKSITLQGPGGKQVRFTSNTPTASRSILTCLQVTSLESVPVVCEYPDVFPEELTSMPPDREIEFAIELAPGTAPIAKRPYRMVANELAEVKRQIEELKSKGYVRPSSSPWGAPVLLVKKKDGSERMIIDYRALNEVTIKNKYPLPRIDDLFDQLKGARVFSKIDLRSGYHQLKIRSEDIPKTAFSTRYGLYEFTLDQFVVVFIDDILIYSKNEEEHAEHLRLIMEKLRDHQLFAKFSKCEFWLDREAFLGHVISSNGVDVDPSKVEAVLAWNPPKNVLEIRSLLGLAGYYRRFIEGFSKLVRPMTELLKKEKKFHWSAACEDSFQEMKKRLTTAPVLTLPDIRKDFEIFCDASRQGLGCVLMQERKVVAYAFRQLRPHEVNYPTHDLELAAVFHALKIWRHYLIGNRCEVYTDHKSLKYIFTQTKLNMRQRRWLELIKDYDLGIHYHPGKANVVADALSRKAYCNVAQIRPDQDRLCRELEKLRLTVVQSGVPASLTVQPTLESQIREAQKDDEGIKELIKRIQEKKDTNFSIDDQGTVWCGPRICVPAKKELRDLILKEAHESAYSIHPGSTKMYQDIKAYFWWTGMKRDVAEYVALCDICQRVKAEHQRPAGLLQPLPIPEWKWEEIGMYFITGLPRTPSGYDSIWVIVDRLTKSAHFVPVKTIFDGKKLAELYMTHVVCRFGCPKKIVSDRGTQFTSRFWKQLHEALGTDLNFSTAYHPQTDGQTERVNQILEDMLRACALDFEGTWDRCLPYAEFSYNNSYQASIQMSPNEAMFGRKCRTPLCWNEVGEALVFGPDILKAAEEQVKLIRERLKTAQNRQKNYADNRRRDLEFEKGDHVYLRVSPLRGMRRFGMSGKLAPRYIGPYLITARRGEVAYQLELPEGLADVHNVFHVSQLKKCLRVPEEQVPLGNIELEKNLTYKERPIKVLEEAVRQTRRKTIKFYKVQWSNHSEDEATWEREDLLRAEFPELLP

SEQ ID NO: 20433 - protein, 949 aa, Oryza sativa
  Clone ID: TF_OSC415317j.C1.p1.gm
MGNNRSKLTDFLRSRPPEFSQTVELVEADDWLKDVDRKLNLVQCTPVEKTLYASHQLRGPAADWWENYCNAHPEPTNIAWDEFATAFRVAHVPESTIDMKKEEFNRLKQGNSSVNEYLSMFNKLARYAPEEVDSDKKKIRKFLKGIAVGMRLQLLAHDFPTFQHMINKALLLEDAKKEATEEYKKRKSNHQGNSSRGAPRPRYGQPMQYHQSVTQANRQPGYAPRPQMNRPAPQPQQRAPSGNTAPNSVTSFKSPQGPSAVQCFRCNQMGHYARQCPQNPTNTNSGHANGSTARTPTPAAAQSRPSTQASGQGSRASNHFGRGRVNHIQAETAQDAPDVVMGARVFSKIDLRSGYHQLKIRSEDIPKTAFSTRYGLYEFTVMSFGLTNAPAFFMNLMNKIFMEYLDQFVVVFIDDILIYSKNEEEHAEHLRLIMEKLRDHQLFAKFSKCEFWLDRVAFLGHVISSNGVEVNPSKVEAVLAWNPPKNVSEIRSFLGLAGYYRRFIEGFSKLARPMTELLKKEKKFQWSAACEDSFQEMKKRLTTAPVLTLPDIRKDFEIFCDASRQGLGCVLMQERKVVAYASRQLRPHEANYPTHDLELAAVVHALKIWRHYLIGNRCEVYTDHKSLKYIFTQTELNMRQRRWLELIKDYDLGIHYHPGKANVVADALSRKAYRNVAQIRPDQDHLCRELEKLRLTVEKKDTNFSIDNQGTVWCGPRICVPAKKELRDLILKEAHESAYSIHPGSTKMYQDIKAYFWWAGMKRDVAEYVALCDVCQRVKAEHQRPAGLLQPLPIPEWKWEEIGMDFITGLPRTPNGYDSIWDRQKSYADNRRRDLEFEKGDHVYLRVSPLHGMRRFGMSGKLAPRYIGPYLITARRGEVAYQLELPEGLAYVHNVFHVSQLKKCLRVPEEQVPLGNIVLEKNLTYKERPIKVLEEAERQTRRKTIKFYK

SEQ ID NO: 20434 - protein, 1869 aa, Oryza sativa
  Clone ID: TF_OSC415507j.C1.p7.fg
MTVPLLYNKETSVAVYTGYSVDRVPPHCELSVYLYPRGGIHGAGLRPHHFTVARPTLQIAYQDLSWTALRHLAHDYSHRLGGSAFRQLPRLPSGHSDARYPCPYSESQPVLTRMVELSEAQATQHDLLLEAYRSLARRYAALEARLAEEGVTSVDTISWDSGRLCHASHLSSHSSRGSACTPSGPRSPSSRAPYSPVYSPYPHPVSPSYTPDTPQLLPPAVAHALSAPRGSVLLVLPPCSVSATQLPHRQRPVLLPALDRFRRSLRASRSTFLRLRSRLQEAARPTRSRGGSLQQPSMASRPRRAARAPARFGFEDGRVEAEANHESANEQSHHSNRSHRTVSRNAEVEQPRRSNRSHRTVFRNAEMEQSHRSHRTASHNSGEEHLPPPPHVENNMQHIMAVQTQILQGLTTAIASFQHNAHGNGHPHVSSNRSKLTDFLRSHPPEFSQTVEPVEADDWLKDVDRKLNLVQCTPVEKTLYASHQLRGHAADWWENYCNAHPEPTNIAWDEFATAFRAAHVPESTIDMKKEEFNRLKQGNISVNEYLSMFNKLARYAPEEVDTDKKKIRKFLKGIAVGMRLQLLAHDFPTFQHMINKALLLEDARKEATEEYKKRKSNHQGNSSRGAPRPRYGQPMQYHQSVTQANRQPGYAPRPQMNRPAPQPQQRAPSSNTAPNSVTSFKSPQGPSAVQCFRCNQMGHYARQCPQNPTNTNSGHANGSTARTPTPAAAQSRPSSQASGQGSRASNHFGRGSVNHIQAETAQDAPDVVMGMFSVNSVPAIVLFDSGASHSFISQAFVKRNGWKTQNLRVPMIVHSPGRNIRATQICPEVNLRIEEVDFLAKPIVLDSQSLDIILGMDWLAKHKGQIDCAEKSITLQGPGGKQVRFTPNTPTASRSILTCLQVTSLESVPIVCEYPDVFPEELTSMPPDREIEFAIELAPGTAPIAKRPYRMAANELAEVKRQIKELESKGYVRPSSSPWGAPVLLVKKKDGSERMVIDYRALNEVTIKNKYPLPRIDDLFDQLKGARVFSKIDLRSGYHQLKIRSEDIPKTAFSTRYGLYEFTVMSFGLTNAPAFFMNLMNKIFMEYLDQFVVVFIDDILIYSKNEEEHVEHLRLIMEKLRDHQLFAKFSKCEFWLDRVAFLGHVISSNGVEVDPSKVEAVLAWNPPKNVSEIRSFLGLAGYYRRFIEGFSKLARPMTELLKKEKKFQWSAACEDSFQEMKKRLTTAPVLTLPDIRKDFEIFCDASRQGLGCVLMQERKVVAYASRQLRPHEVNYPTHDLELAAVVHALKIWRHYLIGNRCEVYTDHKSLKYIFTQTELNMRQRRWLELIKDYDLGIHYHPGKANVVADALSRKAYCNVAQIRPDQDHLCRELEKLRLTVVQSGVPASLTVQPTLESQIREAQKDDEGIKELIKRIQEKKDTNFSIDNQGTVWCGPRICVPAKKELRDLILKEAHESAYSIHPGSTKMYQDIKAYFWWAGMKRDVAEYVALCDICQRVKAEHQRPAGLLQPLPIPGWKWEEIGMDFITGLPRTPSGYDSIWVIVDRLTKSAHFVPVKTTYDGKKLAELYMTHVVCRFGCPKKIVSDRGTQFTSRFWKQLHEALGTDLNFSTAYHPQTDGQTERVNQILEDMLRACALDFEGTWDRCLPYAEFSYNNSYQASIQMSPNEAMYGRKCRTPLCWNEVGEALVFGPHILKSAEEQVKLIRERLKTAQNRQKNYADNRRRDLEFEKGDHVYLRVSPLRGMRRFGMSGKLAPRYIGPYLITARRGEVAYQLELPEGLADVHNVFHVSQLKKCIRVPEEQVPLGNIELEKNLTYKERPIKVLEEAERQTRRKTIKFYKVQWSNHSEDEATWEREDLLRAEFPELLP

SEQ ID NO: 20435 - protein, 1137 aa, Oryza sativa
  Clone ID: TF_OSC415705j.C1.p1.fg
MAVNASFSSHGFGEGHHVAQLRDLARFLGFSCPEYTGYSVDRVPPRCELSVYLYPRGGIHGAGLRPHHFSVARPTLQIAYQDLSWTALRRLAHDYSHHLGGSAFRQLPRLPSGHADARWLAAPAVQLVHQPASVLKKLRGPAADWWENYCNAHPEPTNIAWDEFATAFRAAHVPESTIDMKKEEFNRLKQGNSSVNEYLSMFNKLARYAPEEVDTDKKKIRKFLKGIAVGMRLQLLAHDFPTFQHMINKALLLEDARKEATEEYKKRNVTSFKSPQGPSAVQCFRCNQMGHYARQCPQNPTNTNSGHANGSTARTPTPAAAQSCPSSQASGQGSRASNNLGRGRVNHIQAETAQDAPDVVMVLLVKKKDGSKRMVIDYRALNEVTIKNKYPLPQIDDLFDQLKGARVFSKIDLRSGYHQLKIRSEDIPKTAFSTRYGLYEFTVMSFGLTNAPAFFMNLMNKIFMEYLDQFVVVFIDDILIYSKNEEEHAEHLRLIMEKLRDHQLFAKFSKCEFWLDRVAFLGHVISSNGVEVDPSKVEAVLAWNPPKNVSEIRSFLGLAGYYRRFIEGFSKLARPMTELLKKEKKFQWSAACEDSFQEMKKRQLRPHEVNYPTHDLELAAVVHALKIWRHYLIGNRCEVYTDHKSLKYIFTQTELNMRQRRWLELIKDYNLGIHYHPGKANVVADALSRKAYCNVARIRPDQDRLCRELEKLRLTVVQSGVPASLTVQPTLESQVREAQKDDEGIKELIKRIQEKKDTDFSIDDQGTVWCGPRICVPAKKELRDLILKEAHESAYSIHPGSTKMYQDIKAYFWWAGMKRDVAEYVALCDICQRVKAEHQRPAGLLQPLPIPEWKWEEIGMDFITGLPRTPSGYDSIWVIVDRLTKSAHFVPVKTTFDGKKLAELYMTHVVCRFGCPKKIVSDRGTQFTSRFWKQLHEALGTDLNFSTAYHPQTDALVFGPDILKAAEEQVKLIRERLKTAQNRQKNYADNRRRDLEFEKGDHVYLRVSPLRGMRRFGMSGKLAPRYIGPYLITARRGEVAYQLELPEGLADVHNVFHVSQLKKCLRVPEEQVPLGSIELEKNLTYKERPIKVLEEAERQTQRKTIKFYKVQWSNHSEDEATWEREDLLRAEFPELLP

SEQ ID NO: 20436 - protein, 1820 aa, Oryza sativa
  Clone ID: TF_OSC416839j.C1.p10.fg
MAVNASFSSHGFGEGHHVAQLRDLTRFLGFSCPEYTGYSVDRVPPHCELSVYLYPRGGIHGAGLRPHHFTVARPTLQIAYQDLSWTALRRLAHDYSHRLGGSAFRQLPRLPSGHSDARYPCPYSESQPVLTRMVELSEAQATQHDLLLEAYRSLARRYAALEARLAEEGVTSVDTISWDSGRLCHASHLSSHSSRGSARTPSGPRSPSSRAPYSPVYSPYPHPVSPSYTPGHTPVASSRRGPRFIRTARKRVVGSSTVFRFHHPAPPPPAARAAAGPRQMASRPRRATRAPARLGFEDGRVEAEANHEPANEQSHHSNRSHRTAPRNAEVEQPRRSNRSHRTVSRDAEMEQSLRSHRTASHSSGEERIPSPPHVENNIQHIMAVQTQILQGLTTAIASFQHNAHGNGHPHVGNNRSKLTDFLRSRPPEFSQTVEPVEADDWLKDVDRKLNLVQCTPVEKTLYASHQLRGPAADWWENYCNAHPEPTNIAWDEFATAFRAAHVPESTIDMKKEEFNRLKQGNSNDNEYLSQFNKLARYAPEEVNTDKKKIRRFLKGIAVGMRLQLLVHDFPTFQHMINKALLLEDARKEATEEYKKRKSNHQGNSSRGAPRPRYGQPMQYHQSVTQANRQPGYAPRPQMNRPAPQPQQRAPSGNTAPNSVTSFKSPQGPSVVQCFRCNQMGHYARQCPQNPTNTNSGHANGSTARTPTPAAAQSRPSSQASGQGSRASNNFGRGRVNHIQAETAQDAPDVVMGMFSVNSVPAIVLFDSGASHSFISQAFVKRNGWKTQNLRVPMIVHSPGRNIRATQICPEVNLRIEEVDFLAKPIVLDSQSLDIILGMDWLAKHKGQIDCAEKSITLQGPGGKQVRFTPNTPTASRMPPDREIEFAIELAPGTAPIAKRPYRMAANELAEVKRQIEELESKGYVRPSSSPWGAPVLLVKKKDGSERMVIDYRALNEVTIKNKYPLPRIDDLFDQLKGARVFSKIDLRSGYHQLKIRSEDIPKTAFSTRYGLYEFTVMSFGLTNAPAFFMNLMNKIFMEYLDQFVVVFIDDILIYSKNEEEHAEHLRLIMEKLRDHQLFAKFSKCEFWLDRVAFLGHVISSNGVEVDPSKVEAVLAWNPPKNVSEIRSFLGLAGYYRRFIEGFSKLARPMTELLKKEKKFQWSAACEGSFQEMKKRLTTAPVLTLPDIRKDFEIFCDASRQGLGCVLMQERKVVAYASRQLRPHEVNYPTHDLELAAVVHALKIWRHYLIGNRCEVYTDHKSLKYIFTQTELNMRQRRWLELIKDYDLGIHYHPGKANVVADALSRKAYCNVAQIRPDQDHLCRELEKLRLTVVQSGVPASLTVQPTLESQIREAQKDDEGIKELIKRIQEKKDTNFSIDDQGTVWCGPRIFVPAKELRDLILKEAHESAYSIHPGSTKMYQDIKAYFWWAGMKRDVAEYVALCDICQRIKAEHQRPAGLLQPLPIPEWKWEEIGMDFITGLPRTPSGYDSIWVIVDRLTKSAHFVPVKTTYDGKKLAELYMTHVVCRFGCPKKIVSDRGTQFTSRFWKQLHEALGTDLNFSTAYHPQTDGQTERVNQILEDMLRACALDFEGTWDRCLPYAEFSYNNSYQANIQMSPNEAMFGRKCRTPLCWNEVGEALVFGPDILKSAEEQVKLIRGRLKTAQNRQKNYADNRRRDLEFETGDHVYLRVSPLRGMKRFGMSGKLAPRYIGPYLITARRGEVAYQLELPEGLADVHNVFHVSQLKKCLRVPEEQVLLGNIELERNLTYKERPIKVLEEAERQTRRKTIKFYKVQWSNHSEDEATWEREDLLRAEFPELLP

SEQ ID NO: 20437 - protein, 1562 aa, Oryza sativa
  Clone ID: TF_OSC417333j.C1.p7.fg
MAVNASFSSHGFGEGHHVAQLRDLARFLGFSCPEYTGYSVDRVPPHCELSVYLYPRGDARYPCPYSESQPVLTRMVELSEAQATQHDLLLEAYRSLARRYAALEACLAEEGVTSVDTISWDSGRLCHASHLSSHSSRGSARTPSGPRSPSSRAPYSPVYSPYPHPVSPSYTPGHTPVASSRRGPRFIRTARKRVVGSSTVFRFHYPAPPPLAMASRPRRTARAPARFGFEDGRVEPEANHESANEQSHHSNRSHRTVSRNAEVEQPRRSSRSHRTVSRDAEMEQSHRSHHTASHNSGEERLPSPPHVENNMQHLMAVQTQILQGLTTAIASFQHNAHGNGHPHMGNNRSKLTDFLRSRPPEFSQTVEPVEADDWLKDVDRKLNLVQCTPVEKTLYASHQLRGPAADWWENYCNAHLEPTNIAWDEFATAFRAAHVPESTIDMKKEEFNRLKQGNSSVNEYLSQFNKLARYAPEEVDTDKKKIRKFLKGIAVGMRLQLLAHDFPTFQHMINKALLLEDARKEATEEYKKRKSNHQGNSSRGAPRPRYGQPMQYHQSVTQANRQPGYAPRPQMNRPAPPPQQRAPSGNTAPNSVTSFKSPQGPSAVQCFRCNQMGHYARQCPQNPTNTNSGHANGSTARTPTPAAAQSRPSSQASGQGSRASNNFGRGRVNHIQAETAQDAPDVVMGPGGKQIRFTPNTPTASRSILTCLQVTSLESVPIVCAYPDVFPEELTRMPPDREIEFAIELALGTAPIAKRPYRMAANELAEVKRQIEELESKGYVRPSSSPWGAPVLLVKKKDGSERMVIDYRALNEVTIKNKYPLPRIDDLFDQLKGARVFSKIDLRSGYHQLKIRSEDIPKTAFSTRYGLYEFTFVVVFIDDILIYPKNVSEIRSFLGLAGYYRRFIKGFSKLARPMTELLKKEKKFQWSAACEDSFQEMKKRLTTAPVLTLPDIRKDFEIFCDASRQGLGCVLMQERKVVAYASRQLRPHEVNYPTHDLELAAVVHALKIWRHYLIGNRCEVYTDHKSLKYIFTQTELNMRQRRWLELIKDYDLGIHYHPGKANVVADALSRKAYCNVAQIRPDQDHLCRELEKLRLTMVQSGVPASLTVQPTLESQIREAQKDDEGIKELIKRIQEKKDTNFSIDDQGTVWCGPRIYVPAKKELRDLILKEAHESAYSIHPGSTKMYQDIKAYFWWAGMKRDVAEYVALCDICQRVKAEHQRPAGLLQPLPIPEWKWEEIGMDFITGLPRTPSGYDSIWVIADRLTKSAHFVLVKTTYDGKKLAELYMTHVVCRFGCPKKIVSDRGTQFTSRFWKQLHEALGTDLNFSTAYHPQTDGQTERVNQILEDMLRACALDFEGTWDRCLPYAEFSYNNSYQASIQMSPNEAMFGRKCRTPLCWNEVGEALVFGPDILKSAEEQVKLIRERLKTAQNRQKNYADNRRRDLEFEKGDHVYLRVSPLHGMRRFGMSGKLAPRYIGPYLITARRGEVAYQLELPEGLADVHNVFHVSQLKKCLRIPEEQVPLVSEPEDPQCEDFEDQAPDLEQGKPPLNILNLYLKFNYVA

SEQ ID NO: 20438 - protein, 1620 aa, Oryza sativa
  Clone ID: TF_OSC4900j.C1.p6.fg
MGYSVDVFPLAVSSLCTFTLAEVYTELAFAHTTSLWLGPPSRSRTRTSPGLRFVAWPTTTATVSGALPSGSSHVFLLATQMPARFSFEEGRVEPEANHESANEQSHHSIRSHHTASRNAEVEQPHRSNRSHHTASRNAEVEQSHRSHRTASHNSGEERIPSPPHVENNMQHLMTVQTQILQGLAAAIAGFQHNAHGNGHPHMGNNRSKLTDFLRSRPPEFSQTVEPVEADDWLKDVDRKLNLVQCTPVEKMLYASHQLRGHAADWWENYCNAHPEPTNIAWDEFATAFRGAHVPESTIDTKKEEFNRLKQGNNSVNEYLSQFNKLARYAPKEVDTDKKKIRKFLKGIAVGMRLQLLAHDFPTFQHMINKALLLEDARKEATEEYKKRKFNHQGNSSRGAPRPRYGQPMQYHQSVTQANRQPGYAPRPQMNRPAPQPQQHAPSGNTAPNSVTSFKSPLGLSAVQCFRCNQMGHYARQCPQNPTNTNSGHANGSTARTPTPAAAQSRPSSQASGQGSRASNNFGRGRVNHIQAETAQDAPDVVMVHSPGRNIRATQICPEVNLRIEEVDFLAKPIVLDSQSLDIILGMDWLAKHKGQIDYAERSITLQGPRGKQVCFTTNTPTASRSILTYLQVTSLESVPIVCEYPDVFPEELTSMPPDREIEFAIELAPGTAPIAKRPYQMAANELAEVKRQIEELESKGYVRPSSSPWGAPVLLVKKKDGSERMVIDYRALNEVTIKNKYALPRIDDLFDQLKGARVFSKIDLRSGYHQLKIRSEDIPKTAFSTRYGLYEFTVMSFGITNAPAFFMNLMNKIFMEYLDQFVVVFIDDILIYSKNEEEHAEHLRLIMGKLRDHQLFAKFSKCEFWLDRVAFLGHVISFNGVEVDPSKVGAVLAWNPPKNVSEIHSFLGLAGYYRRFIEGFSKLARPMTELLKNEKKFQWSTACEDSFQEMKKRLTTAPVLTLPDIRKDFEIFCDASRQGVGCVLMQERKVVAYASRQLRPHEVNYPTHDLELAAVVHALKIWRHYLIGNRCEVYTDHKSLKYIFTQTELNMRQRRWLELIKDYDLGIHYHPGKANVVADALSRKTYYNVAQIWPDQDRLCGELEKLRLTVVQSGVPASLTVQPTLESQIREAQKDDEGIKELIKRIQEKKDTDFSNRRSRHSLKELRDPILKEAHESAYSIHPGSTKMYQDIKAYFWWAGMKRDVAEYVALCNICQRVKAENQRPAGLLQPLPIPEWKWEEIGMDFITGLPRTPSGYDSIWVIVDRLTKSAHFVPVKTTFDGKKLAELYMTHVVCRFGCPKKIVSDRGTQFTSRFWKQLHEALGTDLNFSTAYHPQTDGQTERVNQILEDMLPLVTSLTSRQSDLVTGLGLVAASAHAPASVSNSVGPSKLQNGSLRSEVTTSFADPSLYPLPLQIHRCHLSVPPDLAYLRSEAAVGTTKSLAILMKALILLVPARVAQGLGDTGVASLPSRPIISSHLYLIAAQASHQKTVPFFSSLKVLRLEPVARSTMGQPPRHRVESRWRSFREGTGDQRHARRSLRVASMQAERRASSQRSRNYYVACGKLGNDNTCGGDGILTGIWGEARVTKKSPHLSGNEWKNTNIYISYRNVGNNLTIEKK

SEQ ID NO: 20439 - protein, 1718 aa, Oryza sativa
  Clone ID: TF_OSC832j.C1.p1.fg
MAVNASFSSHGFGEGHHVAQLRDLARFLGFSCPEYTGYSVDRVPPRCELSVYLYPRGGIHGAGLRPHHFTMARPTLQIAYQDLSWTALCRLAHDYSHRLGGSAFRQLPHLPSSHADARYPCPYNESQPVLTRMVELSEAQATQHNLLLEAYCSLARRYAALEAHLAEEGVTSVDTVSWDSGRLCHASHLSSHSSRGSARTPSGPRSPSSRAPYSQVYSPYPHPVSPSYTPGHTPVASSRRGPRFIRTARKRVVGSSTVFCFDYPAPPPLAARAVGGPRQMASHPHRAARTPACFGFEEGRVEPEANHESANEQSHQSNRSHRTASRNAEVEQPHRSNRSHHTASRNTEVEQSHRSHRTASHNSGEERIPSPPHVENNMQHLMAVQTQILQGLAAAIAGFQHNAHGNGHPHMGNNRSKLTDFLRSRPPEFSQTIEPIEADDWLKDVDRKLNLVQCTPVEKTLYASHQLRGPAADWWENYCNAHPEPTNIAWGEFAMAFRAAHVPESAIDMKKEEFNRLKQGNNGVNEYLSQFNKLARYAPEEVDTDKKKIRKFLKGIAVGMRLQLLAHDFPTFQHMINKTLLLEDARKEATEEYKKRKSNHQGNSSLGAPHPRYGQPMQYHQSVTQANRQPGYAPRPQMNRPAPQPQQHTPSGNTAPNSVTSFKSPLGLSAVQCFRCNQMGHYARQCPQNPTNTNSGHANGSTARTRTPAAAQSRPSSQASGQGSRASNNFGRGRVNHIQAETAQDAPDVVMVHSPGRNIRATQICPGVNLRIEEVDFLAKPIVLDSQSLDIILGMDWLAKHKGQIDCAERSITLQGPGGKQVRFTSNAPTASRSILTCLQVTSLESVPIVCEYPDVFPEELTSMPPDREIQFAIELAPGTAPIAKRPYRMAANELAEVKRQIEELESKGYVRPSSSPWGAPVLLVKKKDGSERMVIDYRALNEVTIKNKYPLPRIDDLFDQLKGARVFSKIDLRSGYRQLKIRSEDIPKTAFSTRYGLYEFTVMSFGLTNAPAFFMNLMNKIFVEYLDQFVVVFIDDILIYSKNEEEHAEHLRLIMGKLRDHQLFAKFSKCEFCKVEAVLAWNPPKNVSEIRNFLGLAGYYRIFIEGFSKLARPMTELLKKEKKFEWTAACEDGFQEMKKRLTTVPVLTLPDIRKDFEIFCDASRQGLGCVLMQERKVVAYASRQLRPHEVNYPTHDLELAAVVHALKIWRHYLIGNRCEVYTDHKSLKYIFTQTELNMRQRRWLELIKDYDLGIHYHPGKANVVADALSRKTYCNEAQIWPAQDRLCRELEKLKLTVVQSGVPASLTVQPTLESQIREAQKDDEGIKELIKRIQEKKDTDFSIDDQGTVWCGPRICVPAKKELRNLILKEAHESAYSIHPGSTKMYQDIKAYFWWAGMKRDVAEYVALCDICQRVKAEHQRPAGLLQPLPIPEWKWEEIGMDFITGLPTTPSGFGCPKKIVSDRGTQFTSRFWKQLHEALGTNLNFSTAYHPQTDGQTERVNQILEDMLRACALDFEGTWDRCLPYAEFSYNNSYQASIQMSPNETMFGRKCRTPLCWNEVGEALNYADNRRRDLEFEKGDHVYLRVSPLRGMRRFGMSGKLAPRYIGPYLITARRGEVAYQLELPESLADVLNVFHVSQLKKCLRVPEEQVPLDNIELEKNLTYKEIPIKVLEEAERQTRRKTIKFYKVQWSNHSEDEATWEREDLLRAEFPELLP

SEQ ID NO: 20440 - protein, 1416 aa, Oryza sativa
  Clone ID: TF_OSC900019j.C1.p10.fg
MEQSHRSHHTASHNSGEERLPSPPHVENNMQHLMAVQTQILQGLTTAIASFQHNAHGNGHPHMGNNRSKLTDFLRSRPPEFSQTVEPVEADDWLKDVDRKLNLVQCTPVEKTLYASHQLRGPAADWLENYCNAHPEPTNISWDEFATAFRAAHVPESTIDMKKEEFNRLKQGNSSVNEYLSQFNKLARYAPEEVDTDKKKIRKFLKGIAVGMRLQLLAHDFPTFQHMINKALLLEDARKEATEEYKKRKSNHQGNSSRGALRPRYGQPMQYHQSVTQANRQPGYAPRPQMNRPAPQPQQRAPSGNTAPNSVTSFKSPQGPSAVQCFRCNQMGHYARQCPQNPTNTNSGHANGSTARTPTPAAAQFRPSSQASGQGSRASNHFGRGRVNHIQAETAQDAPDVVMGMFSVNSVPAIVLFDSGASHSFISQAFVKRNGWKTQNLRVPMIVHSPGRNIRATQICPEVNLRIEEVDFLAKPIVLDSQSLDIILGMDWLAKHKGQIDCAEKSITLQGPGGKQVRFTPNTPTVSRSILTCLQVTSLESVPIVCEYPDVFPEELTSMPPDREIEFAIELAPGTAPIAKRPYRMAANELAEVKRQIEELESKGYVRPISSPWGAPVLLVKKNDGSERMVIDYRALNEVTIKNKYPLPRIDDLFDQLKGARVFSKIDLRSGYHQLKIRSEDIPKTAFSTRYGLYEFTVMSFGLTNAPAFFMNLMNKIFMEYLDQFVVVFIDDILIYSKNEEEHAEHLRLIMEKLRDHQLFAKFSKCEFWLDRVAFLGHVISSNGVEVDPSKVEAVLAWNPPKIVSEIRSFLGLAGYYRRFIEGFSKLARPMTELLKKEKKFQWSVACEDSFQEMKKRLTTAPVLTLPDIRKDFEIFCDASRQGIGCVLMQERKVVAYASRQLRPHEANYPTHDLELAAVVHALKIWRHYLIGNRCEVYTDHKSLKYIFTQTELNMRQRRWLELIKDYDLGIHYHPGKANVVADALSRKAYCNVAQIRPDQDHLCRELEKLRLTVVQSGVPASLTVQPTLESQIREAQKDDEGIKELIKRIQEKKDTNFSIDDQGTVWCGQRICVPTKKELRDLILKEAHESAYSIHPGSTKMYQDIKAYFWWAGMKRDVAEYVALCDICQRVKAEHQRPAGLLQPLPIPEWKWEEIGMDFITGLARTPSGYDSIWVIVDRLTKSAHFVPVKTTYDGKKLAELYMTHVVCRFGCPKKIVSDRGTQFTSRFWKQLHEALGTDLNFSTAYHPQTDGQTERTAQSRQKNYADNRRRDLEFEKGDHVYLRVSPLRGMRRFGMSGKLAPRYIGPYLITARRGEVTYQLELPEGLADVHNVFHVSQLKKCLRVPEEQVPLGNIELEKNLTYKERPIKVLEEAERQTRRKTIKFYKVQWSNHSEDEATWEREDLLRAEFPELLP

SEQ ID NO: 20441 - protein, 1326 aa, Oryza sativa
  Clone ID: TF_OSC900174j.C1.p21.fg
VDSRGSPGTELEFNRLKQGNSSVNEYLSMFNKLARYAPEEVDTDKKKIRKFLKGIAVGMRLQLLAHDFPTFQHMINKALLLEDARKEATEEYKKRKSNHQGNSSRGAPRPRYGQPMQYHQSVTQANRQPGYAPCPQMNRPAPQPQQRAPSGNTAPNSVTSFKSPQGPSAVQCFRCNQMGHYARQCPQNPTNTSSRHANGSTARTPTPAAAQSRPSSQASGQGTCASNNFGRGRVNHIQAETAQDAPDVVMGMFSVNSVPAIVLFDSGASHSFISQAFVKRNGWKTQNLRVPMIVHSPGRNIRATQICPEVNLRIEEVDFLAKPIVLDSQSLDIILGMDWLAKHKGQIDCAEKSITLQGPGGKQVRFTSNTPTASRSILTCLQVTSLESVPVVCEYPDVFPEELTSMPPDREIEFAIELAPGTAPIAKRPYRMVANELAEVKRQIEELKSKGYVRPSSSPWGAPVLLVKKKDGSERMIIDYRALNEVTIKNKYPLPRIDDLFDQLKGARVFSKIDLRSGYHQLKIRSEDIPKTAFSTRYGLYEFTLDQFVVVFIDDILIYSKNEEEHAEHLRLIMEKLRDHQLFAKFSKCEFWLDREAFLGHVISSNGVDVDPSKVEAVLAWNPPKNVLEIRSLLGLAGYYRRFIEGFSKLVRPMTELLKKEKKFHWSAACEDSFQEMKKRLTTAPVLTLPDIRKDFEIFCDASRQGLGCVLMQERKVVAYAFRQLRPHEVNYPTHDLELAAVFHALKIWRHYLIGNRCEVYTDHKSLKYIFTQTKLNMRQRRWLELIKDYDLGIHYHPGKANVVADALSRKAYCNVAQIRPDQDRLCRELEKLRLTVVQSGVPASLTVQPTLESQIREAQKDDEGIKELIKRIQEKKDTNFSIDDQGTVWCGPRICVPAKKELRDLILKEAHESAYSIHPGSTKMYQDIKAYFWWTGMKRDVAEYVALCDICQRVKAEHQRPAGLLQPLPIPEWKWEEIGMYFITGLPRTPSGYDSIWVIVDRLTKSAHFVPVKTIFDGKKLAELYMTHVVCRFGCPKKIVSDRGTQFTSRFWKQLHEALGTDLNFSTAYHPQTDGQTERVNQILEDMLRACALDFEGTWDRCLPYAEFSYNNSYQASIQMSPNEAMFGRKCRTPLCWNEVGEALVFGPDILKAAEEQVKLIRERLKTAQNRQKNYADNRRRDLEFEKGDHVYLRVSPLRGMRRFGMSGKLAPRYIGPYLITARRGEVAYQLELPEGLADVHNVFHVSQLKKCLRVPEEQVPLGNIELEKNLTYKERPIKVLEEAVRQTRRKTIKFYKVQWSNHSEDEATWEREDLLRAEFPELLP

SEQ ID NO: 20442 - protein, 1759 aa, Oryza sativa
  Clone ID: TF_OSC900225j.C1.p12.fg
MWSYLSYVWMKFQGNRSLSARAGNRTPVMAVNASFSSHGFGEGHHVAQLRDLARFLGFSCPEYTGYSVDRVPPHCELSVYLYPRGGIHGAGHFTVARPTLQIAYQDLSWTALRRLAHDYSHRLGGSAFRQLPRLPSGHSDARYPCPYSESQPVLTRMVELSEAQATQHDLLLEAYRSLARRYAALEARLAEEGVTSVDTISWDSGRLCHASHLSSHSSRGSARTPSGPRSPSSRAPYSPVYSPYPHPVSPSYTPGHTPVASSRRGPRFIRTARKRVVGSSTVFRFCHPAPPPPAARAAAGPRQTQILQGLTTAIASFQHNAHGNGHPHVGNNRSKLTDFLRSRPPKFSQTVEPVEADDWLKDVDRKLNLVQCTPVEKTLYASHQLRGPAADWWENYCNAHPEPTNIAWDEFATAFRAAHVPESTIDMKKEEFNRLKQGHSSVNEYLSQFNKLARYAPEEVDTDKKKIRKFLKGIAVGMRLQLLAHDFPTFQHMINKALLLEDARKEATEKYKKRKSNHQGNSSRGAPRPRYGQPMQYHQSLTQANRQPGYAPRPQINRPAPQPQKHAPSGNTAPNSVTSFKSPQGPSAVQCFRCNQMGHYARQCPQNPTNTNSGHANGSTARTPTPAAAQSRPSSQASGQGSRASNHFGRGRVNHIQAETAQDAPDVVMGMFSVNSVPAIVLFDSGASHSFISQAFVKRNGWKTQNLRVPMIVHSPGKNIGATQICPEVNLRIEEVDFLAKPIVLDSQSLNIILGMDWLAKHKGQIDCAEKSITLQGPGGKQVRFTPNTPTASRSILTCLQVTSLESVPIVCEYPDVFPEELTRMPPDREIEFAIELAPGTAPIAKRPYRMAANELAEVKRQIEELESKGAPVLLVKKKDGSERMVIDYRALNEVTIKNKYPLPRIDDLFDQLKGARVFSKIDLRSGYHQLKIRSEDIPKTAFSMRYGLYEFTVMSFGLTNAPAFFMNLMNKIFMEYLDQFVVVFIDDILIYSKNEEEHAEHLRLIMEKLRDHQLFAKFSKCEFWLDRVAFLGHVISSNGDEVDPSKVEAVLAWNPPKNVSVIRSFLGLARYYRRFIEGFSKLARPMTELLKKEKKFQWSTACEDSFQEMKKRLTTAPVLTLPDIRKDFEIFCDASRQGLGCVLMQERKVVAYASRQLRPHEVNYPTHDLELAAVIHALKIWRHYLIGNRCEVYTDHKSLKYIFTQTELNMRQRRWLELIKDYDLGIHYHPGKANVVADALSRKAYCNVAQIRPDQDHLCRELEKLRLTVVQSGVPASLTVQPTLESQIREAQKDDEGIKELIKRIQEKKDTNFSIDDQGTVWCGSRICVPAKKELRDLILKEAHESAYSIHPGSTKMYQDIKAYFWWAGMKRDVAEYVALCDICQRVKAEHQRPAGLLQPLPIPEWKWEEIGMDFITGLPRTPSGYDSIWVIVDRLTKSAHFVPVKTTYDGKKLAELYMTHVVCRFGCPKKIVSDRGTQFTSRFWKQLHEALGTDLNFSTAYHPQTDGQTERVNQILEDMLRACALDFEGTWDRCLPYAEFSYNNSYQASIQMSPNEAMFGRKCRTPLCWNEVGEALVFGPDILKSAEEQVKLIRERLKTAQDRQKNYADNRRRDLEFEKGDHVYLRVSPLRGMRRFGMSGKLAPRYIGPYLITARRGEVAYQLELPEGLADVHNVFHVSQLKKCLRVPEEQVPLGNIELEKNLTYKERPIKVLEEAERQTRRKTIKFYKVQWSNHSEDEATWEREDLLRAKFPELLP

SEQ ID NO: 20443 - protein, 1629 aa, Oryza sativa
  Clone ID: TF_OSC900240j.C1.p1.fg
MVELSEAQATQHDLLLEAYRSLARRYAALEACLAEEGVTSVDTISWDSGRLCHASHLSSHSSRGSALTPSGPRSPSSRAPYSPVYSPYPHPVSPSYTPGHTPVASSRRGPRFIRTARKRVVGSSNVFRFHYPAPPPPAARAAAGPRQMASRPRRAARAPARFGFEDGRVEPEENHESANEQSHHSNRSHRTVSRNAEVEQPRHSSRSHRTVSRDAEMEQSHRSHRTASHNSGEERLPSPPHVETNMQHLMAVQTQILQGLTTAIASFQHNAHGNGHPHMGNNRSKLTDFLRSRPPEFSQTVEPVEADDWLKDVDRKLNLVQCTPVEKTLYASHQLRGPAADWWENYCNAHPEPTNIAWDEFATAFRAAHVPESTIDMKKEEFNRLKQGNSSVNEYLSQFNKLARYAPEEVDTDKKKIRKFLKGIAVGMRLQLLAHDFPTFQHMINKALLLEDARKEATEEYKKRKSNHQGNSSRGAPRPRYGQPMQYHQSVTQANRQPGYAPRPQINRPAPQPQQRAPSSDTAPNSVTSFKSPQGPSAVQCFRCNQMGHYARQCPQNPTNTNSGHANGSTARTPTLAAAQSRPSSQASGQGSRASNNFGRGRVNHIQAETTQDAPDVVMGMFSVNSVPAIVLFDSGASHSFISQAFVKRNGWKTQNLRVPMIVHSPGRNIRATQICPEVNLRIEEVDFLAKPIVLDSQSLDIILGMDWLAKHKGQIDCAEKSITLQGPGGKQVRFTPNTPTASRSILTCLQVTSLESVPIVYEYPDKKDGSERMVIDYRALNEVTIKNKYPLPRIDDLFDQLKGARVFSKIDLRSGYHQLKIRSEDIPKTAFSTRYGLYEFTVMSFGLTNAPAFFMNLMNKIFMEYLDQFVMVFIDDILIYSKNKEEHAEHLRLIMEKLRDHQLFAKFSKCEFWLDRVAFLGHVISSNGVEVDPNKVEAVLAWNPPKNVSEIRSFLGLAGYYRRFIEGFSKLARPMTELLKKEKKFQWSAACEDSFQELKKRLTTAPVLTLPDIRKDFEIFCDASRQGLGCVLMQEQKVVAYASRQLRPHEANYPTHDLELAAVVHALKIWRHYLIGNRCEVYTDHKSLKYIFTQTELNMRQRRWLELIKDYDLGIHYHPGKANVVADALSRKAYCNVAQIRPDQDHLCRELEKLRLTVVQSGVPASLTIQPTLESQIREAQKDDEGIKELIKRIQEKKDTNFSIDDQGTVWCGPRICVPAKKELRDLILKEAHESAYSIHPGSTKMYQDIKAYFWWAGMKRDVAEYVALCDICQRVKAEHQRPAGLLQPLPIPEWKWEEIGMDFITGLPRTPNGYDSIWVIVDRLTKSAHFVPVKTSYDGKKLAELYMTHVVCRFGCPKKIVSDRGTQFTSRFWKQLHEALGTDLNFSTAYHPQTDGQTERVNQILEDMLRACALDFEGTWDRCLPYAEFSYNNSYQASIQMSPNEAMFGRKCRTPLCWNEVGKALHRTVRRITLTIGGVTLSSKKEIMCGDHVYLRVSPLRGMRRFGMSGKLAPRYIGPYLITARRGEVAYQLELPEGLADVHNVFHVSQLKKCLRVPEEQVPLGNIELEKNLTYKERPIKVLEEAERQTRRKTIKFYKVQWSNHSEDEATWEREDLLRAEFPDLLP

SEQ ID NO: 20444 - protein, 1824 aa, Oryza sativa
  Clone ID: TF_OSC900246j.C1.p23.fg
MNRILQMRSSSRSKPATMAVNASFSSHGFGEGHHIAQLRDLARFLGFSCPEYTGYSVDRVPPRCELSVYLYPRGGIHGAGLRPHHFTVARPPLQIEYQDLSWTALRRLAHDYSHRLGGSAFRQLPRLPSGHVVARYPCPYSESQPVLTRMVELSEAQATQHDLLLEAYRSLARRYAALEARLAEEGVTSVDTVSWDSGRLCHAIHLSSHSSRGSARTPSGPLSPSSRAPYSPVYSPYPNPVSPSYTPGHTPVASSRRGPRFIRTARKRVVGSSTVFRFDYPAPPPPVALAAVGPRQMASRPRRAARAPARFVFEEGRVEPEENHESANERSHHSNRSHRTASRNAEVEQPRRINRSHRTASRNAEMEQSHRSHRTASHNSGEERLPSPPHVENNMQHLMAVQTQILQGLAAAVAGFQHNAHGNGHPHMSNNRSKLTDFLRSRPPEFSQTIEPVEADDWLKDVDRKLNLVQCTPVEKTLYTSHQLRGPAADWWENYCNAHPEPTNIAWDEFATAFRAAHVPESTIDMKKEEFNRLKQGNSSVNEYLSMFNKLARYAPEEVDTDKKKIRKFLKGIAVGMRLQLLAHDFPTFQHMINKALLLEDARKEATEEYKKRKSNHQGNSSRGAPRPRYGQPMQYHQSVTQANRQPGYAPRPQMNRPAPQPQQRAPSGNTAPNSVTSFKSPQGPSAVQCFRCNQMGHYARQCPQNPTNTSSGHANGSTARTPTPAAAQSRPSSQASGQGSRASNNFGRGRMNHIQAETAQDAPDVVMGMFSVNSVPAIVLFDSGASHSFISQAFVKRNGWKTQNLRVPMIVHSPRSNIRATQICPEVNLRIEEVDFLAKPIVLDSQSLDIILGMDWLAKHKGQIDCAEKSITLQGPGGKQARFTSNTPTASRSILTCLQVTSLESVPIVCEYPDVEFAIELAPSTAPIAKRPYRMAANELAEVKRQIEELESKGYVRPSSSPWGAPVLLVKKKDGSERMVIDYRALNEVTIKNKYPLPRIDDLFDQLKGARVFSKIDLRSGYHQLKIRSEDIPKTAFSTRYGLYEFTVMSFGLTNAPAFFMNLMNKIFMEYLDQFVVVFIDDILIYSKNEEEHAEHMRLIMEKLRDHRLFAKFSKCEFWLDRVAFLGHVISSNGVEVDPSKVEAVLAWNPPKNVSEIRSFLGLAGYYRRFIEGFSKLARPMTELLKKEKKFQWSAACEDSFQEMKKRLTTAPVLTLPDIRKHFEIFCDASRQGLGCVLMQERKVVAYASRQLRPHEVNYPTHDLELAAVVHALKIWRHYLIGNRCEDYDLGIHYHPSKANVVADALSRKVYCNVAQIWPDQDRLCRELEKLRLTVVQSGVPASLTVQPTLESQIREAQKDDEGIKELIKRIQEKKDTDFSIDDQGTVWCGPCICVPAKKELRDLILKEAHESAYSIHPGSTKMYQDIKAYFWWAGMKRDVAEYVALCDICQRVKAEHQRPAGLLQPLPIPEWKWEEIGMDFITGLPRTPGGYDSIWVIVDRLTKSAHFVPVKTTFDGKKLAELYMTHVVCRFGCPKKIVSDRGTQFTSRFWKQLHEALGTDLNFSTAYHPQTDGQTERVNQILEDMLRACALDFEGTWDHCLPYAEFSYNNSYQASIQMSPNEAMFGRKCRTPLCWNEVGEALVFGPDILKSAEEQVKLIRERLKTAQNRQKNYADNRRRDLEFEKGDHVYLRVSPLRGMRFGMSGKLAPRYIGPYLVTARRGEVAYQLELPEGLADVHNVFHVSQLKKCLRVLEEQVPLGNIELEKNLTYKERPIKVLEEAERQTRRKTVKFYKVQWSNHSEDEATWEREDLLRAEFPELLP

SEQ ID NO: 20445 - protein, 1792 aa, Oryza sativa
  Clone ID: TF_OSC900308j.C1.p18.fg
MMAVNASFSSHGFGEGHHVAQLRDLARFLGFSCPEYTGYSVDRVPPHCELSVYLYPRGGIHGAGLCPHHFTVARPTLQIAYQDLSWTALRRLAHDYSHRLGGSAFRQLPHLPSGHSDARYPCPYSESQPVLTRMVELSEAQATQHDLLLEAYRSLARRYAALEARLAEEGVTSVDTISWDSGRLCHASHLSSHSSRGSARTPSGPRSPSSRAPYSPVYSPYPHPVSPSYTPGHTPVASSRRGPRFIRTARKRVVGSSTVFRFHYPAPPPPAARAAAGPRQMASRPRRAARAPARFGFEDGRVEPEENHESANEQSHHSNRSHRTVSRNTEVEQPRRSSRSHRTVSRDAEMEQSHRSHRTASHNSGEERLPSPPHVETNMQHLMAVQTQILQGLTTAIASFQHNAHGNGHPHMGNNRSKLTDFLRSRPPEFSQTVEPVEADDWLKDVDRKLNLVQCTPVEKMLYAFHQLRGPAADWWENYCNAHPEPTNIAWDEFATAFRAAHVPESTIDMKKEEFNRLKQGNSSVNEYLSQFNKLARYAPEEVDTDKKKIRKFLKGIAVGMRLQLLAHDFPTFQHMINKALLLEDARKEATEEYKKRKSNHQGNSSRGTPRPRYGQPMQYHQSVTQANRQPGYTPRPQMNRPAPPPQQCAPSGNTAPNSVTSFKSPQGPSAVQCFRCNQMGHYARQCPQNPTNTNSGHANGSTARTPTPAAAQSRPSSQASRQGSRASNHFGRGRVNHIQAETAQDAPDAVMGMFSVDSVPAIVLFDSGASHSFISQAFVKRNGWKTQKLRVPMIVHSPGRNIRATQICPEVNLRIEEVDFLAKPIVLDSQSLDIILGMDWLAKHKGQIDCAEKSITLQGPAGKQVRFTPNTPTASRSILTCLQVTSLESVPIVYEYPDVFLEELTRMPPDREIEFAIELAPGTAPIAKRPYRMAANELAEVKRQIEELESKGYVRPSSSPWGAPVLLVKKKDGSERMVIDYRALNEVTIKNKYPLPRIDDLFDQLKGARVFSKIDLRSGYHQLKIRSEDIPKTAFSTRYGLYEFTVMSFGLTNAPAFFMNLMSKIFMEYLDQFVVVFIDDILIYSKNEEEHAEHLRLIMEKLRDHQLFAKFSKCEFWLDRVAFLGHVISPNGVEVDPSKVEAVLAWNPPKNVSEIRSFLGLAGYYRRFIEGFSKLARPMTELLKKEKKFQWSAACEDSFQEMKKRLTTAPVLTLPDIRKDFEIFCDASRQGLGCVVMQERKVVAYASRQLRPHEVNYPTHDLELAAVVHALKIWRHYLIGNRCEVYTDHKSLKYIFTQTELNMRQRRWLELIKDYDLGIHYHPGKANVVADALSRKAYCNVAQIRPDQDHLCRELEKLRLTVVQSGVPASLTVQPTLESQIREAQKDDEGIKELIKRIQEKKDTNFSIDDQGTVWCGPRICVPAKKELRDLILKEAHESAYSIHPGSTKMYQDIKAYFWWAGMKRDVAEYVALCDICQRVKAEHQRPAGLLQPLPIPEWKWEEIGMDFITGLPRTPNGYDSIWVIVDRLTKSAHFVPVKTTYDGKKLAELYMTHVVCRFGCPKKIVSDRGTQFTSRFWKQLHEALGTDLNFSTAYHPQTDGQTERVGEALIFGPDILKSAEVQVKLIRERLKTAQNRQKNYADNRRHDLEFEKGDHVYLRVSPLRGMRRFGMSGKLAPRYIGPYLITARRGEVAYQLELPEGLADVHNVFHVSQLKKCLRVPEEQVPLGNIELEKNLTYKERPIKVLEEAKRQTRRKTIKFYKVQWSNHSEDEATWEREDLLRAEFPELLP

SEQ ID NO: 20446 - protein, 1598 aa, Oryza sativa
  Clone ID: TF_OSC900308j.C1.p26.fg
MAANSIRAQELAWVVELSMMANSVQYMASRPRRAARAPARFGFEDGRVEPEENHESANEQSHHSNRSHRTVSRNAEVEQPRRSSRSHRTVSRDAEMEQSHRSHRTASHNSGEERLPSPPHVETNMQHLMAVQTQILQGLTTAIASFQHNAHGNGHPHMGNNRSKLTDFLRSRPLEFSQTVEPVEADDWLKDVDRKLNLVQCTPVEKTLYASHQLRGPTADWWENYCNAHPEPTNIAWDEFATAFRAAHVPESTIDMKKEEFNRLKQGNSSVNEYLSQFNKLARYAPEEVDTDKKKIRKFLKEIAVGMRLQLLAHDFPTFQHMINKALLLEDARKEATEEYKKRKSNHQGNSSRGAPRPRYGQPMQYHQSVTQANRQPGYAPRPQINRPAPQPQQRAPSSDTAPNSVTSFKSPQGPSAVQCFRCNQMGHYARQCPQNPTNTNSGHANGSTSRTPTPAAAQSRPSSQASGQGSRASNNFGRGRVNHIQAETAQDAPDVVMGMFSVNSVPAIVLFDSGASHSFISQAFVKRNGWKTQNLRVPMIVHSPGSNIRATQICPEVNLRIEEVDFLAKPIVLDSQSLDIILGMDWLAKHKGQIDCAEKSITLQGPGGKQVRFTPNTPTASRSILTCLQVTSLESVPIVCEYPDVFPEELTRMPPDQEIEFAIELAPGTAPIAKRPYRMAANELAEVKRQIEELESKGYVRPSSSPWGAPVLLVKKKDGSERMVIDYRALNEVTIKNKYPLPRIDDLFDQLKGARVFSKIDLRSGYHQLKIRSEDIPKTAFSTRYGLYEFTVMSFGLTNAPAFFMNLMNKIFMEYLDQFVVVFIDDILIYSKNEEEHAEHLRLIMEKLRDHRLFAKFSKCEFWLDRVAFLGHMISSNGVEVDPSKVEAVLAWNPPKNVSEIRSFLGLAGYYRRFIEGFSKLARPMTELLKKEKKFQWSAACEDSFQELKKRLTTAPVLTLPDIRKDFEIFCDASRQGLGCVLMQEQKVVAYASRQLRPHEANYPTHDLELAAVVHALKIWRHYLIGNRCEVYTDHKSLKYIFTQTELNMRQRRWLELIKDYDLGIHYHPGKANVVADALSRKAYCNVAQIRPDQDHLCRELVKLRLTMVQSGVPASLTVQPTLESQIREAQKDDEGIKELIKRIQEKKDTNFSTDDQGTVWCGPRICVPAKKELRDLILKEAHESAYSIHPGSTKMYQDIKAYFWWAGMKRDVAEYVALCDICQRVKPEHQRPAGLLQPLPIPEWKWEEIGMDFITGLPRTPNGYDSIWVIVDRLTKSAHFVPVKTTYDGKKLADLYMTHVVCRFGCPKKIVSDRGTQFTSRFWNQLHEALGTDLNFSTAYHPQTDGQTERVNQILEDMLRACALDFEGTWDRCLPYAKFSYNNSYQASIQMSPNEAMFGRKCRTPLCWNEVGKALVFGPDILKLAEEQVKLIRERLKTAQNRQKNYADNRRRDLEFEKGDHVYLQVSPLRGMRRFGMSGKLAPRYIGPYLITARRGEVAYQLELPEGLADMHNVFHVSQLKKCLRVPEEQVPLGNIELEKNLTYKERPIKVLEETERQTRRKTIKFYKVQWSNHSEDETTWEREDLLRAEFPDLLP

SEQ ID NO: 20447 - protein, 688 aa, Oryza sativa
  Clone ID: TF_OSC400732j.C1.p19.fg
MSHLEGTGGLDDKGDASSTKDTGPKGATIHFDYGKLNVPPHNFVSVPSGRVPQFDGTHYAAWKHKMKLHLISLHPSIWKVVCTEEFNKVDGLEEAKEIWERRPRRYGILCNWLMRDHPPFRLLRAFGPRNPTLVLMIRERKDFKRLTPSDILGRIVCHEMQEEEAREVRQMVKNATMIKNQEVVLKAKQEEESSYEESEDEEMAFIVKRFKHFLRKSGYGKGRKEDDKGKRQSKRACFNCGKYGHFIADCPKSNEAKVKGGKKKPERAHVAEAHMAEESLAKECAKNEQLANELNLANGSLASLRDVNETLQDKFANLDKSHKDLEVQFDTLSNSTYQPNVVSNPSNPSTSNGCARCYNIDLNSYDTNVDAMQALKKENERLGTLMKYGCMKTYHSKDALYKTITAHPNKDGHGLRFSGGSPVSKRVMVNGKECLMFVREGKAPQASEVTCPFTGQTPGSSGQNDRKFLPCKTGSFKHFVRKFRASDRQKGLTGSSGYNTRKFRPEDLYYDSYVISKNSEGKMVAYFNGNYNDEYRTCVGVPKALAYSSGGSSWVVDSGCTNYMMGERSMFTSLDEEGGSRENIVFGDNGKGKVMGLGFNCLFTDVDMTVFKRDDSSIALKGVLKGDLYLVDFDVDRVNPEACLIAKSSMRWLWHRRLAHVGMRNLASLLKGEHIIGLSNVSFEKDRV

SEQ ID NO: 20448 - protein, 487 aa, Oryza sativa
  Clone ID: TF_OSC14509j.C1.p1.fg
MSWHKAGVLLLGGSILPACPGGSGRRWGWMFNREKEKNVRGYASSNSSFQLNPPLASRELTRAHPWSIPSMLLGSQLPLVGSQDQNQYVFDQAFATQVNELPMPEEHVPFCHDCREQGHYALNCPWVYAKEAPSFGLAGQTSLNPPPRTKSSLQPSVQGREPNGENPLNPENCFPPSLSYHVGSRTKQAKGKKSKSQKRKAPMRTKEEVRKMTITSAEWPPAGITIPRRQRGNTFRGARRLTQHLLSHGGRVSDQVSSDDEDESPRHLGEEEMESKACTRCGEIGHVASMCLTLCLHCEEDHPPDRCPTSRITCFFCEGTDHVPKDCQSSFLLTKKMANQPASSNGEKHQGNTNPRQDYSFSLTPVPGQRNQNEKRKCRVREDICCFNCQGMGHFADKCPKPRNIAASTSVHATPCNQKLAPQRIVIHASRSSPIARVATAPTPASALPQGVNAQFQPQPSVDKTEASIGIVPLDVPAQQPKKSSTR

SEQ ID NO: 20449 - protein, 410 aa, Oryza sativa
  Clone ID: TF_OSC400775j.C1.p63.fg
MDISRTNEGFTSCGPVVEMSWHRAGVLLLGAQSCLPVPEVPAVGGVGSVLLSMARMGWKLCHVFRPYTVVVDELPMPEEDVPFCHDCREQGHYALNCPWVYAKEAPSFGLAGQASLNQPPRTKSSLQPSVQSREPNGENPLNPENCFPPILSYHVGSRTKQAKGKKSKNQKRKAPMRTEEEVRKMTITSTEWPPARITIPRRQRGNTFRGARQLTQHLLSHGGRVSDSEGSDQVSSDDEDESPRHLGEEEMESKACTRCGEIGHVASMCLTLCPHCEEDHPPGECPTRKVTCFLCEGTNHVLKDCQLSVLLTKTAEIQRTTLRLSHQLVSSNSNIDNIIHNTNAPPAPPDSAINHSNNTFSTNHSLHRQPQQRIVVDGRSCVSPRPTPGRAKGNQSQEGDTKQKTVLCFK

SEQ ID NO: 20450 - protein, 448 aa, Oryza sativa
  Clone ID: TF_OSC411686j.C1.p1.fg
MDISRTNEGYTSCGPVVEMSWHRAGVLLLGAQSCLPVPEVPAVGGVGSVLLFMARMGWELCHVFRPYTMVNKPNIHHNSKRLRSVKMADNEKGNKVRSQDIGTSSSRVNEAPDTSCVTLVQHLINQNQLLIEILQQHQTPILNLSQMQPQVQLEAVQALTPQVSMPPASRRTHGDVPHVDSKEASIICFMCDEQGHYARECPQQKRKTPMRTEDEVRKMIITSTEWPPPGMTKRQRRHTFRGAPQLTEHLLANGGRVSDSEDSDQVSSDDEDEMERKACSRCGENRSCCQLFSADEEDGQPTRQFQRREASRQHKSRQDYSFSLTPVPGQRNQNEKRKCRVREDICCFNCQGMGHFADKCPKPRNIAASTSVHATPCNQKLAPQRIVIHASRSSPIARVATAPTPASALPQGVNAQFQPQPSVDKTEASIGIIPLDVPAQQPKKSSTR

SEQ ID NO: 20451 - protein, 351 aa, Oryza sativa
  Clone ID: TF_OSC900406j.C1.p3.fg
MADNEKGNKVRSQDIGTSSSRVNEAPDTSCVTLVQHLINQNQLLIEILQQHQTPILNLSQMQPQVQLEAVQALTPQVSMPPASRRTHGDVPHVDSKEASIICFMCDEQGHYARECPQQKRKTPMRTEDEVRKMIITSTEWPPPGMTKRQRRHTFRGAPQLTEHLLANGGRVSDSEDSDQVSSDDEDEMEHCQFSFLLTKKMANQPASSNGEKHQGNTNPRQDYSFSLTPVPGQRNQNEKRKCRVREDICCFNCQGMGHFADKCPKPRNIAASTSVHATPCNQKLAPQRIVIHASRSSPIARVATAPTPASALPQGVNAQFQPQPSVDKTEASIGIIPLDVPAQQPKKSSTR

SEQ ID NO: 20452 - protein, 1470 aa, Oryza sativa
  Clone ID: TF_OSC14180j.C1.p3.fg
MASRRRATTSNDETQTPDLNTLAGIMATQTQLLQAIASNQGNRGGSSFGEFMRTKPPTFATADEPMEAEDWLRIIEKKLTLVRVREADKVIFAVNQLEGPAGDWWDTYKEAREDGAGEPTWEEFTAAFRENFVPTAVMRMKKNEFRRLRQGNTTVQEYLNKFTQLARYAIGDLADEEEKIDKFIEGLNDELRGPMIGQDHESFQSLINKVVRLENDQRTVEHNRKRRLAMSRPPQTMPQRLKGATPSGWKPPVMVTNRPAALSNFNRPVALQNRTPTPTLAAPGAKKNVDCFNCGKYGHYANNCPHPRKTPVRTGANAMTVRGTTTPAVGRGLFKTPQPNRTTTGFGRGQVNHVRAEEAQEDQGVLMGMFSLNSTPIKVLFDSGALHSFISLKASQQHNLTRVKLRQPMLVHSPGGEIAVDTACIDVPIRLRDVVFPSNLMVLIPQTLDVILGMDWLAKHRGVIDCRRREVTLTTPWGSDMRATMDQDPRLTERAGGIFTMLPLKGMPVVQRFPDVFPEDLPGMPPDRDIEFIIDLIPGTAPISKRPYRMPVNELEELKKQIRELQEKGFVRPSSSPWGAPVLFVKKKDGSMRMCVDYRSLNEVTIKNKYPLPRIDDLFDQLKGAKVFSKIDLRSGYHQLKIRTEDIPKTAFSTRYGLYEFTVMSFGLTNAPAYFMNLMNKVFMDYLDKFVVVFIDDILIYSKDEEEHAEHLRLVLQKLRKHKLYAKFSKCEFWLKEVAFLGHVISAGGVAVDPAKVEAVTEWKAPKSVTEIRSFLGLAGYYRRFIEGFSKIARPMTQLLKKEKKFAWSEQCQGSFEQLKEKLTSAPILVLPDIRKDFVVYCDASRQGLGGVLMQEGKVVAYASRQLRPHEENYPTHDLELAAVVHALKIWRHYLIGNHCDIYTDHKSLKYIFTQSDLNLRQRRWLELIKDYDLEVHYHPGKANVVADALSRKSHCNHLRTEGMVPELREEMAQLNLHIVPHGQINTLDIQPLLRTQIEEAQKDNEEVREVKERLAAGRAKEFSTDEKDVLWYKKRIYVPEQGGLRGLILKEAHESAYSLHPGSTKMYQDLKEGYWWPNMKRDVAEYVALCDVCQKVKAEHQRPAGLLQPLRIPEWKWDEIGMDFIVGLPKTATGYDSIWVIVDRLTKTARFIPVKTNYSSAKLAELYMTRIVCLHGIPKKIISDRGTQFTSHFWEKVHEALGSYLAFSTAYHPQTDGQTERTNQVLEDMLRACALDFSKDWERCLPYAEFSYNNSFQASLKMSPNEALFGRRCRTPLMWSETGERAVFGPDIIQEAEEKVRLIRDRLKVAQSRQKSYADTRRRNLEFKEGDYVYLKVSPMRGTKRFKVKGKLAPRYVGPFQIIARRGEVAYQLQLPEYIADVHPVFHVSQLKKCLRVPEEQAPLEEIHISNDLTYPEHPIRILDEAEKRTRSKVWRMYKVQWSNHTEDEATWEGEEFLRTEYPHLFGNW

SEQ ID NO: 20453 - protein, 526 aa, Oryza sativa
  Clone ID: TF_OSC900039j.C1.p14.fg
MADNEKGNKVRSQDIGTSSSRMNEAPDTSCVTLVQHLINQNRLLIEILEQHQTPILNLSQIQPQVQLEAVQALTPQVSMPPASRRTHGDVPHVGSKEASIICFMCDEQGHYARECPQQKRKTPMRTEDEVRKMIITSTEWPPPGMTKRQRRNTFRGVSQLTEHLLANGGRVSDSEDSDQVSSDDEDEMERKACSRCGEIGHVASSCATTCVHCEEDHPPDRCPTSRITCFFCEGTDHIPKDCQFNFLLTKKMANQPASSNGEKHQGNTNPRQDYSFSLTPVPGQRNQNEKRKCRVREDICCFNCQGMGHFADKCPKPRNIAAGTSVHATPCNQKLASQRIVIHASRSSPISRVATAPTPASALPQGVNAQFQPQPSVDKTEASIGIVPLDVPAQQPRNQVQDEEPEPIIPLAPTILCTDSLSKELSSMEEVVSLPDLLQAEPRAINLWRAIPSRRPSSASNSTQKEASPVNDGNMQSYHIITEPIKDDAVTRTTPAISLQNQNEQPRLWFSVRYLSLCNRKFAAIM

SEQ ID NO: 20454 - protein, 815 aa, Oryza sativa
  Clone ID: TF_OSC29958j.C1.p1.fg
MSGTSSDEPTLENLAHKLKGMENWYEELMRNSKSYKESTDKHLKTLSENLVKVVDQIEQMNQSHKQLTENIQNMNIGHENIVRCIGLLETAGEEGAGATAHRHQRYDDEDEEQSVADDEEEDESVGNRRRHRVRDKDDPLSKVKFTMLSFDGKFEPSVYLDWELAVEQKFSCYDFTDNKKVKAAISELTSFASLWWNDICGRGLRPRTWDYMKRIMRSRFVSSYYACDMLNKLQLLRQGSSSVETYYQEMMIALSRCDMQETEDARISRFYGGLNREIWDILEYKEYNTMNRLFHFACKAEREVQGLNKHRSSFAGATSTRQLTPRQSTTAFRPPTSTPSHAQETSKNASVQTPAKSATSVASTRRTREITCHRCHDIGHIARDCPNRRALFMNDDGEYTSASDCDDEYALAATDHAGGQDNDVIKEVHLHPESLDQYPSLIVKLALSAKEKCEEQNQHHNLFQSKVLVKGHTIKMIIDNGSCNNLASEEMVKKLGLTTIHIHIRIIFSGSYHDQIECDVVHMQACSVILGRPWQYDREVVFDGRTKTYKFMFNGKRVVLHSMTPAAALKDDLARLECEKKAKSENQIITKNLVSPSTTEPSATKNEIKLTGALLASKYNICALYEPDSCCYALFCKDPILTLATASSSLYSLPPAITNLLHGYEGVFHDEIHPRMTPERESEHDHEDEIESRTTPIQEGEDDEDINSSDTLITSHVQMIISSPSPVRPPETTLTSNGSSAFMPTPIWVILDFMENLSANFQTHPVSCPNSSRVNGNRQNKTALLLKLNLGLGPCNRLGPSRKCLPSPPRISTYP

SEQ ID NO: 20455 - protein, 707 aa, Oryza sativa
  Clone ID: TF_OSC29958j.C1.p3.np
MSGTSSDEPTLENLAHKLKGMENWYVRNSKSYKESTDKHLKTLSENLVKVVDQIEQMNQSHKQLTENIQNMNIGHENIVRCIGLLETAGEEGAGATAHRHQRYDDEDEEQSVADDEEEDESVGNRRRHRVRDKDDPLSKVKFTMLSFDGKFEPSVYLDWELAVEQKFSCYDFTDNKKVKAAISELTSFASLWWNDICGRGLRPRTWDYMKRIMRSRFVSSYYACDMLNKLQLLRQGSSSVETYYQEMMIALSRCDMQETEDARISRFYGGLNREIWDILEYKEYNTMNRLFHFACKAEREVQGNKHRSSFAGATSTRQLTPRQSTTAFRPPTSTPSHAQETSKNASVQTPAKSATSVASTRRTREITCHRCHDIGHIARDCPNRRALFMNDDGEYTSASDCDDYALAATDHADDVIKEVHLHPESLDQYPSLIVKLALSAKEKCEEQNQHHNLFQSKVLVKGHTIKMIIDNGSCNNLASEEMVKKLGLTTPHPHPYHIQWFNICGKMKVTRLVKIPFSIGSYHDQIECDVVHMQACSVILGRPWQYDREVVFDGRTKTYKFMFNGKRVVLHSMTPAAALKDDLARLCEKKAKSENQNQVPQRMKLRTGALLASKYNICALENQNQVPQRMKLRTGALLASKYNICALYEPDSCCYALFCKDPILTLATASSSLYSLPPAITNLLHGYEGVFHDEIHPRMTPERESEH

SEQ ID NO: 20456 - protein, 1004 aa, Oryza sativa
  Clone ID: TF_OSC17176j.C1.p5.fg
MAKFVGDITAVGQRDVALNIVGAVGFSGDADDLRTNLDEVHANKVSDRGFGELFTNVEDAMSMQCARHSRSGHCGHLARSARGVKRLLGPLMMVEPLILMHRCYHLPQTRVAKVCCLALNPKQRWDSGSGNIKEIKIRGELGLRDEQSSSDAALTWQSTRTLRKHLLIRRGECWSEYSSIVNTDDEAKATCNSFCETCWKILRFRSNQTFHQLNPFLNLRNRCNRVKHGNPMVVLQFHLEIISLSFGKLENRGRNVLRGRLRYLQGKDFRLPVKEGRRPSTSIPEHDIGKISVLIKSLYAYNLNNPKTYYRHCDFTMAGFADALRPDKFTGVHFKRWQIRVTLWLTAMKCFWVSTGKPEGVLTAEQQKQFEEATTLCVGCILSVLGDRLVEVYMHMTDAKELWDALNTKFGATDASNDLYIMEQFHDYKMADNRSVVEQAHEIQTMAKELELLKCVLPDKFVARCIIAKLPPSWRSFGTALKHKRQEYSVEGLIASLDVEEKAREKDAASKGDGGQSSANVVHKAQNKSKGKYKAQQTTNFKKQKKNNNNPNQDERTCFVCGQLGHLARKCPQRKGMKAPTGQTSKSANVTISNTGDGSGYGNLPAIFSVNQSTNWWVDTRSNVARGSTVLMGNGSHVSVHGVGTVDLKFTSGKIVQLKNVQHVPSIDRNLVSGSRLTRAGFKLVFESNKVVVSKHGYFIGKGYECGGLFRFSLSDFCNKSVNHICGSVDDEANVWHSRLCHINFGLMSRLSSMCLIPKFSIVKGSKCHSCVQSKQPRKPHKVAEERNLAPLELLHSDLCEMNGVLTKGGKRYFMTLIDDATRFCYVYLLKTKDEALDYFKIYKAEVENQLDRKIKRLMSDRSGEFFSNEFDLFCEEQDIIHERTPPYSPESNGIAKRKNRTLTDLVNAMLDTAGLPKAWWGEALLTSNYVLNRVPNRNKDKTPYEIWIGRKPSLSYLRTWGCLAQVNVPITNKHKLGPKTVDCVFLGYAYHNIAYRFLIVKSE

SEQ ID NO: 20457 - protein, 1224 aa, Oryza sativa
  Clone ID: TF_OSC30381j.C1.p1.fg
MAGFADALRPDKFTGVHFKRWQIRVTLWLTAMKCFWVSTGKPEGVLTAEQQKQFEEATTLFVGCILSVLSDRLVEVYMHMTDAKELWDALNTKFDATDASNDLYIMEQFHEYKMADNRSVVEQAHEIQTMAKELELLKCVLPDKFVAGCIIAKLPPSWRSFGTALKHTRQEYSVEGLIASLDVEEKAREKDVASKGDGGQSSANVVRKAQNKSKGKYKAQQTTNFKKQKKKNNNPNQDERTCFVCGQLGHLARKCPQRKGMKAPAGHTSKSANVTIGNTGDGSGYGNLPTVFSVNQSTNWWVDTGANVHVCADISLFSSYQDARGSTVLMGNGSHASVHGVGTVDLKFTSGKIVQLKNVQHVPSIDRNLVSGSRLTRDGFKLVFESNKVVVSKHGYFIGKDYKCGGLFRFYLSDFCNKSVNHICGSVDDEANVWHSRLCHISFGLMSRLSSMCLIPKFSIVKGSKCHSCMQSKQPRKPHKAAEERNLAPLELLHSDLCEMNGVLTKDGKRYFMTLIDDATRFCYVYLLKTKDEALDYFKIYKAEVENQLDRKIKRLRSDRGGEFFSNEFDLFCEEHDIIHERMPPYSPESNGIAERKNRTLTDLVNAMLDTAGLPKAWWGEALLTSNHVLNRVPNRNKDKTPYEILIGRKPSLSYLRTWGCLAKVNVPITKKRKLGPKTVDCVFLGYAHHSIAYRFLIVKSEVPNIHVGTIMESRDATFFESFFPMKDTHSSSSQPSEIILSSITPPEQTEHTHEHVTEEDDSEAPRRSKRQRTAKSFGDDFTVYLVDDTPKSISEAYASPDADYWKEAVRSEMDSIIANGTWEVTERPYGYKPVRCKWVLKKKLRPDGTIEKYKARLVAKGYTQKEGEDFFRTYSPVARLTTIRVLLSLAASHGLLVHQMDVKTAFLNGELDEEIYMDQPDGFVVEGFAVNEADKCVYYRHGGGEGVILCLYVDDILIFGTNLEVINEVKSFLSQNFDMKDLGVADVILNIKLIRGENGITLLQSHYVEKILNRFGYIDSKPSPTPYDPSLLLRKNKRIARNQLEYFQIIGSLMYLASATRPDISFVVSKLSRFTSNPGDDHWRALERVMRYLKGTVELGLHYTGYPAVLEGYSDSNWISDVDEIKATSGYVFTLGGGAVSWRSCKQTILTRSTMQAELMALDTATVEAEWLRDLLMDLTIVEKPVAAILMNCDNQTTCEKMIEVCQEIKKLRSYNVGLHPNS

SEQ ID NO: 20458 - protein, 433 aa, Oryza sativa
  unsure (1)..(433): unsure at all Xaa locations
  Clone ID: TF_OSC401605j.C1.p25.np
MAGFADALRPDKFTGVHFKRWQIRVTLWLTAMKCFWVSTGKPEGVLIAEQQKQFEEATTLFVGCILSILGDRLVEVYMHMTDAKELWDALNTKFGAIDASNDLYIMEQFHDYKMADNRSVIKQAHEIQTMAKELKLLKCVLPDKFVAGCIIAKLPPSWRSFGTALKHKRQEYSVEGLIASLDVEEKAQEKDAVSKGDGGQSSANVVHKAQNKSKGKYKAQQTTNFKKQKKNDNNPNQDERTCFVCGQLGHLARKCPQRKGMKAPAGQTSKSANVTIGNTGDGSGYGNLPIVFSVNQSTNWWVDTGANVHVCADISLFSSYQDARGSTVLMGNGSHASVHSVGTVDLKFTSGKIVQLKNVQHVPSIDRNLVSGSRMTRDGFKLVFKSNKVVVSKHGYWGARGVGADGLRKITLGVHIHISLTAINAEMKIXATG

SEQ ID NO: 20459 - protein, 868 aa, Oryza sativa
  Clone ID: TF_OSC414535j.C1.p29.gm
MRWRMRSSSVRASFSPAVRGLRRFFPPTTQRGDEEQCLEQRRRDTTAWSALPISSDAFHRATVVSTAISLFAFSTRRRSTSPSPLSAHHRSTSSSAHSARRRPAPSCRLHAPPLHGLTGLQNLCLRRFCLRLCAAPSLVDYSIPLAGVHLRSGEQVSRTSAFDVPHREKAAIKFLGSALRDCSLVTLWLTAMKCFWVSTGKPEGVLTAEQQKQFEEATTLFVGCILSVLGDRLVEVYMHMTDAKELWDALNTKFGATDASNGLYIMEQFHNYKMADNRSVVEQAHEIQTMAKELELLKCVLPDKFVAGCIIAKLPPSWRSFGTTLKHKRQEYSVEGLIASFDVEEKAREKDAASKGDGGQSSTNVVHKAQNKSKGKYKAQQTTNFKKQKKNNNNPNQDERTCFVCGQLGHLARKCPQRKGMKAPAGQTSKSANVTIDNTGDGSRYGNLPTDARGSTVLMGNVSHASVHGVGTVDLKFTSGKIVQLKNVQHVPSIDRNLVSGSRLTRDGFKLVFESNKVVVSKHGYFIGKGYECGGLFRFSLSDFCNNEAPRRSKRQRTAKSFGDDFTVYLVDDTPKSISEAYASPDADYWKEVVRSEMDSIIANGTWEVTERPYGCKPVGCKWVFKKKLRPDELDDEIYMDQPDGFVVEGQEGKASQSMRWGPPVGSFPHLPPIPARRRAETAAAPTPPSLPGHVGHARACAASPAPFPLSLPFAPAPEMAGIRKPNPASLSSPLPPRSSPSRAVAAVSFAGSRSTSAASSPSRFVAGALIPTRTGHAEARPPSPSPPVARRRRSPSSSSAPATLGEASPLLSFPVSPCVAATRARRRFGSLPPSAAAAFASPPPPGAVAGNPFARAPSPSPRPVGRS

SEQ ID NO: 20460 - protein, 1284 aa, Oryza sativa
  Clone ID: TF_OSC900320j.C1.p19.fg
MASFADALRPDKFTGVHFKRWQIRVTLWLTAMKCFWKQFEEATTLFVGCILSVLGDRLVEVYMHMTDAKELWDALNTKFGATDASNDLYIMEQFHDYKMADNRSVVEQAHEIQTMAKELELLKCVLPDKFVVGCIIAKLPPSWRSFGTVLKHKRQEYSVEGLIAPLDVEEKAREKDAASKGDGGQSSANVMHKAQNKSKGKYKAQQTTNLKKQKKNNNNPNQDERTCFVCGQLGHLARKCPQRKGMKAPVGQTSKSANDARGSTVLMGNGSHASVHGVGTVYLKFTSGKIVQLKNVQHVPSIDRNLVSGSRLIRDRFKLVFESNKVVVSKHGYFIGKGYECGGLFRFSLSDFCNKSVNHICGSVDDEANVWHSCLCHINFGLMSRLSSMCLIPKFSIVKGSKCHSCVQSKQPRKPHKAAEERNLAPLELLHSDLCEMNGVLTKGGKRYFMTLIDDATRFCYVYLLKTKDEALDYFKIYKAEVENQLDRKIKRLRSDRGGEFFSNEFDLFCEEHGIIHERTPPYSPESNGIAERKNRTLTDLIGRKPSLSYLRTWGCLAKVNVPITKKRKLGPKTVDCVFLGYAHYNIAYRILIVKSEVPDMHVGTIMESRDATFFESFFPMKDTHSSLSQPSEIITSSITPPEQTEHTHEHVTEEDDSEAPRRSKRQRTAKSFGDDFTVYLVDDTPKSISEAYASPDADYWKEVVRSEMDSIIANGTLEVTERPYECKPVGCKWVFKKKLGHDGTIEKYKARLVAKGYTQKEGEDFFDTYSPVARLTTIRVLLSLAASHGLLVHQMDVKTSFLTGELDEEIYMDQPDGFVVEGQKGKVCKLLKSLYGLKQAPKQWHEKFDKTLTSTGFAVNEADKCVYYRYGGGEGVILCLYVDDILIFGTNLEVINEVKSFLSQNFDTKDLGVVDVILNIKLIKGENGITLLQSHYVEKILNRFGYIDSKPSPTPYDPSLLLRKNKRIARNQLEYSQIIGSLMYLASTTRPDISFVVSKLSRFTSNPGDNHWRALERVMRYLKGTVELGLHYTGYPAVLEGYSDSNWISDVDEIKATSGYVFTLGGGAVSWRSCKQTILTRSTMEAELTALDTATVEAEWLRDLLMDLPIVEKPVPAIVMNCDNQTVIVKVNSSKDNMKSSRHVKRRLKSVRKLRNSGVITLDYIQTARNLADPFTKGLSRNVIDNASKEMGLRPIEDAVLQSILERTHLFELDCWSQSMEILGESSRKLTKDLGFCFAANSDSFLFWKRSEKSDYSIPLAGVHLRSGEQVSGTSAFDVLHRE

SEQ ID NO: 20461 - protein, 449 aa, Oryza sativa
  Clone ID: TF_OSC10753j.C1.p1.fg
MDNTGNKGYGNDGSDDSRTQANGNEKSINETSPELIQIVVNQTNMLATAFQLLQNRNNPAGATNVQVPTVQQQCKLSEFLKTGPPTFAIAVDPMEASDWLRTIEKKLGLIQCTDQERVGFATHQLVGPASEWWDSYETSRPEGHAITWNEFSSVFKRSHVPAGMITLRKREFRYLKQGDLTVTEYLHEFYRLAHYAPEDVETDEGKQEKFLQGLKDELAVQLLLEDYEDFEKLVDKAMQLESEHNRMTNCKRRIVNIPVIPGGNQRQRTEPLQITGSSVVHQEFLPQEDERNADNNTSNTNDDDTTNNHGSCPISDHSNKACNVSSIHQDVNDSINVGTQNDNLSNFDSGKDSNGDSNNGTTDANVSKDSQPPIPTPSQNDRPQMDSSVKKTLICYNCKEPGHFSRDCPQPKRNLRHHSGHYARRRQVTRLVVTGANAIPVRPHVNSNP

SEQ ID NO: 20462 - protein, 564 aa, Oryza sativa
  unsure (1)..(564): unsure at all Xaa locations
  Clone ID: TF_OSC12554j.C1.p1.np
MDSTGNKGYGNDGSDDSRTQANGNEKSINETSPELIQVVVNQTNMLATAFQLLQNRNNPAGATDVQVPTVQQQCKLSEFLKTGPPTFAMAVDPMEASDWLRTVEKKLGLIQCTDQERVGFATHQLVGPASEWWDSYEASRPEGHTITWNEFSSVFRRSHVPAGMITLRKRERYLKQGDLTVTEYLHEFYRSAHYAPEDVETDEDKQEKFLQGLKDELAVQLLLEDYEDFEKLVDKAMQLESEHSRMTNCKRRMVNNPVFPGGNQRQRTEPLQITGSSVVYQEFLPQGDERNADNHNSNTNADDTTNNHGSGPISDHSNKACNVSSIHQDVNDSINVGTQNDNLSNFDSEKDSNGDSNYGTTDANVSKDFQPPIPTPRHNDHPQMDSSAKKTLICYNCKEPGHFSRDCPQPKRNLRHHSGHYARRRQVTRLVVTGANAVPVSLKGSRPKDLIATRSIHNSRSEEYLVTKVDSKDMNYESSGTEAPSSSAATQSKSAKGSTRDKSGEEKIPSATGDRAKQSRVKKFCXASLLXKTEPPPSLSLSPSLPPLGPPPLSAPPFPPLSLP

SEQ ID NO: 20463 - protein, 377 aa, Oryza sativa
  Clone ID: TF_OSC12554j.C1.p2.np
DSRTQANGNEKSINETSPELIQVVVNQTNMLATAFQLLQNRNNPAGATAVQQQCKLSEFLKTGPPTFAMAVDPMEASDWLRTVEKKLGLIQCTDQERVGFATHQLVGPASEWWDSYEASRPEGHTITWNEFSSVFRRSHVPAGMITLRKRERYLKQGDLTVTEYLHEFYRSAHYAPEDVETDEDKQEKFLQGLKDELAVQLLLEDYEDFEKLVDKAMQLESEHSRMTNCKRRMVNNPVFPGGNQRQRTEPLQITGSSVVYQDFDSEKDSNGDSNYGTTDANVSKDFQPPIPTPRHNDHPQMDSSAKKTLICYNCKEPGHFSRDCPQPKRNLRHHSGHYARRRQVTRLVVTGANAVPVRPQLILTHSRNNVPMLSTFP

SEQ ID NO: 20464 - protein, 449 aa, Oryza sativa
  Clone ID: TF_OSC16506j.C1.p1.fg
MDNIGNKGYGNDGSDDSRTQANGNEKSLNETSPELIQIVVNQTNMLATAFHLLQNRNIPAGATNVQVPTVPQQCKLSEFLKTGPPTFAMAVDPMEASDWLRTVEKKLGLIQCTDQERVGFATHQLVGPASEWWDSYEASRPEGHTITWNEFSSVFKRSHVPTGMITLRKREFRYLKQGDLTVTEYLHEFYRLAHYAPEDVETDEDKQEKFLQGLKDELAVQLLLEDYEDFEKLVDKAMPLESEHNRMTNCKRRIVNIPVFPGSNQRQRTEPLQITGSSVVHQEFLPQEDECNADINTSNTNNDDTSNNQGSGPISDHSNKACNVSSIHQDVNDSINVGTQNDNLSNFDTEKDSNGDSNYGTTDANVSKDFQPPIPTPSHNDHPQMDSSAKKTLICYNCKEPGHFSRDCPQPKRNLRHHSGHYARRRQVTRLVVTGANAVPVRPHVNSNP

SEQ ID NO: 20465 - protein, 449 aa, Oryza sativa
  Clone ID: TF_OSC16879j.C1.p1.fg
MDSTGNKGYGNDGSDDSRTQANGNEKSINETSPELIQVVVNQTNMLATAFQLLQNRNNPAGATDVQVPTVQQQCKLSEFLKTGPPTFAMAVDPMEASDWLRTVEKKLGLIQCTDQERVGFATHQLVGPASEWWDSYEASRPEGHTITWNEFSSVFRRSHVPAGMITLRKREFRYLKQGDLTVTEYLHEFYRSAHYAPEDVETDEDKQEKFLQGLKDELAVQLLLEDYEDFEKLVDKAMQLESEHSRMTNCKRRMVNNPVFPGGNQRQRTEPLQITGSSVVYQEFLPQGDERNADNHNSNTNADDTTNNHGSGPISDHSNKACNVSSIHQDVNDSINVGTQNDNLSNFDSEKDSNGDSNYGTTDANVSKDFQPPIPTPRHNDHPQMDSSAKKTLICYNCKEPGHFSRDCPQPKRNLRHHSGHYARRRQVTRLVVTGANAVPVRPHVNSNP

SEQ ID NO: 20466 - protein, 382 aa, Oryza sativa
  Clone ID: TF_OSC17335j.C1.p1.fg
MLATAFQKSQNGNSPAGETNVQALTVKHQCKLSEFLKTGLPTFAIAVDPMEASDWLRTIEKKLGLIQCTDQERVGFATHQLVGPASEWWDSYEASRPEGHTITWNEFSSVFKRSHVPAGMITLRKREFRYLKQGDLTVTEYLHEFYRLAHYAPEDVETDEDKQEKFLQGLKDELAVQLLLEDYEDFEKLVDKAMQLESEHNRMTNCKRRIVNIPVIPCGNQRQRTEPLQITGSSVVHQEFLPQEDGRNTDNNPSNTNGDDTTNNHGSCPISDHSNQACNFDTEKDSNCDSNYGTTDANVSKDFQPPIPTPSQNDRSQTDNSAKKTLICYNCKEPGHFSRDCPQPKRNLRHHSGHYARRRQVTRLVVTGANAVPVRPHVNSNP

SEQ ID NO: 20467 - protein, 549 aa, Oryza sativa
  Clone ID: TF_OSC1738j.C1.p3.fg
MDNTGNKGYGNDGSDDSRTQANGNEKSINETSPELIQIVVNQTNMLATAFQLLQNRNNPAGATNVQVPTVQQQCKLSEFLKTGPPTFAMAVDPMEASDWLRTVEKKLGLIQCTDQERVGFATHQLVGPASEWWDSYEASRPEGHTITWNEFSSVFKRSHVPAGMITLRKREFRYLKQGDLTVTEYLHEFYRLAQYAPEDVETDEDKQEKFLQGLKDELAVQLLLEDYEDFEKLVDKAMQLESEHNRMTNCKRRMVNNPVFPGGNQRQRTEPLQITGSSVVYQEFLPQEDERNAGNNNSNTNADDTTNNHGSCPIHDHLDQACNVNIIHQDIDDSINEGTQNDNPSNFDSGKDSNGDSNNGTTDANVSKDSQPPIPTPSQNDRPQMDSSVKKTLICYNCKEPGHFSRDCPQPKRNLRHHSGHYARRRQVTRLVVTGANAVPARSEIFNSVSDATRSEKCKHRLPVDNLSEVDSEDMNHEKFWNGSITELPQLSLSQPKGAPWSKSGEEKIPSATGGQAKQFRVVKFCWKFVKTQRKKSDKKRRPPNLSSC

SEQ ID NO: 20468 - protein, 286 aa, Oryza sativa
  Clone ID: TF_OSC18196j.C1.p1.gm
RSHVPSGMITLRKRAFRYLKQGDLTVTEYLHEFYRLARYAPEDVETDEEKQEKFLQGLKDELAVQLLLEDYENFEKLVDKAMQLESEHNRMTNCKRRIVNILVFPGGNQRQRTEPLPIIGSSVGYHEFLPQEDERNVDNNNIIHQDIDDSINEGTQNGNPSNFDSEKDSKGDSNNGTTDADVSKDFQPPIPTPSQDDRSQADNSAKKTLICYNCKEPGHFSRDCPQPKRNLRHHSGHYARRRQVTRLVVTGANAVPVSLKGSKPKDLIVTRSIHNSRSEEYLVDKV

SEQ ID NO: 20469 - protein, 449 aa, Oryza sativa
  Clone ID: TF_OSC18372j.C1.p3.fg
MDNTGNKGYGNDGSDDSRTQANGNEKSINETSPELIQIVVNQTNMLATAFQLLQNWNNPAGATNVQVPTVQQQCKLSEFLKTEPPTFAIAVDPMEASDWLRTVEKKLGLIQCTDQERVGFATHQLVGQASEWWDSYEASRPEGHTITWNEFSSVFKRSHVPAGMITLGKREFRYLKQGDLTVTEYLHEFYRLAHYAPEDVETDEDKQEKFLQGLKDELAVQLLLEDYEDFEKLVDKAMQLENEHNRMTNCKRRIVNIPVFLGGNQRQRTEPLQITGSSVVHQEFLPQEDGRNADTNTSNTNDDDTTNNHGSCPISDHSNKACNVSSIHQDVNDSINVGTQNDNLSNVDTEKDSNGDSNYGTTDANVSKDFQSPIPTPSQNDRPQMDSSVKKTLICYNCKEPGHFSRDCPQPKRNLRHHSGHYARRRQVTRLVVTGANAVPVRPHVNPNP

SEQ ID NO: 20470 - protein, 764 aa, Oryza sativa
  Clone ID: TF_OSC18547j.C1.p2.gm
MVPPIAGNGRAKSGRLPLPPAAIPVAVPAPPVAGSLPHPIKWDPHPSFYRFSPFPSLPVVVSPLPAFSFSLSDAGRPPATSPSSPEHRPAVPSPPSALQHRPLHRPYRLLAGNSPERCPRRQPVALVPLYSLQPAAVHRRCADRRRRLLLRHRGIAFFPGITSSSPEFRRNAVARAGLTFLLVDISSGCPGRRARASADVAVSSLGDAASPSTPACPRFRRNVAANLSVRLAGVVRPPVPPRRVPVGHLHHHLRHRSRDVVLGLASPSTEPRRGVVLVVLVPVQPLPAVLVASSPVPVVVVVVVLSSFPVVVAPVLVFVLGSASSSLVPAAARLRPRIAAEAVPSPFVSVVPLSSFRRFPKRGSWSSPKNWNNPAGATNVQVPTVQQQCKLSEFLKTEPPTFAIAVDPMEASEWLRTIEKKLGLIQCTDQERVGFATHQLVGPASEWWDNYEASQPEGHTTTWNEFSSVFRRSHVPSGMITLRKREFRYLKQGDLTVAEYLHGFYRLAHYAPEDVETGEDKQEKFLQGLKDELAVQLLLEDYEDFEKLVDKAMQLESEHNRMTNCKRRMVNNPVFPGGNQRQRTEPLQITGSSVVYPEFLPQEDERNADNNNSNTNADDTTNNHGSCPIHDHLDQAYNVNIIHQDIDDSINEGTQNDNLSNFDTEKDSNGDSNNGTTDADVSKDFQPPIPTPNQNDRSQTDNSAKKTLICYNCKEPGHFSRDCPQPKRNLRHHSGHYARRRQVTRLVVTGANAVPVRPHINSNP

SEQ ID NO: 20471 - protein, 800 aa, Oryza sativa
  Clone ID: TF_OSC23013j.C1.p2.np
MDNTGNKGYGNDGSDDSKTQANGNEKSINETSPELIQIVVNQTNMLATAFQLLQNRNNPAGATNVQVPTVQQQCKLSEFLKTGPPTFAMAVDPMEASDWLRTVEKKLGLIQCTDQERVGFATHQLVGPASEWWDSYEASRPEGHTITWNEFSSVFKRSHVPAGMITLRKREFRYLKQGDLTVAEYLHEFYRLAHYAPEDVETDEDKQEKFLQGLKDELAVQLLLEDYEDFEKLVDKAMQLESEHNRMTNCKRRMVNNPVFPGGNQRQRTEPLQITGSSVVYPEFLPQEDGRNADNNTSNTNNDDTTNNHGSCPISDHSNKACNVGSIRQDVNDSINVGTQNDNLSNFDTEKDSNGDSNDGTADANVSKGFQPPIPTPSHNDHPQMDSSAKKTLICYNCKEPGHFSRDCPQPKRNLRHHSGHYARRRQVTRLVVTGANAVPVSLKGSKPKDLIVTRSIHNSRSEEYLVDKVDSKDMNYESSGTEAPSSSAATQSKSAKGSTRDKSAAPSPSVSPPFRGESTGDASSPASSGVATTSPPPAASATSPERRPTPPPPSSAPRRRSHPRHHLLLARTSPEHRRRAGFSFLLGGSTGRPHLHHLRHRSGKVVLGIISPPSKPLRGPSSSSPIVLVVDVPSVARLVVSRRRLRHRHRSGVFHVILAAVQPLPAALVASSPAPVVVVLVLSSFSVVVAFVPPSSRSRSSSSFVKVAAPSSSSSSPPRRQASRRPRLAFVQGSPPKPSPRRSSPLRPSVSAAPVRRCRSHASSRGGKVPSPRCPVLVLSVSPVPVVRLSAPVPVYRRR

SEQ ID NO: 20472 - protein, 449 aa, Oryza sativa
  Clone ID: TF_OSC26820j.C1.p1.fg
MDNTGNKGYGNDGSDDSRTQANGNEKSINETSPELIQIVVNQTNMLATAFQLLQNRNNPAGATNVQVPTVQQQCKLSEFLKTGPPTFAIAVDPMEASDWLRTIEKKLGLIQCTDQERVGFAAHQLVGPASEWWYSYEASRPEGHTITWNEFSSVFKRSHVPAGMVTLRKQEFRYLKQGDLTVTEYLHEFYRLAHYAPEDVETDEDKQEKFLQGLKDELAVQLLLEDYEDFENLVDKTMKLESEHNRRPNCKERIVNIQYFPGGNQRQRTEPLQITGSSVAHQEFPPQEDGRNADNNTSNTNDDDTTNNHGSCPISDHSNKACNVSSIHQDVNDSINVGNQNDNLSNFDSEKDSNGDSNYGTTDANVSKDFQPPIPTPSHNDRPQMDSSVKKTLICYNCKEPGHFSRDCPQPKRNLRHHSGHYARRRRVTRLVVTGANAVPVRPHVNSNP

SEQ ID NO: 20473 - protein, 842 aa, Oryza sativa
  Clone ID: TF_OSC400150j.C1.p6.gm
MVPPIAGNGRAKSGRLPLPPAAIPVAVPAPPVAGSLPHPIKWDPHPSFYRFSPFPSLPVVVSPLPAFSFSLSDAGRPPATSPSSPEHRPAVPSPPSALQHRPLHRPYRLLAGNSPERCPRRQPVALVPLYSLQPAAVHRRCADRRRRLLLRHRGIAFFPGITSSSPEFRRNAVARAGLTFLLVDISSGCPGRRARASADVAVSSLGDAASPSTPACPRFRRNVAANLSVRLAGVVRPPVPPRRVPVGHLHHHLRHRSRDVVLGLASPSTEPRRGVVLVVLVPVQPLPAVLVASSPVPVVVVVVVLSSFPVVVAPVLVFVLGSASSSLVPAAARLRPRIAAEAVPSPFVSVVPVCLRRARSSLSFPRLVAWWANEGYTSCGPVVEMSYGGGLVPNARGSVLPACPGYPGRSEARCEAGVKIFENPSQNLSHPLNWNNPAGATNVQVPTVQQQCKLSEFLKTEPPTFAIAVDPMEASEWLRTIEKKLGLIQCTDQERVGFATHQLVGPASEWWDNYEASQPEGHTTTWNEFSSVFRRSHVPSGMITLRKREFRYLKQGDLTVAEYLHGFYRLAHYAPEDVETGEDKQEKFLQGLKDELAVQLLLEDYEDFEKLVDKAMQLESEHNRMTNCKRRMVNNPVFPGGNQRQRTEPLQITGSSVVYPEFLPQEDERNADNNNSNTNADDTTNNHGSCPIHDHLDQAYNVNIIHQDIDDSINEGTQNDNLSNFDTEKDSNGDSNNGTTDADVSKDFQPPIPTPNQNDRSQTDNSAKKTLICYNCKEPGHFSRDCPQPKRNLRHHSGHYARRRQLSAKHFKVSLKGSKPKDLIVTRSIHNSRSEEYLVDKV

SEQ ID NO: 20474 - protein, 802 aa, Oryza sativa
  Clone ID: TF_OSC400404j.C1.p16.np
MDNTGNKGYGNDGSDDSRTQANGNEKSINETSPELIQIVVNQTNMLATAFQLLQNWNNPAEATNVQVPTVQQQCKLSEFLKTEPPTFAIAVDPMEASDWLRTIEKKLGLIQCTDQERVGFATHQLVGPASEWWDSYEASRPEGHTITWNEFSSVFRRSHVPAGMITLRKREFRYLKQGDLTVTEYLHEFYRLAHYAPEDVETDEDKQEKFLQGLKDELAVQLLLEDYGNFEKLVDKAMQLESEHNRMTNCKRRIVNIPVFPCGNQRQRTEPLQITGPSVVHQEFPPQEDGRNADNNTSNTNDDDTTNNHGSCPISDHSNKACNVSSIHQDVNDSINVGTQNDNLSNVDTEKDSNGDSNYGTTDANVSKDFQPPIPTPSQNDRPQMDSSVQKTLICYNCKEPGHFSRDCPQPKRNLCHHSGHYARRRQVTRLVVTGANAVPVSLKGSRLKYHIVTKSIHNSRSEEYLVDKVDAKDMNYEKSGTEVPSSSATTQSKSAKRCTRFKSATSSPSVSPPFRGESTGDAFSPANSGVAATVPPPAATVAFPVRRPTSPPPPSAPRRRPPPRLLLGFAGIHPLRRRRPFGHPFLLVGVAPLHHHLLQHRSSAFHAVPSSAQPLLPAIIVSSSPFVLAVDVPSVAWLIVSRRRLRRRHRSGVVRAILASVQPLPAALIASSPAPVVAVVVLSSFPVVVAFVPPSSRSRPSSAFVKRTAAAPSSSSSSAPRRQASCRPRLAFVQGSPPKPSPRRSSPLCPSVSAAPVRRCRSHASSRGGKVPSPRCPVLVLSVSPVPVVRLSTPVPMYRCR

SEQ ID NO: 20475 - protein, 790 aa, Oryza sativa
  unsure (1)..(790): unsure at all Xaa locations
  Clone ID: TF_OSC400628j.C1.p5.np
MDNTGNKGYGNDGSDDSRTQASGNEKSINKTSPELIQIVVNQTNMLATAFQLLQNWNNPAGTTNVQVPTVQQQCKLSEFLKTEPPTFAIAVDPMEASDWLRTIEKKLGLIQCTDQERVGFATPQLVGPASEWWDSYEASRPEGHTITWNEFSSVFRRSHVPAGMITLRKXEFRYLKQGDLTVTKYLHEFYRLAHYAPEDVETDEDKQEKFLQGLKDELAVQLLLEDYXDFEKLVDKAMQLESEHNRMTNCKRRIVNIPVFPCGNQRQRTEPLQITGSSVVHQEFLPQEDGRNADNNTSNTNDDDTTNNHGSCLISDHSNKACNVSSIHQDVNDSINVGIQNDNLSNFDTEKDSNGDSNYGTTDANVSKDFQPPIPTPSQNDRPQMDSSTKKTLICYNCKEPGHFSRDCPQPKRNLRHHSGHYARRRQVTRLVVTGANAIPVSLKGSKPKDLIVPRSVRNPHKEYHLLEISRKDSSRKKSIREIKNSVLEINSKTSSIRIRYSTISSDFWGSANFAGVIDGAEIAPPASPSSSSTSPPAAPSTAPVHQPALPSPPSASPHRPPPGCSSVSPERRRAGLSILFIASVLSAAPSTSPARRLAAPLPSSASQPRRRPRPRLPSDRTPPVSVVVFTVHPRRLAVSRRRLRRRHRSGVFHAILASVQPLPAALVVSSLAPVVVVVVLSSFPVVVAFVPPSSRSRLPPAFVKCAAAPSSSSSSPPRRQASCRPCLAFVPGSLPKSFPRSAAPVRRCRSHASSRGGKDPSSRCPVLVLLVSPVPVVRSSTPVPVYRCR

SEQ ID NO: 20476 - protein, 620 aa, Oryza sativa
  Clone ID: TF_OSC400689j.C1.p2.gm
MLATAFQLLQNWNNPAGATNVQGLKDELAVQLLIEDYEDFEKLVDKAIQLESEHNRMKNCKRRIVNIPVFPCGNQTQRTEPLQITGSSVAHQEFLPQEDGHNADNNISNTNADDTTNNHGSCPISDHSDQACNVNSIHQDIDDSINEGTQNDNPSNFDSEKDTNGDSNYGTTDANVSKDFQPPIPTPSQNDRSQTNSSVKKTLICYNCKEPGHFSRDCPQPKRNLRHHSGHYARRRQVTRLVVTGANAIPVSLKGNRLKYHIVTRSIHNSRSEEYLVDKGVDTRHEVDNLCEVDAEDMNHEKFWNGSIIKLPQPSLSQLKGAPWFESGEEKIPSAIGDQAKQFQVGKFAGQAASGPKPSGALPPVPRTRPYRRVSTPAGRAVAFPFVAVALPPLYHLQPPVPLCRSIGFRRRCLSRHRNVVLFPGHATASLIFSRNTAVPHRPLHPPRRNFPGRSFLHPCAVGRTTTTSSIAAASGVFHAVLVSMQLPPAALVASSPVPVIVLIVVAFVPPSSRSRSSSAFRQVSRCSPVVVFVLGSASSSVAPAASRLRPRIAAEVVPSPFVSVVPGRLRRAHVEALSPTVTLPACRRSDRRSLAGQTARTTAVRPPLSHRSDRAYNCR

SEQ ID NO: 20477 - protein, 575 aa, Oryza sativa
  Clone ID: TF_OSC400773j.C1.p64.gm
MVTLRKREFRYLKQGDLTVTEYLHEFYRLARYAPEDVETDEDKQEKFLQGLKDELAVQLLLEDYEDFEKLVDKAVQLESEHNRMTNCKRRIVNIPVIPCGNQRQRTEPLQITGSSVVHQEFLPQEDGRNADNNTSNTNDDDTTNNHGSCPIHDHLDQACNVNIIHQDIDDSINEGTQNDNPSNFDSEKDSNGDSNNGTTDANVSKDFQPPIPTPSQNDRSQTDNSAKKTLICYNCKEPGHFSRDCPQPKRRAKGNQHPEGDTKQKTVIRFNQQSEGSFSCEEKIPSATGGQAKQFRKVKICWKFVKTQRKKRARPPLSLTGGAHLSSPSSRRARRRARALAPPPPRIAPHPAVPARIKERGITPRVSLSRFPLFSLSLSLGFVRIHPAKFAGVFNGARDLRARFPLSPAALSPSRCYIFDPRASLFRFRRSPLALAVGFVLAPCSSLSAVAVDLRFAADVAPVLRPTRRHPHRLRRVVADPVRRSASPADCRSTVALGIPNRAVAFLRSGSPPPSLRSSSRLGATSLGIAASPSTSSAPPFRSPTVGAPPSSSSRAAPPSFSAPSAVSAAFAASG

SEQ ID NO: 20478 - protein, 501 aa, Oryza sativa
  Clone ID: TF_OSC400946j.C1.p3.fg
MSWHRVGVLLLVAQSCLPVPGVPAVGGVGSVLLFMARMGWELCHVFRPYTVVMDNTGNKGYGNDGSDDSRTQANGNEKSINKTSPELIQIVVNQTNMLATAFQLLQNWNNPAGATNVQVPTVQQQCKLSEFLKTEPPTFAIAVDPMEASDWLRTVEKKLGLIQCTDQERVGFATHQLVGPASEWWDSYEASRPEGHTITWNEFSSVFKRSHVPAGMITLRKREFRYRKQGDLTVTEYLHEFYRLAHYAPEDVETDEDKQEKFLQGLKDELAVQLLLEDYEDFEKLVDKAMQLESEHNRMTNYKRRIVNIPVFPCGNQRQRTEPLQITGSSVAHQELLPQEDGHNADNNISNTNADDTTNNHGSCPIHDHLDQACNVNSIHQDIDDSINEGTQNDNPSNFDSEKDSNGDSKYGTTDANVSKDFQPPIPTPSQNDRSQTDNSVKKTLICYNCKEPGHFSRDCPQPKRNLRHHSGHYARRRQVTRLVVTGANAIPVRPRVNHNP

SEQ ID NO: 20479 - protein, 648 aa, Oryza sativa
  unsure (1)..(648): unsure at all Xaa locations
  Clone ID: TF_OSC401006j.C1.p29.np
MDNTGNKGYGNDGSDDSRTQANGNEKSINETLPXLIQIVVNQTNMLATAFQLLQNRNNPAWATNVQVPIVQQQCKLSEFLKTGPPTFAIAVDPMEANDWLRTVEKNLGLIQCTDQERVVFATHQLVGLASEWWDSYEVSRPEGHTITWDEFLAVFKRSHVPAGMITLRKXEFRYLKQEYLTVIEYLHEFHRLAHYAPEDVETDEDKQEKFLQGLKDELAVQLLLEDYEDFEKLLDKAIQLESEHNQMKNCKRRIVNIPVIPCGNQRQRTEPLQITGSSVAHQEFLPQEDGYNADNNISNTNDDDTTTNHGSCPISDHSNQACNVNNIHQDVDDSINEGTQNDNPSNCDSEKESNGDSNYGTTDANVSKDFQPPIPTPSQNDRSQTDSSVKKKLICYNCKEPGHFSRDCPQPKRNLRHHSGHYARRRQVTRLVVTGANAIPVSLKGSKPKDHIATRSIHNSQSEEYLVEKVDTQDMNYEKSRTEAPSSSAATQSKSARGATRDKSSSSSPTSPLFRGETIGDASSPVNSGVAATAPPPAAPSAVPEHRPTSLSPPSTSQRRPLLRLCHGVDNIYVITKALKAXQSKINSSGLAGLWLHLHRRSTGVXARTPPKTSSQKLLLLEGGEKTPHLILESPVXMRRIWRRERAR

SEQ ID NO: 20480 - protein, 449 aa, Oryza sativa
  Clone ID: TF_OSC401130j.C1.p3.fg
MDNTGNKGYGNDGSDDSRTQANGNERSINETSPELIQIVVNQTNMLATAFQLLQNWNNPAGATNVQVPTVQQQCKLSEFLKTGPPTFAMAVDPMEASDWLRTVEKKLGLIQCTDQERVGFATHQLVGPASEWWDSYEASRPEGHTITWNEFSSVFRRSHVPAGMITLRKREFRYLKQGDLTVTEYLHEFYRLAHYAPEDVETDEDKQEKFLQGLKDELAVQLLLEDYEDFEKLVDKAMQLESEHNRMTNCKRRIVNIPVIPGGNQRQRTEPLQITGSSVVYQEFLPQEDERNADNNTSNTNADDTTNNHGSCPISDHSNKACNVSSIHQDVNDSINVGTQNDNLSNFDSEKDSNGDSNNGTTDANVSKDFQPPIPTPSQNDRSQTDNSAKKTLICYNCKEPGHFSRDCPQPKRNLRHHSGHYARRRQVTRLVVTGANAVPVRPHVNSNP

SEQ ID NO: 20481 - protein, 342 aa, Oryza sativa
  unsure (1)..(342): unsure at all Xaa locations
  Clone ID: TF_OSC401498j.C1.p2.np
MDEVGRRWTFSRANEGYTSCGSVVEMSYGGGLVNARGSVLPACPGIPAVGRIGSVLLSKARMGWKLCHIFTTGSKAMECGVKMCLVGWPGLAWDELGPRSGCQFGPIHRRPWVKAVLDGQLCEEEDVVSCLPKLRKTAGSASEAKEAVKPAVKQEKRVSSFKVLSLSGLFFPCMLPLSTPTLXQMDNTGNKGYGNDGSDDSRTQANGNEKSINETSPELIQVVVNQTNMLVQLLQNRNNPAGATNVQVPTVQQHTADANVSKGFQPPIPTPSHNDHPQMDSSEKTLICYNCKEPGHFSRDCPQPKRNLRHTPAIMQEEDRSLALWSLEQTPPRPTSPGNRSS

SEQ ID NO: 20482 - protein, 380 aa, Oryza sativa
  Clone ID: TF_OSC401523j.C1.p3.gm
MDEVGRRWTFSRANEGYTSCGPVVEMSYGGGLVPNARGSVLPACPGYPGRSEASCEAGVKILENPSQNLSHPLNRNNPAGATNVQVPTVQQQCKRSHVPSGMITLRKRAFRYLKQGDLTVTEYLHEFYRLARYAPEDVETDEEKQEKFLQGLKDELAVQLLLEDYENFEKLVDKAMQLESEHNRMTNCKRRIVNIPVFPGGNQRQRTEPLPIIGSSVGYHEFLPQEDERNVDNNNIIHQDIDDSINEGTQNGNPSNFDSEKDSKGDSNNGTTDADVSKDFQPPIPTPSQDDRSQADNSAKKTLICYNCKEPGHFSRDCPQPKRNLRHHSGHYARRRQVTRLVVTGANAVPVSLKGSKPKDLIVTRSIHNSRSEEYLVDKV

SEQ ID NO: 20483 - protein, 449 aa, Oryza sativa
  Clone ID: TF_OSC411286j.C1.p2.fg
MDNTGNKGYGNDGSDDSRTQANGNEKSINETSPELIQIVVNQTNMLATAFQLLQNRNNPAGATNVQVPTVQQQCKLSEFLKTGPPTFAMAVDPMEASDWLRTVEKKLGLIQCTDQERVGFATHQLVGPASEWWDSYEASRPEGHTITWNEFSSEFRRSHVPAGMITLRKREFRYLKQGDLTVTEYLHEFYRLAHYAPEDVETDEDKQEKFLQGLKDELAVQLLLEDYEDFEKLVDKAMQLESEHNRMTNCKRRIVNIPVFPGGNQRQRTEPLQITGSSVVHQEFLPQEDEHNADNNTSNTNDDDTTNNHGSCPISDHSNKACNVSSIHQDVNDSINVGTQNDNLSNFDTEKDSNGDSNYGTTDANVSKDSQPPIPTPSQNDRPQMDSSVKKTLICYNCKEPGHFSRDCPQPKRNLRHHSGHYARRRQVTRLVVTGANAVPVRPHVNSNP

SEQ ID NO: 20484 - protein, 401 aa, Oryza sativa
  Clone ID: TF_OSC414125j.C1.p2.fg
MQLESEHNRMTNCKRRIVNIPVIPGGNQRQRTEPLQITGPSVVHQESPPQEDGRNADNNTSNTNDDDTTNNHGSCPISDHSNKACNVSSIHQDVNDSINVGTQNDNLSNFDTEKDSNGDSNYGTTDANVSKDFQPPIPTPSHNDHPQMDSSAKKTLICYNCKEPGHFSRDCPQPKRNLRHPSGHYARRRQVTRLVVTGANAVPAASQRTSSSPEASAIHIKEYHLLEISRKMIDKKRLAKMFSSIKEVGRKVIDKQKHALHRSRKTPDCNCPATVTLSLSKQDDLGKSVSMKARSEIFNSVSDATRSEKCKHRLPVDNLSEVDSEDMNHEKFWNGSITELPQPSLSQPKGAPWSKSGEEKIPSATGGQAKQFRVVKFCWKFVKTQRKKSDKKRRPPNLPSC

SEQ ID NO: 20485 - protein, 638 aa, Oryza sativa
  Clone ID: TF_OSC414146j.C1.p1.fg
MDNTGNKGYGNDGSDDSRTQANGNEKSINKTSPELIQKVVNQTNMLTTAFQLLQNWNNPAGATNVQVPTVQQQFKLSEFLKTEPPTFAIAVDPMEASDWLRTVEKKLGLIQCTDQERVGFATHQLVGPASEWWDSYEASRPEGHTITWNEFSSVFKRSHVPAGMITLRKREFRYLKQGDLTVTEYLHEFYRLARYAPEDVETDEDKQEKFLQGLKDELVVQLLLEDYEDFEKLVDKAMQLESEHNRMTNCKRRIVNIPVIPGGNQRQRTEPLQITGPSVVHQESPPQEDGRNADNNTSNTNDDDTTNNHGSCPISDHSNKACNVSSIHQDVNDSINVGTQNDNLSNFDTEKDSNGDSNYGTTDANVSKDFQPPIPTPSHNDHPQMDSSAKKTLICYNCKEPGHFSRDCPQPKRNLRHPSGHYARRRQVTRLVVTGANAVPAASQRTSSSPEASAIHIKEYHLLEISRKMIDKKRLAKMFSSIKEVGRKVIDKQKHALHRSRKTPDCNCPATVTLSLSKQDDLGKSVSMKARSEIFNSVSDATRSEKCKHRLPVDNLSEVDSEDMNHEKFWNGSITELPQPSLSQPKGAPWSKSGEEKIPSATGGQAKQFRVVKFCWKFVKTQRKKSDKKRRPPNLPSC

SEQ ID NO: 20486 - protein, 704 aa, Oryza sativa
  Clone ID: TF_OSC415189j.C1.p2.gm
MDNTGNKGYGNDGSDDSRTQANGNERSTNETSPELIQVVVNQTNMLATAFQLLQNWSSPAGATNVQVPTVQQQCKLSEFLKTEPPTFAIAVDPMEASDWLRTIEKKLGLIQCTDQERVGFATHQLVGPASEWWGSYEASRPEGHTITWNEFSSVFKRSHVPAGMITLRKREFRYLKQGDLTVTEYLHEFYRLAHYAPEDVETDEDKQEKFLQGLKDELAVQLLLEDYEDFEKLVDKAMQLESEHNRMTNCKRRIVNIPVIPCGNQRQRTEPLQITGSSVVHQEFLPQEDGRNADNNSSNTNDDDTTNNHGSCPISDHSNKACNVSSIHQDVNDSINVGTQNDNLSNFDTEKDSNGDSNYGTTDANVSKDFQPPIPTPSQNDRPQMGSSVKKTLICYNCKEPGHFSRDCPQPKRNLRHHSGHYARRRQVTRLVVTGANAVPAGPPATLADGWDPPVIAFLPPRPPPARALAPPPPLNPPHPAFPARLNEGGITPRDSLSRFPLFSLSLSLGFVRIHPAKFAGVFNGARDLRARFPLSPAALSPSRCYIFDPRASLFRFRRSPLALAVGFVPAPCSSLSAVAADLRFAADVAPVLRPTRRHLLRLRRVVADPVRRSASPADCRSTVALGIPNRAVAFLRSGSPPPSLRSSSRLGATSLGIAASPSTSSAPSFRSPTVGAPPSSSSRAVPPPSSAPAAVLVVVVVPG

SEQ ID NO: 20487 - protein, 501 aa, Oryza sativa
  Clone ID: TF_OSC417492j.C1.p2.np
HTGGGVGAQMLGLSSALPVPGIPAVGRIGSVLLSKARMGWKLCHIFTTGSKAMDNTGNKGYGNDGSDDSRTQANGNEKSINETSPELIQVVVNQTNMLATAFQLLQNRNNPAGATNVQVPTVQQQCKLSEFLKTGPPTFAMAVDPMEASDWLRTVEKKLGLIQCTDQERVGFATHQLVGPASEWWDSYEASRPEGHTITWNEFSSVFKRSHVPAGMITLRKREFRYLKQGDLTVTEYLHEFYRLAHYAPEDVETDEDKQEKFLQGLKDELAVQLLLEDYEDFEKLVDKAMQLESEHNRMTNCKRRIVNIPVFPGGNQRQRTEPLQITGSPVVHQEFLPQEDECNADNNTSNTNNDDTTNNHGSCPISDHSNKACNVGSIRQDVNDSINVGTQNDNLSNFDTEKDSNGDSNDGTADANVSKGFQPPIPTPSHNDHPQMDSSAKKTLICYNCKEPGHFSRDCPQPKRNLRHHSGHYARRRQVTRLVVTGANAVPVRPHVNSNP

SEQ ID NO: 20488 - protein, 556 aa, Oryza sativa
  Clone ID: TF_OSC422569j.C1.p2.np
MDNTGNKGYGNDGSDDSRTQANGNEKSINETSPELIQIVVNQTNMLATAFQLLQNRNNPAGATNVQVPTVQQQCKLSEFLKTGPPTFAMAVDPMEASDWLRTVEKKLGLIQCTDQERVGFATHQLVEPASEWWDSYEASRPEGHTITWNEFSSVFKRSHVPAGMITLRKREFRYLKQGDLTVTEYLHEFYRLAHYAPEDVETDEDKQEKFLQGLKDELAVQLLLEDYEDFEKLVDKAMQLESEHNRMTNCKRRIVNIPVFPGGNQRQRTEPLQITGSSVAHQEFPPQEDGRNADNNTSNTNDDDTTNNHGSCPISDHSNKACHVSSIHQDVNDSINDGTQNDNPSNWDSGKDSNGDSNNGTTDANVSKDSQPPIPTPSQNDRPQMDSSVKKTLICYNCKEPGHFSRDCPQPKRNLRHHSGHYARRRQVTRLVVTGANAVPVSLKGSKPKDLIVTRSIHNSRSEEYLVDKVDAKDMNYEKSGTEVPSSSATIQSKSARGATREKSGEEKIPSATPARSLPSSLSFSPSPSLPPLGPPPLGPAPFPPPLFLPPFLPPL

SEQ ID NO: 20489 - protein, 501 aa, Oryza sativa
  Clone ID: TF_OSC6122j.C1.p1.fg
MSWQRVGALLLGGSVLPACPGCPGRRRIGSVLLFMARMGWELCHVFRPYTVVMDNTGNKGYGNDGSDDSRTQANGNERSINETSPELIQVVVNQTNMLATAFQLLQNWNNPAGATNVQVPTVQQQCKLSEFLKTEPPTFAIAVDPMEASDWLRTIEKKLGLIQCTDQERVGFATHQLVGPASEWWDSYEASRPEGHTITWNEFSSVFKRSHVPAGMITLRKREFRYLKQGDLTVTEYLHEFYRLAHYAPEDVENDEDQQEKFLQGLKDELAVQLLLEDYEDFEKLVDKAMQLESEHNRMTNCKRRIVNIPVIPGGNQRQRTEPLQITGSSVVHQEFLPQEDERNADNNTSNTNDDDTTNNHGSCPISDHSNKACNVSSIHQDVNDSINVGTQNDNLSNFDAEKDSNGDSNYGTTDANVSKDFQPPIPTPSHNDHPQMDSSAKKTLICYNCKEPGHFSRDCPQPKRNLRHHSGHYARRRQVTRLVVTGANAVPVRPCVNQNP

SEQ ID NO: 20490 - protein, 501 aa, Oryza sativa
  Clone ID: TF_OSC6489j.C1.p1.np
VIWQRVGALLLGAQFCLPVPGIPAVGGIGSVLLSMARMGRKLCHVFRPYTVVMDNTSNKGYGNDGSDDSRTQANGNERSTNETSPELIQVVVNQTNMLATAFQLLQNWNHPAGATNVQVPTVQQQCKLSEFLKTEPPTFAIAVDPMEASDWLRTVEKKLGLIQCTDQERVGFATHQLVGPASEWWDSYEASRPEGHTITWNEFSSVFKRSHVPAGMVTLRKREFRYLKQGDLTVTEYLHEFYRLAHYAPEDVETDEDKQEKFLQGLKDELAVQLLLEDYEDFEKLVDKAMQLESEHNRMTNCKRRIVNIPVFPGGNQRQRTEPLQITGSSVAHQEFPPQEDGRNADNNTSNTNDDDTTNNHGSCPISDHSNKACNVSSIHQDVNDSINVGTQNDNLSNFDTEKDSNGDSNYGTTDANVSKDFQPPIPTPSHNDHPQMDSSAKKTLICYNCKEPGHFSRDCPQPKRNLRHHSGHYARRRQVTRLVVTGANAVPVRPHVNSNP

SEQ ID NO: 20491 - protein, 791 aa, Oryza sativa
  Clone ID: TF_OSC900179j.C1.p6.gm
MESSPACDGNGASATFGGKRAAAEVALAAAAVARRGGEPSSDGVRPKVGSGRRRQEKGETSGRDKKPSMSPPPSCLTFLGSGLLRLSSLFLTARHLLAANSYASHLVCVDDPCTDQERVGFATHQLVGPASEWWDSYEASRPEGHTITWNEFSSVFRRSHVPAGMITLRKREFRYLKQGDLTVTEYLHEFYRSAHYAPEDVETDEDKQEKFLQGLKDELAVQLLLEDYEDFEKLVDKAMQLESEHSRMTNCKRRMVNNPVFPGGNQRQRTEPLQITGSSVVYQEFLPQGDERNADNHNSNTNADDTTNNHGSGPISDHSNKACNVSSIHQDVNDSINVGTQNDNLSNFDSEKDSNGDSNYGTTDANVSKDFQPPIPTPRHNDHPQMDSSAKKTLICYNCKEPGHFSRDCPQPKRNLRHHSGHYARRRQHRRHLLHAGLPSVSRGDPRNYVPAVALPFPSRRPPPAAFLSSPERRPAAPSSPSASQLPPLPRSALRFAGKSPETRPRRRPVASPPLLRLRPPLPRPRSAGRRRHHLPRLHDAALIPGITSASPELRRNTVARAGFSFLLGGISSGCPGRRARASADVAVSSLGVAASPSTPACPRFRRNVAANLSVRLTGVVRPPVPPRRASVGHLHHHLRHRSGKVVLGIVSPPSKPLRGPSSSSPIVLVVDVPFILARLVVSRRRLRHRHRCGVFRVVPVSVQPLPAALVAPSPVPVVVVVVVLSSFPVAAAPVIVFVLASASSSLVPAASRLRPRIAAEAVPSPFVSVVPVCLRRARSSLSFPRLVAWW

SEQ ID NO: 20492 - protein, 505 aa, Oryza sativa
  Clone ID: TF_OSC900319j.C1.p14.fg
MDNTGNKGYGNDGSDDSRTQANGNEKSINETSPELIQIVVNQTNMLATAFQLLQNRNNPAGATNVQVPTVQQQCKLSEFLKTGPPTFAIAVDPMEASDWLRTIEKKLGLIQCTDQERVGFAAHQLVGPASEWWYSYEASRPEGHTITWNEFSSVFKRSHVPAGMVTLRKQEFRYLKQGDLTVTEYLHEFYRLAHYAPEDVETDEDKQEKFLQGLKDELAVQLLLEDYEDFEKLVDKTMKLESEHNRRTNCKRRIVNIPVFPGGNQRQRTEPLQITGSSVAHQEFPPQEDGRNADNNTSNTNDDDTTNNHGSCPISDHSNKACNVSSIHQDVNDSINVGNQNDNLSNFDSEKDSNGDSNYGTTDANVSKDFQPPIPTPSHNDRPQMDSSVKKTLICYNCKEPGHFSRDCPQPKRNLRHHSGHYARRRRVTRLVVTGANAVPVSLKGSKPKDLIVTRSIHNSRSEEYLVDKVYEVIDRRYQQRCLLSNQEVGRKVIDKRNLKRIRQG

SEQ ID NO: 20493 - protein, 421 aa, Oryza sativa
  Clone ID: TF_OSC900373j.C1.p9.fg
MDNPGNQGYGNDGSDDSRTQANGNERSINATSPELIQVVVNQTNMLATAFQLLQNWNNPAGATNVQVPTVQQQCKLSEFLKTEPPTFAIAVDPMEASEWLRTIEKKLGLIQCTDQERVGFATHQLVGPASEWWDSYEASRPEGHTITWNEFSSVFRRSHVPAGMITLRKREFRYLKQGDLTVTEYLHEFYRLARHAPEDVETDEEKQEKFLQGLKDELAVQLLLEDYENFEKLVDKAMQLESEHNRMTNCKRRIVNIPVFPGGNQRQRTEPLQIIGSSVGYHEFLPQEDERNVDNNNIIHQDIDDSINEGTQNGNPSNFDSEKDSKGDSNNGTTDANVSKDFQPPIPTPSQDDRSQADNSAKKTLICYNCKEPGHFSRDCPQPKRNLRHHSGHYARRRQVTRLVVTGANVIPVRPRVNHNP

SEQ ID NO: 20494 - protein, 1276 aa, Oryza sativa
  unsure (1)..(1276): unsure at all Xaa locations
  Clone ID: TF_OSC14917j.C1.p1.np
MAGFTDALRLDKFTGVHFKRWQIRVTLWLTAMKCFWVSTGKPIGVLNADQQKEIDEATTLFVGCILSVLSDRLVEVYMHMTDAKELWDALNTKFGATDASNDLYIMEQFHDYKMADNRSVVEXAHEIQTMAKELELLKCVLSNKFVAGCIIAILPPSWRGFGTALKHKRQEYSVEGLIASLDVEEKAREKDTASKGDGGQSTTNVVHKAQNKSKGKHKTQQTTNFKKKKNNNNPNQDEKTCFVCGQPSHLARKCPQRKGMKAPAGQTSKSANVTIGNTRDGSGNLPTVFSVNQSTNWWVDTGANVHVCADISLFSSYQAARGSTVLMGNGSHASVHGVGTVDLKFTLGKIVQLKNVQHVPSIDRNLVSGSRLTRDGFKLVFESNKVVVSKHGYFIGKGYECGGLFRFSLSDFCNKSVNYICGSVDDEANVWHSRLCHINFGLMSRLSSMCLIPKFSIVKGSKCHSCMQTKQSRKPHKAAEERNLAPLELLHSDLCEMNGVLTKGGKRYFMTLIDDATRFCYVYLLKTKDEALDYFKIYKAEVENQLDRKIKRLRSDRGGEFFSNEFDLFCEEHGIIHERMPPYSPESNGIAERKNRTLTDLVNALLNSNHVLNRVPNRNKDKTPYEIWIGRKPSLSYLRTWGCLAKVNVPITKKRKLGPKTVDCIFLGYAHHSIAYRFLIFKSEVPDMHVGTIMESRDATFFESFFPMKDTHSSSSQPSEIIPSSITPPEQTEHTHEHVIEEDVSEAPRRSKRQRTAKSFGDDFTVYLVDDTLKSISEAYASPDADYWKEAFRSEMDSIIANGTWEVIEXPYGCKPVGCKWVFKKKLRPDGTIEKYKAWLVAKGYTQKEGEYFFDTYSPVARLTTICVLLSLAASHGLFVHQMNVKTAFLNGELDEEIYMDQPDRFVVEGQEGKVCKLLKSLYGLKQAPKQWHEKFDKTLTSPGFAVNEADKCVYYRHGGGEGVILCLFVDDILIFGTNLEVINEVKSFLSQNFDIKDLGVADVILNIKLIRGENGITLLQSHYVEKILNRSGYIDSKPSPTPGNKRIARNQLEYSEIIGSLMYLASATRPDISFAVSKLSRFTSNPGDDHWRVLERVMRYLKGTMELGLHYSGYPAVLEGYSDYNWISDVDEIKATSGYVFTLGGGAVSWRSCKQTILMRSTMEAELTALDTATVEAEWLRDLLMDLPIVEKPVPAILMNCDNQTVIVKVNSSKNNMKSSRHVKRRLKSVRKLRNSGVITLDYIQTARNLADPFTKGLSRNVIDNASKEMGLRPM

SEQ ID NO: 20495 - protein, 485 aa, Oryza sativa
  Clone ID: TF_OSC900099j.C1.p19.fg
MKQQMIDNSAKIVSPDTVTTSTRYCHKFAEFMKTRPPTFAGSATSWYTDQWLGTIENKLDMVQCDEKNKVFYAAHQLQGAALECWKGYCATDKDPQAISWAEFSSILHYMDVSPGFIKTKDHTKDGVCTLCSQGYRYELMWCPRNKPRNCACARCGEIGHSASEHEISCSSCEQSHLLGECPMSKLTCYLCEGDDHVPIKCPLSSILTTVTQHQREAYQEVIQQVIGETNKIIVTPVKKFREVDDSSLQYQCKRGSESASKVACSACGEQGEAASYKAKCMSKTRKASSKTKNVVCFSCNEMGHFANRCPLRHQTPAQDKTIPKAILTKRTTPTTGGEVLWWRGRGGFLPASAVNGGRSRNASKRENVAESFAHLMVVVSWTEVAGIDGDGGTSGGEPRLGDDDDAWSDPAAVENGGATATASSSLRSAKKGCFMNEDLRRNSPGSEESTKKWFGLRSTGWTGTEKEAGDGALEQKTATRTAQGG

SEQ ID NO: 20496 - protein, 366 aa, Oryza sativa
  Clone ID: TF_OSC900327j.C1.p7.fg
MKQQMIDNSAKIVSPDTVTTSTRYCHKFAEFMKTRPPTFAGSATSWYTDQWLGTIENKLDMVQCDEKNKVFYAAHQLQGAALECWKGYCATDKDPQAISWAEFSSILHYMDVSPGFIKTKDHTKDGVCTLCSQGYRYELMWCPRNKPRNCACARCGEIGHSASEHEISCSSCEQSHLLGECPMSKLTCYLCEGDDHVPIKCPLSSILTTVTQHQREAYQEVIQQVIGETNKIIVTPVKKFREVDDSSLQYQCKRGSESASKVACSACGEQGEAASYKAKCMSKTRKASSKTKNVVCFSCNEMGHFANRCPLRHQTPAQDKTIPKAILTKRTTPTTGGEVELIRNGRGRCLLVFVIGFYHLGILIVA

SEQ ID NO: 20497 - protein, 1136 aa, Oryza sativa
  Clone ID: TF_OSC14678j.C1.p1.fg
MPRRRSSSPIVRTPHDSGGRATGSGGGDRGLVIHRVVKEGGGSVNYPLLTKTNYNDWALLMKIKLQAHCLWAAIEPDGVDVPLHEDRMALDAICSAVPPEMIGTLATKASAREAWECIKTMRVGNDRIRKASAQKVRAEYESLAFRGDETVEDFALWLTTIVNQLATLGDPEPADKVIEKYLRVARPRFNQLILSIETLLDISTLSMEEVTGRLKAAEDSGQSSSHTAGGKLYLTEEEWAERQKKKDQEAKRGDSGGSGGRGKRRGGRGRTGGGGTASPESTNSGSARKGDKCRNCGKLGHWAKDCRSKSKREEQAHVAQEDEEEHTLMLLTGGRVDTVDAAAPEGDTPTPPHQAVVELVEMKVFPALDDVADHDPGRWIMDSGASNHMTGSRMAFADLDTNITGNVRLSDGSVVRIAGRGTILFACKNGEHRTLSNTYYLPRLAANIISIGQLDETGFKVLAEDGIMRVWDEQRRLLARIPRTPGRLYMLDINLARLVCLAAHADEDAWRWHARLGHINFRALCKMGKEELVRGLPCLSQVDQVCEACLAGKHRRSPFPRQALCRSDEPLALLHGDLCGPITPATPSGNRYFLLLVDDYSWYMWVALLSTKDAAPAAIKRIQAAAERKSGRKLRALRTDRGGEFTSTQFAEYCAELGMRRELTAPYSPQQNGVVERRNQSVVGTARSMLKAKGLPGMFWGEAINTAGYLLNRSSSKGIGGKTPYALWNGVPPAVHHLRTFGCVAHVKTTTPNLKKLDDRSCPMIFVGYEPGSKAYRAYDPATRRVHISRDIVFDEAAQWDWDAEAAADLDTDFVVEYTTVYHPGSLSGTRQDAGEPPARSSSSPRTPSDSPTAGRTPSVHGDAPAVDFVSPPTGAAANLDADHDDAPLRFRTMDNVLGPAMLPGLANREVQEELMMVSGEEPATFAQAERDEDWRRAMLDEISSIEENKTWRLVDLPSGHRPIGLKWVYKLKKDAQGVVVKHKARLVAKGYVQRAGIDFDEEGWMVHHMDVKSAFLNGELIEEVYVVQPPGFEIDGQENKVYRLDKALYGLRQAPRAWNTKLDCTLKKLGFKQSPLEHGLYARGDGSGRLLVGVYVDDLVIVGGDSGMIKGFKEQMKAEFKMSDLGPLSFYLGIE

SEQ ID NO: 20498 - protein, 1446 aa, Oryza sativa
  Clone ID: TF_OSC14686j.C1.p3.fg
MPRRRSSSPIVRTPHDSGGRATGSGGGDRGLVIHRVVKEGGGSVNYPLLTKTNYNDWALLMKIKLQAHCLWAAIEPDGVDVPLHEDRMALDAICSAVPPEMIGTLATKASAREAWECIKTMRVGNDRIRKASAQKVRAEYESLAFRGDETVEDFALWLTTIVNQLATLGDPEPADKVIEKYLRVARPRFNQLILSIETLLDISTLSMEEVTGRLKAAEDSGQSSSHTAGGKLYLTEEEWAERQKKKDQEAKRGDSGGSGGRGKRRGGRGRTGGGGTASPESTNSGSARKGDKCRNCGKLGHWAKDCRSKSKREEQAHVAQEDEEEHTLMLLTGGRVDTVDAAAPEGDTPTPPHQAVVELVEMKVFAALDDVADHDPGRWIMDSGASNHMTGSRMAFADLDTNITGNVRLSDGSVVRIAGRGTILFACKNGEHRTLSNTYYLPRLAANIISIGQLDETGFKVLAEDGIMRVWDEQRRLLARIPRTPGRLYMLDINLARLVCLAAHADEDAWRWHARLGHINFRALCKMGKEELVRGLPCLSQVDQVCEACLAGKHRRSPFPRQALCRSDEPLALLHGDLCGPITPATPSGNRYFLLLVDDYSWYMWVALLSTKDAAPAAIKRIQAAAERKSGRKLRALRTDRGGEFTSTQFAEYCAELGMRRELTAPYSPQQNGVVERRNQSVVGTARSMLKAKGLPGMFWGEAINTAVYLLNRSSSKGIGGKTPYALWNGVPPAVHHLRTFGCVAHVKTTTPNLKKLDDRSCPMIFVGYEPGSKAYRAYDPATRRVHISRDIVFDEAAQWDWDAEAAADLDTDFVVEYTTVYHPGSLSGTRQDAGEPPARSSSSPRTPSDSPTAGRTPSVHGDAPAVDFVSPPTGAAANLDADHDDAPLRFRTMDNVLGPAMLPGLANREVQEELMMVSGEEPATFAQAERDEDWRRAMLDEISSIEENKTWRLVDLPSGHRPIGLKWVYKLKKDAQGVVVKHKARLVAKGYVQRAGIDFDEVFAPVARLDSIRLLLALAAQEGWMVHHMDVKSAFLNGELIEEVYVVQPPGFEIDGQENKVYRLDKALYGLRQAPRAWNTKLDCTLKKLGFKQSPLEHGLYARGDGSGRLLVGVYVDDLVIVGGDSGMIKGFKEQMKAEFKMSDLGPLSFYLGIEVHQEAGIITLKQAAYASRIVEKAGLTGCNPCATPMEPCLKLSKESAGSLVDATEYRSLVGSLRYLVNTRPDLAYSVGYVSRFMEKPTDEHLAAVKRIIRYVAGTIHLGCRYVKEGEGGLQGYSDSDMAGDIDTRKSTTGVIFFLGKNPVSWQSQKQRVVALSSCESEYIAAATAACQGIWLARLLGDLRNAATEVVDLRVDNQSALALMKNPVFHDRSKHIQTKFHFIREAVENGEITPSYIGIEGQLADILTKPLSRIKFQELREQIGLATVRMRCVVWFPASDRWGNS

SEQ ID NO: 20499 - protein, 1511 aa, Oryza sativa
  Clone ID: TF_OSC400016j.C1.p3.fg
MPRRRSSSPIVRTPHDSGGRATGSGGGDRGLVIHRVVKEGGGSVNYPLLTKTNYNDWALLMKIKLQARCLWAAIKPDGVDVPLHEDRMALDAICSAVPPEMIGTLATKASAREAWECIKTMRVGNDRIRKASAQKVRAEYESLAFRGDETVEDFALRLTTIVNQLATLGDPEPADKVVEKYLRVARPRFNQLILSIETLLDISTLSMEEVTGRLKAAEDSGQSSSHTAGGKLYLTEEEWAERQKKKDQEAKRGDSGGSGGRGKRRGGRGRTGGGGTASPESTNSGSARKGDKCRNCGKLGHWAKDCRSKSKREEQAHVAQEDEEEHTLMLLTGGRVDTVDAAAPEGDTPTPPHQAVVELVEMKVFAALDDAADHDPGRWIMDSGASNHMTGSRMAFADLDTNITGNVRLGDGSVVRIAGRGTILFACKNGEHRTLSNTYYLPRLAANIISIGQLDETGFKVLAEDGIMRVWDEQRRLLARIPRTPGRLYMLDINLARPVCLAAHADEDAWRWHARLGHINFRALCKMGKEELVRGLPCLSQVDQVCEACLAGKHRRSPFPRQALCRSDEPLALLHGDLCGPITPATPSGNRYFLLLVDDYSRYMWVALLSTKDAAPAAIKRIQAAAERKSGRKLRALRTDRGGEFTSTQFAEYCAELGMRRELMAPYSPQQNGVVERRNQSVVGTARSMLKAKGLPGTRQDAGEPPARSSSSPRTPSDSPTAGRTPSVHGDAPAVEFVSPPTGAAANLDADHDDAPLRFRTMDNVLGPAMLPGLANREVQEELMMVSGEEPATFAQAERDEDWRRAMLDEISSIEENKTWRLVDLPSGHRPIGLKWVYKLKKDAQGVVVKHKARLVAKGYVQRAGIDFDEVFAPVARLDSVRLLLALAAQEGWMVHHMDVKLAFLNGELIEEVYVVQPPGFEIDGQENKVYRLDKALYGLRQAPRAWNTKLDCTLKKLGFKQSPLEHGLYARGDGSGRLLVGVYVDDLVIVGGDSGMIKGFKEQMKAEFKMSDLGPLSFYLGIEVHQEAGIITLKQAAYASRIVEKAGLTGCNPCATPMEPRLKLSKESAGSLVDATEYRSLVGSLRYLVNTRPDLAYSVGYVSRFMEKPTDEHLAAVKRIIRYVAGTIHLGCRYVKEGEGGLQGYSDSDMVGDIDTRKSTTGVIFFLGKNPVSCQSQKQRVVALSSCESEYIAAATAACQGIWLARLLGDLRNAATEVVDLRVDNQSALALMKNPIFHDRSKHIQTKFHFIREAVENGEITPSYIGTEGQLADILTKPLSRIKFQELREQIGLATIAQSQAPDGEKGKSTSKVPQLDIKDTKSSSNRKTRYGTSLNCQNRGMDLLDTLVVRFHMKGVFILDGTKKKYCGGSEALSYIDRDKVSLPELFGHLRDHCSVMSRTLLHWLFPGRDLQTGLRALSNDKACKLMCDCTGELDVAYIYVEEPEIVDLCDGSADNSNYEADMELKVDSEEEYVNMDVEVDVGEATGSGCKGKAVEEHGEASGSGSRAE

SEQ ID NO: 20500 - protein, 1431 aa, Oryza sativa
  unsure (1)..(1431): unsure at all Xaa locations
  Clone ID: TF_OSC400252j.C1.p3.np
MPQQALGARSSTGCSPAPPGAGSGTWAPSPGAAANVNVNGGSSASQSSGGPFSGYIFLLLLTHSFIPLLVMLVAILLRSWYVHDAYYTLSMLLVMLHFITRSPHIVHAMIIILTFWIKICRYMTIFPTIQKPDGSFSVVGFAATLKPHAFDGSNYKRWKARALLWLTAMQCFYVSWGKRSEPPLSPKEDVKFEASNCLFRGALISVLADNIVDVYIHMPSGKDMWDALEAKFGVSDAGSELYVMEQFYDYKMVDDRSVVEQAHEIQMLAKELENNNCELPDKFVAGGIIAKLPPSWSDFATSLKHKQEFSVSDLIGSLGVEEKARAKDNRGKKVEGGSSANMVQKKNPHASHNNKKVKLDGKPKATTNFKKKGKGKAKEDCFVCGKSGHWAKDCPERKERKSANMVISEGGETSGXGKILPTVLSVFHSPDWWVDTGANIHVCDDGRGSSLLMGNGSLAAVHGVGTVDLKFTSGKTVQLKNVQHVASTKKNLVSGSLLCREGFRVVFESYKCVVSKYGTFIGKGYDSRGLFHFSLDDMCNNHNVVNHISENDESNVWHSRLCHVNFGCTTRLANMSLIPKFTLVKVSKCHTCVQSKQPRKPHKAFEARNLALLELVHSDLCEMNGVLTKGGKKYFMTLIDDCTRFCYVYLLKTKDEALHYFKTYKAEVENQLERKKRLRSDRGGEYFSNEFASFCEEFGIIHERTPPYPPQSNGVAERKNCTLTEMVNAMLDTAELSKEWWGEAVLTACYILNKIPMKYKEVTPFEEWERKKLNLSYLRTWGCLAKVSVPIAKKRKLRPNTVDCMFLGYAIYSVGYRFLIVNSGVPDMRVGTIIESRDAIFFDNEFPMKHTPSTSSQETVIPHEHFAPIEHNDQTPEGNPEDNIVDTLKSKRQRVAKSFGDDYIVYLVDNTPRTIEEAYLSPDADYWKEAVRSEMDSIMSNDTWEVVEYPYGCKPVGCKWVFKKKLRPDGTIEKYKVRLVAKDYTQKEGEDFFDTYSLVARLTTIRLLLALAASHGLLVHQMDVKTAFLNGELEEEIYMDQPDGYVLEGQEGMVCKLFKSLYGLKQAPKQWHEKFDTTLTSAGFVDNEADKCVYYRHGGGEGVILCLYVDDILIFWTSLNVIEEVKDYLSKSFEMKDLGEADVILNIKLPRGYEGGITLVQSHYVDKVLTPTPYDPSVLLRKNRRIAPTPYDPSVLLRKNRRIARDQLRYSQIIGSLMYLASATRPNISFAVSKLSRFVSNPGDDHWQALERVMRYLKGTMSYGIHYTGYPKVLEGYSDSNWISDADEIKATSGYVFTLGGGAVSXKSYKQTILTRSTMEAELTALDTATVEAEWLRELLMDLPVVEKPVSAILMNCDNQIVIITVNSSKDNMKSSRHIKRRLKSVRKXKNSGVIALDYVQTANNLADQFTKGLPRNVIDSASRKMGLIPT

SEQ ID NO: 20501 - protein, 1499 aa, Oryza sativa
  Clone ID: TF_OSC401205j.C1.p5.fg
MRVSEFSSLPASCAGSSDHVVWLWGWTQLEHGVRSGLGGLATRSLGKFLTIGIRARFRKWTRDRALEGVFLPRRRSSSPIVHTPHDSGGRATGSGGGDRGLVIHRVVKEGGGSVNYPLLTKTNYNDWALLMKIKLQARCLWAAIEPDGVDVPLHEDRMALDAICSAVPPEMIGTLATKASAREAWECIKTMRVGNDRIRKASAQKVRAEYESLAFRGDETVEDFALRLTTIVNQLATLGDPEPADKVVEKYLRVARPRFNQLILSIETLLDISTLSMEEVTGRLKAAEDSGQSSSHTAGGKLYLTEEEWAERQKKKDQEAKRGDSGGSGGRGKRRGGRGRTGGGGTASPESTNSGSARKGDKCRNCGKLGHWAKDCRSKSKREEQAHVAQEDEEEHTLMLLTGGCVDTVDAAAPEGDTPTPPHQAVVELVEMKVFAALDDAADHDPGRWIMDSGASNHMTGSRMAFADLDTNITWNVRLGDGSVVRIAGRGTILFACKNGEHRTLSNTYFLPRLAANIISIGQLDETGFKVLAEDGIMRVWDEQRRLLARIPRTPGRLYMLDINLARPVCLAAHADEDAWRWHARLGHINFRALCKMGKEELVRGLPCLSQVDQVCEACLAGKHRRSPFPRQALCRSDEPLALLHGDLCGPITPATPSGNRYFLLLVDDYSRYMWVALLSTKDAAPAAIKRIQAAAERKSGRKLRALRTDRGGEFTSTQFAEYCAELGMRRELTAPYSPQQNGVVERRNQSVVGTARSMLKAKGLPGMFWGEAINTAVYLLNRSSSKGIGGKTPYALWNGVPPAVHHLRTFGCVAHVKTTTPNLKKLDDRSRPMIFVGYEPGSKAYRGYDPATRRVHISRDIVFDEAAQWDWDAEAAADLDTDFVVEYTTVYHPGSLSGTRQDAGEPPARSSSSPRTPSDSPTAGRTPSVHGDAPAVEFVSPPTGAAANLDADHDDAPLRFRTMDNVLGLAMLPGLANREVQEELMMVSGEEPATFAQAERDEDWRRAMLDEISSIEENKTWRLVDLPSGHRPIGLKWVYKLKKDAQGVVVKHKARLVAKGYVQRAGIDFDEVFAPVARLDSVRLLLALAAQEGWMVHHMDVKSAFLNGELIEEVYVVQPPGFEIDGQENKVYRLDKALYGLRQAPRAWNTKLDCTLKKLGFKQSPLEHGLYARGDGSGRLLVGVYVDDLVIVGGDSGMIKGFKEQMKAEFKMSDLGPLSFYLGIEVHQEAGIITLKQAAYASRIVEKAGLTGCNPCATPMEPRLKLSKESAGSLVDATEYRSLVGSLRYLVNTRPDLAYSVGYVSRFMEKPTDEHLAAVKRIIRYVAGTIHLGCRYVKEGEGGLQGYSDSDMAGDIDTRKSTTGVIFFLGKNPVSWQSQKQRVVALSSCESEYIAAATAACQGIWLARLLGDLRNAATEVVDLRVDNQSALALMKNPVFHDRSKHIQTKLHFIREAVENGEITPSYIGTEGQLADILTKPLSRIKFQELWEQIGMFPV

SEQ ID NO: 20502 - protein, 1446 aa, Oryza sativa
  Clone ID: TF_OSC401652j.C1.p3.fg
MPRRRSSSPIVRTPHDSGGRATGSGGGDRGLVIHRVVKEGGGSVNYPLLTKTNYNDWALLMKIKLQAHCLWAAIEPDGVDVPLHEDRMALDAICSAVPPEMIGTLATKASAREAWECIKTMRVGNDRIRKASAQKVRAEYESLAFRGDETVEDFALWLTTIVNQLATLGDPEPADKVIEKYLRVARPRFNQLILSIETLLDISTLSMEEVTGRLKAAEDSGQSSSHTAGGKLYLTEEEWAERQKKKDQEAKRGDSGGSGGRGKRRGGRGRTGGGGTASPESTNSGSARKGDKCRNCGKLGHWAKDCRSKSKREEQAHVAQEDEEEHTLMLLTGGRVDTVYAAAPEGDTPTPPHQAVVELVEMKVFAALDDVADHDPGRWIMDSGASNHMTGSRMAFADLDTNITGNVRLSDGSVVRIAGRGTILFACKNGEHRTLSNTYYLPRLAANIISIGQLDETGFKVLAEDGIMRVWDEQRRLLARIPRTPGRLYMLDINLARLVCLAAHADEDAWRWHARLGHINFRALCKMGKEELVRGLPCLSQVDQVCEACLAGKHRRSPFPRQALCRSDEPLALLHGDLCGPITPATPSGNRYFLLLVDDYSWYMWVALLSTKDAAPAAIKRIQAAAERKSGRKLRALRTDRGGEFTSTQFAEYCAELGMRRELTAPYSPQQNGVVERRNQSVVGTARSMLKAKGLPGMFWGEAINTAVYLLNRSSSKGIGGKTPYALWNGVPPAVHHLRTFGCVAHVKTTTPNLKKLDDRSCPMIFVGYEPGSKAYRAYDPATRRVHISRDIVFDEAAQWDWDAEAAADLDTDFVVEYTTVYHPGSLSGTRQDAGEPPARSSSSPRTPSDSPTAGRTPSVHGDAPAVDFVSPPTGAAANLDADHDDAPLRFRTMDNVLGPAMLPGLANREVQEELMMVSGEEPATFAQAERDEDWRRAMLDEISSIEENKTWRLVDLPSGHRPIGLKWVYKLKKDAQGVVVKHKARLVAKGYVQRAGIDFDEVFAPVARLDSIRLLLALAAQEGWMVHHMDVKSAFLNGELIEKVYVVQPPGFEIDGQENKVYRLDKALYGLRQAPRAWNTKLDCTLKKLGFKQSPLEHGLYARADGSGRLLVGVYVDDLVIVGGDSGMIKGFKEQMKAEFKMSDLGPLSFYLGIEVHQEAGIITLKQAAYASRIVEKAGLTGCNPCATPMEPCLKLSKESAGSLVDATEYRSLVGSLRYLVNTRPDLAYSVGYVSRFMEKPTDEHLAAVKRIIRYVAGTIHLGCRYVKEGEGGLQGYSDSDMAGDIDTRKSTTGVIFFLGKNPVSWQSQKQRVVALSSCESEYIAAATAACQGIWLARLLGDLRNAATEVVDLRVDNQSALALMKNPVFHDRSKHIQTKFHFIREAVENGEITPSYIGIEGQLADILTKPLSRIKFQELREQIGLATVRMRCVVWFPASDRWGNS

SEQ ID NO: 20503 - protein, 1522 aa, Oryza sativa
  Clone ID: TF_OSC401885j.C1.p1.fg
EKNFWARHHGTPEHAPSAAAADIVVVPTTVDQTKPSRRANVFSVSSNLVCHGLATRSLGKFLTIGIRARFRKWTRDRALEGVFMPRRRSSSPIVRTPHDSGGRATGSGGGDRGLVIHRVVKEGGGSVNYPLLTKTNYNDWALLMKIKLQARCLWAAIEPDGVDVPLHEDRMALDAICSAVPPEMIGTLATKASAREAWECIKTMRVGNDRIRKASAQKVRAEYESLAFRGDETVEDFALRLTTIVNQLATLGDPEPADKVVEKYLRVARPRFNQLILSIETLLDISTLSMEEVTGRLKAAEDSGQSSSHTAGGKLYLTEEEWAERQKKKDQEAKRGDSGGSGGRGKRRGGRGRTGGGGIASPESTNSGSARKGDKCRNCGKLGHWAKDCRSKSKREEQAHVAQEDEEEHTLMLLTGGCVDTVDAAAPEGDTPTPPHQAVVELVEMKVFAALDDAADHDPGRWIMDSGASNHMTGSRMAFADLDTNITGNVRLGDGSVVRIAGRGTILFACKNGEHRTLSNTYYLPRLAANIISIGQLDETGFKVLAEDGIMRVWDEQRRLLARIPRTPGRLYMLDINLARPVCLAAHADEDAWRWHARLGHINFRALCKMGKEELVRGLPCLSQVDQVCEACLAGKHRRSPFPRQALCRSDVPLALLHGDLCGPITPATPSGNRYFLLLVDDYSRYMWVALLSTKDAAPAAIKRTQAAAERKSGRKLRALRTDRGGEFTSTQFAEYCAELGMRRELTAPYSPQQNGVVERRNQSVVGTARSMLKAKGLPGMFWGEAINTAVYLLNRSSSKGIGGKTPYALWNGVPPAVHHLRTFGCVAHVKTTTPNLKKLDDRSRPMIFVGYEPGSKAYRAYDPATRRVHISRDIVFDEAAQWDWDAEAAADLDTDFVVEYTTVYHPGSLSGTRQDAWEPPARSSSSPRTPSDSPTAGRTPSVHGDAPAVEFVSPPTGAAANLDADHDDAPLRFRTMDNVLGPAMLPGLANREVQEELMMVSGEEPATFAQAERDEDWRRAMLDEISSIEENKTWRLVDLPSGHRPIGLKWVYKLKKDAQGVVVKHKARLVAKGYVQRAGIDFDEVFAPVARLDSVRLLLALAAQEGWMVHHMDVKSAFLNGELIEEVYVVQPPGFEIDGQENKVYRLDKALYGLRQAPRAWNTKLDCTLKKLGFKQSPLEHGLYARGDGSGRLLVGVYVDDLVIVGGDSGMIKGFKEQMKAEFKMSDLGPLSFYLGIEVHQEAGIITLKQAAYASRIVEKAGLTGCNPCATPMEPRLKLSKESAGSLVDATEYRSLVGSLHYLVNTRPDLAYSVGYVSRFMEKPTDEHLAAVKRIIRYVAGTIHLGCRYVKEGEGGLQGYSDSDMAGDIDTRKSTTGVIFFLGKNPVSWQSQKQRVVALSSCESEYIAAATAACQGIWLARLLGDLRNAATEVVDLRVDNQSALALMKNPVFHDRSKHIQTKFHFIREAVENGEITPSYIGTEGQLADILTKPLSRIKFQELREQIGLATVRVRCVRLVSC

SEQ ID NO: 20504 - protein, 415 aa, Oryza sativa
  Clone ID: TF_OSC401980j.C1.p15.fg
MSGTSSDEPTLENLAHKLKGMENWYEELMRNSKSYKESTDKHLKTLSESLVKVVDQIEKMNQSHKQLTENIQNMIIEHENIVRRIGLLEAAGEEGAGATAHRHQRYDDEDEEQSVADDVEEDESVGNRRQRRVRDKDDPLSKVKFTMPSFDETYYQEMMIALSRCDLQETEDARISRFYGSLNREIRDILEYKEYNTMNRLFHFACKAEREVQGRNKHRSSFAGATSTRQSTPRQATTAVRSPTSTPSNAQEKSKNASVQTPAKSATSVASTGRTRDITCHKCHGIGHIARDCPNRRALFVNDDGEYTSTSDCDDEYALAATDHAGGQDNDDIEEVHLHPESLDQYPSLIVKLALSAKEKCEEQNQCHNLFQSKVLVKDHTVKMIIDSGSCNNLASEEMVKKLGLTTHPPPRIST

SEQ ID NO: 20505 - protein, 415 aa, Oryza sativa
  Clone ID: TF_OSC900308j.C1.p9.fg
MSGTSSDEPTLENLAHKLKGMENWYEELMRNSKSYKESTDKHLKTLSESLVKVVDQIEKMNQSHKQLTENIQNMIIEHENIVRRIGLLEAAGEEGAGATAHRHQIYDDEDEEQSVADDVEEDESVGNRRQRRVRDKDDPLSKVKFTMPSFDETYYQEMMIALSRCDLQETEDARISRFYGSLNREIRDILEYKEYNTMNRLFHFACKAEREVQGRNKHRSSFAGATSTRQSTPRQATTAVRSPTSTPSNAQEKSKNASVQTPAKSATSVASTGRTRDITCHKCHGIGHIARDCPNRRALFVNDDGEYTSTSDCDDEYALAATDHAGGQDNDDIEEVHLHPESLDQYPSLIVKLALSAKEKCEEQNQCHNLFQSKVLVKDHTVKMIIDSGSCNNLASEEMVKKLGLTTHPPPRIST

SEQ ID NO: 20506 - protein, 319 aa, Oryza sativa
  Clone ID: TF_OSC10377j.C1.p4.fg
MATECLGFQERATPVGESSSVLPRRRSPEKGLPRGYTHADILTVAARGPVSSGAKISGEFAHEFRPERPSNGGGSPMATVQPRVARGPASSTMMNCGKKVGEINLEDIFPKFRPTEPQKWIWIKRGEVRPLLGFPARDDEIRRFGDGARRIWKVPEKRCDHRTFAQVVMERRPPNRLDWQANKRRATEQGGGDWGARGGGDWGACGAREEEELHRQLLAQNPRANQGAQWKPQGLPGTDGERGARAPKIKCFKCGREGHHQAARPNPSLCYSCHSSGHISSQCPLMMRKGVKLCGFGIPGQGFYSLNVELSDMRLLKPL

SEQ ID NO: 20507 - protein, 635 aa, Oryza sativa
  Clone ID: TF_OSC420025j.C1.p1.fg
MVTPAPPGGWDFSPGDAIREEVRLRFRSPVHFSSKFCPTHFRLVDLPRANFRLTNSSVALALRAAIGGSPADLNDQHLLDRSFSFDVCSKQVGLWIYRLRSFSCDDFALRFYLWRNGGPNWQWEFESWSRDCAEEWTLVSSKKRLVHNSSKVQKGKSYAQAVQQRDVLVKSVFQHLKAPLQERRSVFTRLQGLKVPIAGETPATKTVEPIMEEDPISARNLNSNFMLSCTRCLDKGHIASDCSEPVWCHSCLEAGHMARFCATRPAKAHQPVGKFPKLSSRNNLVWRAKSSPAKKMAVYPRIPSSPRNTVQSNPQNFPSLAMANLNPNPQRFLRQGQVVHQGGNLRVPRVDLTIPQRLPRRHEDACIAIVEPAIPEHEWDHHRALISDHLFEVHMYEVRTAYRHPSAVGMFQLRSVMHRDALVNSPPAAYDGMHTVEFVKHDQGPNWRACHFNQEGWFLLLDFPLDFVDHHHINLAVASFGQLSFWLDRDQMLGRVFVRAKYRDLDSVPRKIVLQDPLGNGGGGESWTISIFVLDGDFADIPPEEDLPPAGLQPGPNEDNADDPDDGNIWQLGHPGNQGGGGAWDDLVQQQQAAEAEIEDAWGQDHPMGQVEENPGQLIILPNQKEQELNLFEQE

SEQ ID NO: 20508 - protein, 947 aa, Oryza sativa
  unsure (1)..(947): unsure at all Xaa locations
  Clone ID: TF_OSC17665j.C1.p1.np
MSNEVNHVGKAPMFNGTNYSTWKIKMSTHLKAMSFHIWSIVDVGFTITDTPLTEIDHHNLQLNAQAMNALFNSLSQEEFDRVSNLKTAYEIWNKLAEIHEGTSEYKDAKLHFLKIQYETFSMLPHESVNDMYGRLNVIVNDLKGLGANYIDLEVAQKMLRPLPEKYETLVTMLINSDMSRMTLASLLGKINTNDMYKLKKEEMKEASPSKKCIALQAEVEDKGKGKVNEANEDLEEEIALLARRFNDLLGRRKERGRGSNSNRRRNRRPKKTLSNLRCFECGEKGHFASKCTSKDDDEDKSSKKKSGGYKLRKKLKKEGKKIEAFIGEXDSNEESSTSSGSEEEGGDDASSKKKKMAVVAIKEAPSLFAPLCLMAKGSSKVISLSDGGSDDDCDDVSYDELVSMFEELYAYSEKEIVKFKDLKKDHASLEVLYEELKTSHERLTISHEKLKEAHDNLLSTTXHRALIDVGISCDLLDDSATCHIAHVASSSISTSFNDLVDMPSSGSSPCVSICDASLVVENNKLKEQVAKLNKSLERCFKGKNTLNKILSEQRCILNKERLGFIPKKGKKPSHRATRFVKSNGKYCSKCREVGHLVNDCPGSKPPKTCMFDSHYMLRKAYDGSIVARYVDSPILGGKKNAIWVPKALVSNLQRPKQVWIILAILVFFLHDKSIVAELFKKFAKKAQNEFSCTLVKIRSDNGSEFKNTNIEDYCDDLGIKHELSATYSPQQNGVVERKNRTLIEMARTMLDEYGVSDFFWAEAINTACHAINRLYLHRLLKKTSYELIVGRKPNVAYFRVFGCKCYIYRKGVRLTKFESRCDEGFLLGYASNSKAYRVYNKNKGDEGDEGLMRAMKNMSIGDVKPIEVEDKPSTSTQDEPSTSATPSQAQVEVEEEKAQNPPMPPRIHTVLSKDHPIDXVLGDISKGVQTRSRVASICEHYSFVSCL

SEQ ID NO: 20509 - protein, 215 aa, Oryza sativa
  Clone ID: TF_OSC30726j.C1.p1.fg
MRAEIPPKPMPHSPYPKPMYQQFRRQGTTPHWWKGKRKRKASSLITYAELDLSKMGIEIGDLPEEVEELQLWQRKRDGCCFSCGQFGHYAIGCTQDTNEEQETLPSQISPEEHRVSDPSKEVSKIKAYSRCGEIGHYGSNCVTQCPYCDEDHQNGECPTTKIACFLCEKTDHVPQDCQLSPLLTKTAEVQRVSLRFAHQLMTSGSHEDPGFPTFD

SEQ ID NO: 20510 - protein, 1571 aa, Oryza sativa
  Clone ID: TF_OSC400850j.C1.p68.np
MASRPRRAARAPARFGFEDGRVEPEENHESANEQSHHSNSSHRTVSRNAEVEQPRRSNRSHRTVSRDAEMEQSHRSHRTASHNSGEERLPSPPHVETNMQHLMAVQTQILQGLTTAIASFQHNAHGNGHPHMGNNRSKLTDFLRSRPPEFSQTIEPVEADDWLKDVDRKLNLVQCTPVEKTLYASHQLRGPAADWSENYCNAHPEPTNIAWDEFATAFRAAHVPESTIDMKKEEFNRLKQGNSSVNEYLSQFNKLARYAPEEVDTDKKKIRKFLKGIAVGMRLQLIAHDFPTFQHMINKALLLEDARKEATEEYKKRKSNHQGNSSRGAPRPRYGQPMQYHQSVTQANHQPGYAPRPQINRPAPQPQKHAPSGNTAPNSVTSFKSPQGPSAVQCFRCNQMGHYVRQCPQNPTNTNSGHANGSTAKTPTPAAAQSRPSSQASGQGSRASNNIGRGRVNHIQAETAQDAPDVVMGMFSVNSVPAIVLFDSGASHSFISQAFVKRNGWKTQNLRVPMIVHSPGRNIRATQICPEVNLRIEEVDFLAKPIVLDSQSLDIILGMDWLAKHKGQIDCAEKSITLQGPGGKQVRFTPNTPTASQSILTCLQVTSLESVPIVCEYPDVFPEELTRMPPDREIEFAIELAPGTAPIAKRPYRMAANELAEVKRQIEELESKGYVRPSSSPWGAPVLLVKKKDGSERMVIDYRALNEVTINNKYPLPRIDDLFDQLKGARVFSKIDLRSGYHQLKIRSEDIPKTAFSTRYGLYEFTVMSFGLTNAPAFFMNLMNKIFMEYLDQFVVVFIDDILIYSKSEEEHAEHLRLIMEKLRDHQLFAKFSKCEFWLDRVAFLGHVISSNGVEVDPSKVEAVLAWNPPKNVSEIRSFLGLAGYYRRFIEGFSKLARPMTELLRKEKKFQWSAACEDSFQEMKKRLTTAPVLTLPDIKDFEIFCDASRQGLGCVLMQERKVVAYASRQLRPHEVNYPTHDLELAAVVHALKIWRHYLIGNRCEVYTDHKSLKYIFTQTELNMRQRRWLELIKDYDLGIHYHPGKANVVADALSRKAYCNVAQIRPDQDHLCRELEKLRLTVVQSGVPASLTVQPTLESQIREAQKDDEGIKELIKRIQDKKDTNFSIDDQGTVWCGPRICVPAKKELRDLILKEAHESAYSIHPGSTKMYQDIKAYFWWAGMKRDVAEYVALCDICQRVKAEHQRPAGLLQPLPIPEWKWEEIGMDFITGLPRTPSGYDSIWVIVDRLMKSAHFVPVKTTFDGKKLAELYMTHVVCRFGCPKKIVSDRGTQFTSRFWKQLHEALGTDLNFSTAYHPQTDGQTERVNQILEDMLRACALDFEGTWDRCLPYAEFSYNNSYQASIQMSPNEAMFGRKCRTPLCWNEVGEALVFGPDILKSAEEQVKLIRERLKTAQNRQKNYADNRRRDLEFEKGDHVYLRVSPLRGIKRFGMSGKLAPRYIGPYLITARRGEVAYQLELPEGLADVHNVFHVSQLKKCLRVPEEQVPLGNIELERNLTYKERPIKVLEEAERQTRRKTIKFYKVQWSNHSEDEATWEREDLLRAEFPELLP

SEQ ID NO: 20511 - protein, 1209 aa, Oryza sativa
  Clone ID: TF_OSC415532j.C1.p8.fg
MSGVAAAAAGGDGGGGAPPTGAGAGAPGGAVNDNNNGGNSASPSSGEPFSGTFSVVGFAAALKPHAFDGSNYKRWKARALLWLTAMQCFYVSRGKRSEPPLSPEEEAKFEASDCLFRGALISVLADNIVDVYMHMPSGKDMWDALEAKFGVSDAGSELYVMEQFYDYKMVDDRSVVEQAHEIQMLAKELENNNCELPDKFVAGGIIAKLPPSWSDFATSLKHKRQEFSVSDLIGSLGVEEKARAKDVRGKKVEGGSSANMVQKKNPHASHNNKKVKLDVKPKAATNFKKKGKGKAKGDCFVCGKSEHWAKDCPERKDRKSANMVISEGGGTSGYGKILPTVLSVFHSPDWWVDTGANIHVGRGSSLLMGNGSLAAVHGVGTVDLKFTSGKTVQLKNVQHVPSIKKNLVSGSLLCREGFRLVFESNKCVVSKYGTFVGKGYDSGGLFRFSLNDMCNNHNAVNHISENDESNVWHSRLCHMNFGCMTRLANMSLIPKFTLVKGSKCHTCVQSKQPRKPHKASEARNLAPLELVHSDLCEMNGVLTKGGKKYFMTLIDDCTRFCYVYLLKTKDEALHYFKIYKAEVENQLERKIKRLRSDRGGEYFSNEFASFCKEFGIIHERTPPYSPQSNGVAERKNRTLTEMVNAMLDTAGLSKEWWGEAVLTACHVLNKIPMKYKEVTPFEEWERKKLNLSYLRTWGCLAKVNIPIAKKRKLGPNTVDCVSLGYAIHSVGYRFLIVNSGVPDMHVGTILESRDATFFENEFPMKHTPSTSSKETVMPHEHFAPIEHNDQTPEENPEEDNIVDTRKSKRQRVAKSFGDDYIVYLVDDTPRTIEEAYSSPDADYWKEAVRSEMDSIMSNGTWEVVERPYGCKPVGCKWVFKKKLRPDGTIEKYKARLVAKGYTQKEGEDFFDTYSPIARLTTIRVLLALAASHGLLVHQMDVKTAFLNGELEEEIYMDQPDGYVLECQEGMVCKLLKSLYGLKQAPKQWHEKFDTTLTSAGFVVNEADKCVYYRYGGGEGVILCLYVDDILIFGTSLNVIEEVKDYLSKSFEMKDLGEADVILNIKLQRGDEGGITLVQSHYVDKVLSRFGYSDCKPAPTPYDPSVLLRKTRRIARDQLRYSQIIGSLMYLASTTRPDISFVVSKLSRFVSNLGDDHWQALERVMRYLKGTMSYGIHYTGYPKVLEGYSDSNWISDADEIKATSGYVFTL

SEQ ID NO: 20512 - protein, 979 aa, Oryza sativa
  Clone ID: TF_OSC419079j.C1.p8.fg
MSQVGDSLVSEYSGALISVLADNIMDVYMHMPSGKDMWDTLEAKFGVSDAGSELYVMEQLYDYKMVDDRSIVEQAHEIQMLAKELENNNCELPDKFVAGGIIAKLPPSWSDFATSLKHKRQEFSVSDLIGSLGVEEKTRAKDNRGKKVEGGSSANMVQKKNPHASHNNKKVKPDVKPKATTNFKKKGKGKAKGDCFVCGKSEHWAKDCPERKDRKSANMVGRGSSLLMGNGSLAAVNGVVTVDLKFTSGKTMQLKNVQHVPSIEKNLVSGSLLCREGFRLVFESNKCVIFKSGTFIGKGYDSGGLFRFSLDDMCNNNNVVNHISENDESNDEALHYFKTYKAEVENQLERKIKRLRSDRGGEFFSNEFTSFCEEFGIIHERTPPYSPQSNGVAERKNRTLTEMVNAMLDTAGLSKEWWGEAVLTTCHVLNKIPMKHKEVTPFEVWERKKLNLSYLRTWGCLAKVNIPIAKKRKLGPNTVDCVFLGYAIHSVGYRFLIVNSRVPDMRVGTIIESRDATFFENEFPMKNTPSTSSQETVIPNEHFAPIEHNDQTPEGNPEEDNIVDTRKTSHGLLIHQMDVKTAFLNGELEKEIYMDQPDGYVLEGQEGMVCKLLKSLYGLKQAPKQWHEKFETTLTSAGFVVNETDKCVYYRYGGGEGLILCLYVDDILIFGTSLNVIEEVKNFLSKSFEMKDLGEADVILNIKLLRGDEGGITLVQSHYVDKVLSRFGYSDCKPAPTPYDPSVLLRKNRRIARDQLRYSQIIGSLMYLASASRPDISFAVSKLSRFVSNPGDDHWQALERVMRYLKGTMSYGVHYIGNPKVLEGYSDSNWISDADEIKATSGYVFTLGGGVVSWKSCKQTILTRSTIEAELTALDTMTVEAEWLRELLMDLPMVEKPVPAILMNYDNQTIIIKVNSSKDNMKSSSNIKRRPKSVRKQKNSGVIALDYAQTAKNLTDQFTKGLPCNVIDSTSRGMGLIST

SEQ ID NO: 20513 - protein, 858 aa, Oryza sativa
  Clone ID: TF_OSC900115j.C1.p1.fg
MSGVAAAAAGGDGGGGAPPTGAGAGAPGGAVNDNNNGGNSASPSSGEPFSGTFSVVGFAAALKPHAFDGSNYKRWKARALLWLTAMQCFYVSRGKRSEPPLSPEEEAKFEASDCLFRGALISVLADNIVDVYMHMPSGKDMWDALEAKFGVSDAGSELYVMEQFYDYKMVDDRSVVEQAHEIQMLAKELENNNCELPDKFVAGGIIAKLPPSWSDFATSLKHKRQEFSVSDLIGSLGVEEKARAKDVRGKKVEGGSSANMVQKKNPHASHNNKKVKLDVKPKAATNFKKKGKGKAKGDCFVCGKSEHWAKDCPERKDRKSANMVISEGGGTSGYGKILPTVLSVFHSPDWWVDTGANIHVGRGSSLLMGNGSLAAVHGVGTVDLKFTSGKTVQLKNVQHVPSIKKNLVSGSLLCREGFRLVFESNKCVVSKYGTFVGKGYDSGGLFRFSLNDMCNNHNAVNHISENDESNVWHSRLCHMNFGCMTRLANMSLIPKFTLVKGSKCHTCVQSKQPRKPHKASEARNLAPLELVHSDLCEMNGVLTKGGKKYFMTLIDDCTRFCYVYLLKTKDEALHYFKIYKAEVENQLERKIKRLRSDRGGEYFSNEFASFCKEFGIIHERTPPYSPQSNGVAERKNRTLTEMVNAMLDTAGLSKEWWGEAVLTACHVLNKIPMKYKEVTPFEEWERKKLNLSYLRTWGCLAKVNIPIAKKRKLGPNTVDCVSLGYAIHSVGYRFLIVNSGVPDMHVGTILESRDATFFENEFPMKHTPSTSSKETVMPHEHFAPIEHNDQTPEENPEEDNIVDTRKSKRQRVAKSFGDDYIVYLVDDTPRTIEEAYSSPDADYWKEAVRSEMDSIMSN

SEQ ID NO: 20514 - protein, 1228 aa, Oryza sativa
  Clone ID: TF_OSC400060j.C1.p7.fg
MSGVAAATAGGGGTPPTGAGSGAGAPGGAVNDNNNGGNSASPSSGGPFSGYTLLLLLLLLALFLFPLLALSLYYVRYVLVPVLHNASSMLSCYWYVPVPDIHDAHSMLLVMLRSPYTAYAMIIALTFWIKICRLMTIFPTIQKPDRSFSVVGFAAALKPHAFDGSNYKRWKARALLWLTAMQCFYVSRGKRSEPPLSPEEEAKFEASDCLFRGALISVLADNIVDVYMHMPSGKDMWDALEAKFGVSDAGSELYVMEQFYDYKMVDDRSVVEQAHEIQMLAKELENNNCELPDKFVAGGIIAKLPPSWSDFATSLKHKRQEFSVPDLIGSLGVEEKARAKDVRGKKVEGGSSANMVQKKNPHASHNNKKVKPDVKPKAATNFKKKGKGKAKGDCFVCGKYGHWAKDCPERKDRKSANMVISEGGGTSGYGKILPTVLSVFHSPDWWVDTGANIHVGRGSSLLMGNGSLAAVHGVGTVDLKFTSGKTVQLKNVQHVPSIKKNLVSGSLLCREGFRLVFESNKCVVSKYGTFVGKGSKCHTCVQSKQPRKAHKASEARNLAPLELVHSDLCEMNGVLTKGGKKYFMTLIDDCTRFCYVYLLKTKDEALHYFKIYKAEVENQLERKIKRLRSDRGGEYFSNEFASFCEEFGIIHEMMPPYSPQSNGVAERKNRTLTEMVNAMLDTAGLSKEWWGEAVLTACHVLNKIPMKHKEVNVPIAKKRKLGPKTVDCVFFGYAIHSVGYRFLIVNSGVPDMHAGTILESRDATFFENEFPMKYTPSTSSKETVMPHEHFAPIEHNDQTPEENPEEDNIVDTRKRKRQRVAKSFGDDYIVYLVDDTPRTIEEAYSSPDADYWKEAVRSEMDSIMSNGTWEVVERPYGCKPVGCKWVFKKKLRPDGTIEKYKARLVAKGYTQKEGEDFFDTYSPVARLTTIRVLLALAASHGLLVHQMDVKTAFLNGELEEEIYMDQPDRYVLEGQEGMVCKLLKSLYGLKQAPKQWHEKFDTTLTSAGFVVNEADKCLYYRYGGGEGVILCLYVDDILIFGTSLNVIEEVKDYLSKSFEKKDLGEADVILNIKLQKGDEGGITLVQSHYVDKVLSRFGYSDCKPAPTPYDPSVLLRKNRRIVRDQLRYSQIIGSLMYLASATRPDISFAVSKLSRFVSNPGDDHWQALERVMRYLKGTTSYGIHYTGYPKVLEGYSDSNWISDADEIKATSGYVFTLGGGAVSWKSCK

SEQ ID NO: 20515 - protein, 259 aa, Oryza sativa
  Clone ID: TF_OSC400775j.C1.p8.fg
MSTDGGVNGGHVGGGTGGGENDNINGGNNNNSNISFSGAFSSKPSEPPLSPKEEAMFESADCLFHGALISVLADNILDVYMHMPSAKDMWDAVEAKFGVSDAGKFGVTDLIGSLGVEEKVRAKDNPDKKIKRGSSANLVQKKNPNAPHNNNKKVKRDVKLKATTNFKKKCKGKAKGNCFVCGKSGHWAKDCPDHNDKKSANMVISEGEGTSGYGKFLPTVLSIFHSPDWWVDTFRHFRSRLRYLHGLEIVGARVYARLK

SEQ ID NO: 20516 - protein, 742 aa, Oryza sativa
  Clone ID: TF_OSC402610j.C1.p17.fg
MSTTGDNNNTGDKEKEPPVNTNRGNTASNSSGGPLSGVLADNIVDVYMHMPSGKDMWDALEAKFGVFDAGSELYVMEQFYDYKMVDDRSVVEQAHEIQMLAKELENNNCELPDKFVAAGIIAKLPPSWSDFATSLKHKRQEFGVTDLIGSLGVEEKARAKDNRSKKIKGGSSANLVQKKNPHASHNNNKKVKPDVKPKATTNFKKKGKGKAKGDCFVCGKYGHWAKDCPECKDKKSASMVIGEGGGTLRYGKFLPTVLFVCHSPDWWVDTGANIHVGRCSSLLMGNGSLAAVHGVGYDSGGLFRFSLDDMCNKVVNHDEALHYFKIYKAEVENQTGKENQTVEYGIIHERTPPYSPQSNGVAERKNRTLTEMVNAMLDTAGLSKEWWGEAILTACHVLNRIPTKHKEVTQFEEWERKKLNLSHLRTWGYLAKVNVPIAKKRKLGPKTVDCVFLGYAIHSVGYRFLIVNSRVPDMRIGTITESRDATFFENEFPMKNAPSTSSQEPILSPEHFAPIEYIDQTLEENPVEDNIMDVKTAFLNGELEEEIYMDQPDGLNVIGEVKDFLSKSFEMKDLGVADVILDIKLPRGDDGGITLVQSHYVDKVLSRFGYSDCKAAPTPYDPSVLLRKNRRIARDQLRYSQIIGSLMYLANVTRPNISFAVSKLSRFVSNPGDDHWHALERVMRYLKGTMSFGIHYTGYPKVLEGYSDSNWISDADEIKATSGYVFTLGGALFPGSLASRPS

SEQ ID NO: 20517 - protein, 533 aa, Oryza sativa
  Clone ID: TF_OSC6126j.C1.p2.fg
MADNEKGNKVRSQDISTLSSRVNEAPDTSCVTLVQHLINQNRLLIEILQQHQTPILNPSQIRPQVQLEAVQALTPQVSMPPASRRTHGDVPHVDPKEASNICFMCEEQGHYARERPQQKRKTPMRTEDEVRKMIITSTEWPPPGMTRRQRRNTFRGAPQLTEHLLANGGRVSDSEDSDQVSSDDEDEMERKACSRCGEIGHVASSCATICVHCEEDHPPDRCPTSRITCFFCEGTDHVPKDCQFSFLLTKKMANQPASSNGEKHQGNTNPRQDYSFSLTPVPGQRNRNEKRKCRVREDICCFNCQGMGHFADKCPKPRNIAAGTSVHATPCNQKLAPQRIVIHASRSSPIARVATAPIPMNALPQGVNAQFQPQPPADKTEASICVVPLEVPIQQLRNQVQDEEPELKKGITPKTVPNQGKIDLHITANLHEADIPIVLWSLEQTPYPGNLSEVDSEDRNHEKFWNGSITALPQPSLSQPKGAPWSKSGEEKIPSSTGGQAKQFRVVKFCWKFVKTQRKKSDKKRRPPNLSSC

SEQ ID NO: 20518 - protein, 566 aa, Oryza sativa
  Clone ID: TF_OSC14149j.C1.p1.np
SPSPNAICKRFLRSSSSDFQLVLDGQLCEEEDVVNCLPKLRKTAGSASEVEEAVKPAVKQDKRLRSVKVLSLVSNLSLPFVFPLSLSKPLQQMADNEKGNKVRSQDIGTSSRVNEAPDTSCVAVQHLINQNQLLIEILQQHWIAILNPSQMQHQVQLEAVQALSPQVSAPPTSQKAPHAMPHVDPKEASIICFMCDEQGHYARNCPQQKRKPMRTEDEVRKMIITSTEWPPPGMTKHQRRNSSQGAQQLTEHLLANGGRVSGSEDSDQVSSDDEDAKSPQGFNQNKIELKACSRCGEIGHVASSCASTCVHCEEDHPPDRCPTSRITCFFCEGTDHVPKDCQFSFLLTKKMANQPASSNGEKHQGNTNPRQGHRFSLTPVPGQRNRNEKRKCRVREDICCFNCQGMGHFADKCPKPRNIAAGTSVHATPCNQKLAPQRIVIHASRSSPIARVATAPIPMNALPQGVNAQFQPQPPADKTGASICVVPLEVPIQQLRNQVQDEEPECKKVIVCYNCSEEGHYSKNCPQPRQNRPPHYRQFTRSRHSNRIVVTGANAVPVRPRVNQNP

SEQ ID NO: 20519 - protein, 645 aa, Oryza sativa
  Clone ID: TF_OSC18542j.C1.p1.fg
MADNEKGNKVRSQDIGTSSSRVNEAPDTSCVAVVQHLINQNQLLIEILQQHRMPILNPSQMQPQVQLEAVQALTPQVSAPPTSQKAPHAMPHVDPKEASIICFMCDEQGHYARNCPQQKRKAPMRTEDEVRKMIITSTEWPPPGMTKHQRRNSFRGAQQLTEHLLANGGRVSGSEDSDQVSSDDEDEKSPQGFNQNKIELKACSRCGEIGHVASSCASTCVHCKEDHPPDRCPTSRITCFFCEGTDHVPKDCQFSFLLTKKMANQPASSNGEKHQGNTNPRQDHRFSLTPVPGQRNRNEKRKCRVREDICCFNCQGMGHFADKCPKPRNIAAGTSVHATPCNQKLAPQRIVIHASRSSPIARVATTPIPMSALTQGVNAQFQPQPPADKTEASICVVPLEVPIQQLRNQVQDEEPECKKVIVCYNCSEEGHYSKNCPQPRQNRPPHYRQFTRSRHSNRIVVTGANAVPAEPRAINLRRAIPSRRPSSASTSNQKEASPVNDSSMQSYHIITEPIEDAVTGTMPAISLQNQNEQPCLWFSVRYLSWCNRKFAAIIFMSINIDNLSEVDSEDMNHEKFWNGSITELPQPSLSQPKGAPWSKSGEEKIPSATGGQAKQFRVVKFCWKFVKTQRKKSDKKRSPPNLSSC

SEQ ID NO: 20520 - protein, 477 aa, Oryza sativa
  Clone ID: TF_OSC23131j.C1.p4.fg
MADNEKGNKVRSQDIGTSSSRVNEAPDTSCVAVVQHLINQNQLLIEILQQHRMPILNPSQMQHQVQLEAVQALTPQVSAPPTSQKAPHAMPHVDPKEASIICFMCDEQGHYARNCPQQKRKAPMRTEDEVRKMIITSTEWPPPGMTKHQRRNSSRGAQQLTEHLLANGGRVSGSEDSDQVSSDDEDAKSPQGFNQNKIELKACSRCGEIGHVASSCASTCVHCEEDHPPDRCPTSRITCFFCEGTDHVPKDCQFSFLLTKKMANQPASSNGEKHQGNTNPRQGHRFSLTPVPGQRNRNEKRKCRVREDICCFNCQGMGHFADKCPKPRNIAAGTSVHATPCNQKLAPQRIVIHASRSSPIARVATAPIPMNALPQGVNAQFQPQPPADKTGASICVVPLEVPIQQLRNQVQDEEPECKKVIVCYNCSEEGHYSKNCPQPRQNRPPHYRQFTRSRHSNRIVVTGANAVPVRPRVNQNP

SEQ ID NO: 20521 - protein, 162 aa, Oryza sativa
  Clone ID: TF_OSC18181j.C1.p1.np
RNNAHKNLTLIPDKHPPLTNETKVIVCYNCSEEGHYSKNCPQPRQNRPPHYRQFTRSRHSNRIVVTGANAVPVKQCTNAPPAAPDLKQCTNAPPAAPDLAINHSNHSLHRQPQQRIVVNGRSCVSSRPTPGRAKGNQPPEGDTKQKTVIRFNQQSEGSFSCE

SEQ ID NO: 20522 - protein, 815 aa, Oryza sativa
  Clone ID: TF_OSC414329j.C1.p9.fg
MSNEVKHVGKTPMLHSTNYSTWKIKMSTHLKAMSFHIWSFVDVGFAITGTPLTEIDHRNLQLNAQAMNALFNSLSQEEFDRVSNLETAYEIWNKLAEIHEGTSEYKDAKLHFLKIQYETFSMLPYESVNDMGLGQPTPMEMEEASPSKKEMEEASPSKKCIALQAEVEDKGKSKVNEVNDDLEEEIALLARRFNNLLGRRKERGRGSNSNKRRNKRPNKTLSNLRCFECGEKGYFASKCPSKDNDGDKSSKKKSGGYKLMKKLKKEGKKIEAFIGEWNSNEESSASSGSEEEGGDDASSKKKKMAVVAIKEAPSLFAPLCLMAKGSSKVASLSDSESDDDCDDVSYDELVSMFEKLHAYSEKEIVKFKALEKDHASLEVLYEELKTSHERLTISYEKIKEAHDNLLSTTQHGAHIDVGISCDLLDDSASSHIPHVASSSISTSCDDLMDMPSSSYSSCVSICDASLVVENNELKEQVAKLNKSLERCFKGKNTLDKIFSEQRCILNNKGLGYIPKKGKKPSHRVTRFVKSNGKYCSKCHEVGHLVNDCPGSKPSKTCMFDSHYMLKKAHDGSIVARYVGSPILGGKKNAIWVPKALVSNLQGPKQVWVNYRIGGSHWVLNSGCIQHMTGDRAMFTIFEVGGKEQEKVTFRDNSKGKEEIALLARRFNDLLGRRKERGRGSNSNKRRNKRPNKTISNLRCFECGEKGHFASKCPSKDDDGDKSSKKKSGGYKLMKKLKKEGKKIDTKPHPLRNIVSSHPYSVPLLLCVVSSTVFRSYRHVLPCFHPHRHFISTANPSPLEPHHDETGCKLENGYLI

SEQ ID NO: 20523 - protein, 822 aa, Oryza sativa
  Clone ID: TF_OSC900209j.C1.p21.gm
MDLPQFVVDIDALAKLQLEGMLPSQQNPEDPTKEDDENEHKNAQAANAILSAFSGSEFNRVDGIESAKVIWDTLRNLHEGTDSASESKVEILKGQFERFVMLDGESPSDMYDRLSKIVNEIKRLGSKDMTDEVVVKKMVQAITPRNSTLVTIIRERPDYKTLTPHDLHGCILAHDMLEQESKEVIQYINQTSTTSIKKEDLALKAKEEEEESCKSKSKAEIDDEEMALFVKKFGKFMKQSGFAKGSSSKYSSNKSSGRHSARVCYVCKKPGHFIADCPHIKDCPHLKEDKKKLEKKEKHKHSKHDRYGQAHLGMIFGFDSESSSSDEEGVATFTVKPSSPPRLFNYSSDEDAPICLMAKETKVPSPLKSFNVDLVSDEEDDVEDEVMDEELFKSITKESLPHLSELLGRIEDQYATLERQEALLIREKERSHELKGSKALKEYLGYQRDNFNHEGLGACQAGKQIGAHHPVKNVMATTRPLELLHMELFGPIAYLSVGGNKYGLVIVDDFSRFTWVFFLHDKSETQALFKKFARRAQNEFDLKIKNIRSDYGKEFKNTCIESFLDEEGIKHEFSSPYSPQQNLKELMGLQYPRNKMRGEYNPFNCTSSRKYWRDNWFYLHDADTSPCLVVPEEQPPHSWCWTAKPVLTPTLKGFIDKIHNLREHGLTGYEVVCDFTCSWIRPLQACAHPTFEYTRAEDTTRIMRFGLSRTAVAKCVVQVVVDPPSAVDNIPTTVCDLLQTEKDAVVNINYVQHEVGRDQEGTAVEEAKSWPHSSGPGQSTRAREDAVSSANDLVVAFEAQLKKEHADNARLSEVVAGNDAQR

SEQ ID NO: 20524 - protein, 491 aa, Oryza sativa
  Clone ID: TF_OSC900013j.C1.p20.fg
MVMSSADSHVPTSRLLPAEVETKSLEPHPGPPAEPAKGGLRGLPVRSPKLRQKVFARSPEKDEKQCPGSNQAPCQSTDKKDGTLQPNSGANRTVIWKMDNGRTMIITGSEFTPEDAARIPKRQRGRNTFRGARQLTRHLIKYGPPRPEDDESGERFSADDDDDNDDDNDDNDDATLDSFRERELKFKACARCGIVGHTASLCLPTCRCGEYTHYSNACPLRKVTCFLCEGTDHVPKDCQLNAVIAKTKKEQGTTVQPIRQPMTIDNSGHNPSALPPTPAPVEANHGRSNVTKDVHKSLLVPVSAAKVHNQKPAPRDQASRFCRNCHKPGHRFSDCPLPRAAKAVRRDSQVTSTAHDTNRHLNVQPPPQRIIVKGTVKGRIVPPAIVSSLQHQRQQGKQCQENNSSLQLQRGGTLPRQHPRQVLSATGRPTVVSSSNAPRIAPIWRPIDKSPLGNPTGKKILPVTADKTVAPPPSKINKQSNVPGETSGSRN

SEQ ID NO: 20525 - protein, 534 aa, Oryza sativa
  unsure (1)..(534): unsure at all Xaa locations
  Clone ID: TF_OSC416144j.C1.p2.np
GILTNSEFQMNIKFCFINSISKSISELQIKRNQLFVLMHASKYSFRVSNKKRIISCCQIGIYEEEIREVEAEEGVVSSSRSKRVRPKRPKKVMTPMEAVERRKLKREEQEERRKVKKEKRRIRRLMETEAAGEKLKREEQEERRKVKKEKRRIRRLMETEAAGEVGEAAAEEEEEEHEAETEGEEEAAAEEQKVYVGGIPYYSSEDDIRSFFEACGSITSVDCMTFPESGKFRGIAILTFKTDAAAQRALALDGADMGGFFLKIQPYKSVREKEDFAPKMIEGYNRVYVGNLAWDITEDDLKKFFSDCKISSIRFGTDKETGDFKGYVHVDFSEGTSVAVAMKLDQKVIKGRPVRIRCAVPKKDNQKLNGNANPDSSNNKIRICYECGTPANKKASEAISDEKKANVDSVTASSKKRRTCYECGIPGHLSSACPNKKAGDAVSSDKGQSAPSITPEDNKIGEESNSAPSKKRRKCYESTSTSDGNKASDDTNPVPAKKKKRRTCYECGIAGHLASECPNKTTXSNGCVTVLDFY

SEQ ID NO: 20526 - protein, 1728 aa, Oryza sativa
  unsure (1)..(1728): unsure at all Xaa locations
  Clone ID: TF_OSC400057j.C1.p11.np
IPTFRESPILQEKNLRNSKASKATPGLEWLIPGLEIELYSRGGCSVWLGLCKRMPRYKPEYLFGTEGFVQELRTMSFLIGFGIAPLYAQIPHDRDEEKCRVKVALNSNREDIPSVMFEAGGGSYIHACQEVARIAIGELRKSYNDRLADTEYRYHPRQPXGSDRGSYLEPAGIENDATTRHLVEMLWADETRAEIVIAAQDREDRNCDKICKLEDKVDRLEKELAALKGEAPPQKARVRLTARKRALFVPRYQLAPKMVLTRSNGNGPNPNNNNNAENPMLAQVLAHQAQLMNLMMQQLQNQQNQGNNHAPPQNKLAEFLRVRPPVLSSTTNPVEAGDWLHAIEKKLDLLQCTDQEKVSFASHQLHGPASEWWDHFRLNRTTAEPISWLEFTAAFRKTHIPSGVVSLKKKKFRSLTQGSRTVTEYLHEFNRLARYAPEDVRTDEERQEKFLEGLNDELSYPLMAGDYHDFQKLVDKAIRQEDKYNRMEQKKRRIAHFKAQQGNSXRLRLALGPQSMPQGGSSSVARPQRQFFNNNTGNNNRNQAPRPVAAPSQQQPAKREQGSKPSVCFNCGDPGHYADKCPKPRRAKVVPAQNNSSAPAAKARVNHVAAAEAQGAPDVILGMFPVNSVPATVLFDSGATHSFLSMSFAGNHGMEVEELRRPLMVTTPSNQALSSQRSPSVRIEIQGVPFLANLILLESKDLDVILGMDXLARYKGVIDCASRKVTLTSNDGQVVTVHALPFGPLRSSLNQITLEEIPIVREYLDVFPDDLPGMPPKRDIEFRIDLVPGTTPIHKRPYRMAANELAEVKRQVDDLLXKGYNRPSSSPWGVPVIFVEKKDHTQRMCVDYHALNDVTIKNKYPLPRIDDLFDQLKGATVFSKIDLRSGYHQLRIKEEDIPKTAFTTRYGLFECIMSFGLTNAPAFFMNLMNKVFMXYLDKFVVVFIDDILIYSRTKEEHEEHLRLALEKLREHQLYAKFSKCEFWLSEVKFLGHAISAGGVAVDPSNVESVTNWKQPKIVSEIRSFLGLAXYYRRFIENFSKIAKPMTRLLQKDVKYKWSEECEQSFQELKSRLISAPILILPDPKKGFQVYCDASKLGLGCVLMQDGKVVAYASRQLRPHEKNYPTHDLELAAVVHALKIWHHYLFGTRTEVYTDHKSLKYIFTQPDLNMRQRRWLELIKDYDLGIHYHPGKANVVADALSKKGYCNAMEGQQLPLELCKEFERLNLEIISRGFVAALEAKPTLIDQVREAQINDHDIHEIKKNMRRGKAIGFLEDEQGTVWLGERICVPDNKDLKDAILKEAHDTLYSIHPGSTKMYQDLKERFWWASMKREIAEYVAVCDVCHRVKAEHQKPAGLLXPLKIPEWKWEEIGMDFITGLPRTSSGHDSIWVIVDRLTKVAHFIPVRITYSGSHLAELYMARIVCLHGVPKKIVSDRGSQFTSKFWKKLQEEMGSKLNFSTAYHPQIDGQTERVNXILEDMLRACALDFGGSWDKNLPYAEFSYNNSYQASLQMAPYEALYGRKCCTPLLWDQTVERQVFGTDILREAEEKVKIIQERLRVAQSRHKSYADNRRRDLSFEEGDYVYLRVTPLRGVHRFHTKGKLAPRFVGPYKIVSRRGEVAYQLELPQSLAGVHNVFHVSQLKKCLRVPTEEANLEQIEVQEDLTYVEKPIRILETDERRTRNRVIRFCKVQWSNHSDEESTWEREDELKSAHSHLFASSSESRGRDSV

SEQ ID NO: 20527 - protein, 2515 aa, Oryza sativa
  Clone ID: TF_OSC401341j.C1.p12.fg
MAGPEDKDEEGASHSPRTKGIIQYFTRQVKQHTEGLDTDLQVTNEKIGQLESTQISTNTKLTGLETAVARIDTSLAALVRHFDALNAGGNGGGNDDDIDGEYVEDNLEDEYIADTEQDDRDAQDRRRLHNNRRGMGGRRRREVRNNDDAFSKIKFKIPPFDGKYDHDAYLSWEIAVDQKFACHEFPENTRVRAATSEFTDFASVWWIEHGKKNPNNMPQTWDALKRVMRARFVPSYYARDLLNRLQQLRQGAKSVEEYYQELQICLLRCKLEETEDAAMARFLGGLNREIYDIVDYKDYTNMTRLFHLACKAEREVQGRRASAKANFSAGKTSSWQTRTTPPAGRTASPSSTPTTSRAAPPTSSDKSATKAAQPAPSASSMASTGRMRDVQCHRCKGFWHVQRDCPSNDFDDDTLALLAADLADNEPPEEHIRAAFADHYESLIVQRVLSAQMEKAEQNQRHTLFQTKCVVKERCCRMIIDGGSCNNLASSEMVEKLALSTKPHPHPYYIQWLNNSGKAKVTKLVHINFAIGNYHDVVECDVVPMQVCNILLGRPWQFDRDSMHHGRSNQYSFLYHDKKIVLHPMSPEDILRDDVAKAAKSKCESDKKAQSDGKKPETINLKPKCLLATKSDINELIASPSVAYALEYSDVFPKEVPPGLPPVRGIEHQIDLIPGASLPNRAPYRTNPEETKEIQRQVHELLDKGAINNITIRYRHPIPRLDDMLDELSGSIVFSKADLRSGYHQIRMKLGDEWKTAFKTKFGLYEWLVMPFGLTNAPSTFMRLMNEVLRPFIGKFVVVYFDDILIYSKSMGEHFNHLRAVFNALRDARLFGNLEKCTFCTDRVSFLGYVVTPQGIEVDQAKVEAIQSWPTPKTVSQVRSFLGLAGFYRRFVQDFSTIAAPLNALTKKGVPFTWGTSQENAFHMLKDKLTHAPLLQLPDFNKTFELECDASGIGLGGVLLQEGKPVAYFSEKLSGLVLNYSTYDKELYALVRTLETWQHYLWPKEFVIHSDHESLKHIRSQGKLNRRHAKWVEFIESFPYVIKHKKGKENIIADALSRRYTLLTQLDYKIFGLETIKDHMRMMLILMMCCCIEAHGGGLMGHFGAKKTHDILASHFFWPQMRRDVGRAVLKKNIKMWEECLPHIEFAYNRSLHSTTKMCPFQIVYGLLPRAPIDLMPLPSSEKLNFDAKQRAELMLKLHETTKENIERMNAKYKFAGDKGRRELNFEPGDLVWLHLRKERFADLRKSKLMPRADGPFKVLAKINENAYKIDLPADFGVSPTFNVADLKPYLGEEDELESRTTQMQEGEDDEDINTIDTSTSPHIQHDGPITRARARQLNYQDECPRGRVDAHHKFAATIGDGGSSSQQQQQQQPRSAPRPQFVVRVPQPQQQQSQQGTRAPRPPMPAMQPGQGRRDVQGPQCLCFNCFEPGHFADKCPKPRRQQGQAPPRSNNGGKDVIRGRVNHVTAEDVLTTPDVIIGTFLIHSIPATILFDSGASHSFISVPFVGRNQLGVERLRNPLLITTPGGVMTAKNYSPAVPIEIQGIPFPSDLILLDTKNLDVILGMNWLAQFQGVVDCARRTVTLYRGPEQPVVFFAPPTSVSSSELHQIGQSEIPIVREFGDVFPEELPGMPPKREIEFRIDLAPGTTPLYKRPYHMAANELAEVKKQLEELKEKGYIRPSTSPWGAPVIFVEKKDKTKRMCVDYRALNEVTIKNKYPLPRIDDLFDQLKGATVFSKIDLRSGYHQLRIREKDIPKTAFTTRYGLYEFTMMSFEEDHQHHLRLVLGKLREHQLYAKLSKCEFWLSEVKFLGHVISAKGVAVDPETVTAVTDWKQPKTVTQIRSFLGLAGYYRRFIENFSKIARPMTQLLKKEEKFVWSPQCEKAFQTLKEKLVSSPVLILPDTRKDFMVYCDASRQGLGCVLMQDGHVVAYASRQLWPHEGNYPTHDLELAAVVHALKIWRHYLIGNRCEIYTDHKSLKYIFTQSDLNLRQRRWLELIKDYDVGIHYHPGKANVVADALSQKSHCNTLNVRGIPPELNQQMEALNLSIVGRGFLAALEAKPTLLDQIREAQKNDPDMHGLLKNMKQGKAAGFTEDEHGTLWNGNRVCVPDNRELKQLILQETHESPYSIHPGSTKMYLDLKEKYWWVSMKREIAEFVALCDVCQRVKAEHQRLAGLLQPLQVPEWKWDEIGMDFITGLPKTQGGYDSIWVVVDRLTKVARFIPVKTTYGGNKLAELYFARIVSLHGVPKKIVSDRGSQFTSHFWKKLQEELDFGKTWDKSLPYAEFSYNNSYQASIQMAPYEALYGRKCRTPLLWDQVGESQVFGTDILREAEAKVRTIRDNLKVAQSRQKSYADNRRRNLEFAVDDFVYLRVTPLRGVHRFQTKGKLAPRFVGPFSIITRRGEVAYQLELSASLGNVHDVFHVSQLKKCLRVPSEQTDSEQIEVREDLTYVERPVKILDTMERRTRNRVIRFCKVQWSNHAEEEATWEREDELKAAHPDLFASFSESRGRDSV

SEQ ID NO: 20528 - protein, 247 aa, Oryza sativa
  Clone ID: TF_OSC402051j.C1.p15.fg
MMSSPTPAPLLPVAPLDGGGGYLRWKESVLLRLRTLDLAYVLSEHQPEDGRSDSAKKKRARDDELCRGHILATLSDRLLPDYAHHATAAAAWRALARTYDMDGKLPNLPLDRFFAYRFVDGEPVLEQLAHLEAMGVAGKLDDRTMYGLVHQKLPPALVKAIALASPPYPDPPSMDHIWDTARLEERMRLCGEIRRGEHTQDKEDDDDQGGGDYPDEDHRSPKRKRRYDRGPCYNCGEPGHIARDCRG

SEQ ID NO: 20529 - protein, 649 aa, Oryza sativa
  unsure (1)..(649): unsure at all Xaa locations
  Clone ID: TF_OSC900147j.C1.p14.np
MDEVGGRWTFSRANEGYTSCGPVVEMSWQRVGALLLGGSVLPACPGCPGRRRIGSVLLFMARMGWELCHVFRPYTVVVFCSTTKMWNGWPGLAWDELGPRSGCQFGLNHRRPWVKAVLDGQLCEEEDVVSCLPKLRKTAGSASEAKEAVKPAVKQDKRLRSVKVLSLVSNLSLPFVFPLSLSKPLQQMAVNEKGNKVRSQDIGTLSSRVNEAPDTSCVTLVQHLINQNRLLIEILQQHQTPILNLSQIQPQVQLEAVQALTPQVSMPPASRRTQGDVPHVDPKEASNICFMCDEQGHYARERPQQKRKTPMRTEDEVRKMIITSTEWPPPGMTRRQRRNTFRGAPQLTEHLLANGGRVSDSEDSDQVSSDDEDEECKACSRCGEIGHVASSCATICVHCEEDHPPDRCPTSRITCFFCEGIDHVPKDCQFSFLLTKKMANQPASSNGEKHQGNTNPRQDYSFSLTPVPGQRNQNERRKCRVREDICCFNCQGMGHFADKCPKPRNIAASTSVHAAPCNQKLAPQRIVIHASQSSPMARVATAPTPASALPQGVNAHFQPQQRIVVDGRSCVSPRPTPGQAKGNRPPEGDTKQKTVIRLNQQSEGNFSCEXQYAVLSHHHRTNQGCSHXNRDLGSHFRGIMFQPRVNNQP

SEQ ID NO: 20530 - protein, 423 aa, Oryza sativa
  Clone ID: TF_OSC900329j.C1.p15.fg
MAVNEKGNKVRSQDIGTLSSRVNEAPDTSCVTLVQHLINQNRLLIEILQQHQTPILNLSQIQPQVQLEAVQALTPQVSMPPASRRTQGDVPHVDPKEASNICFMCDEQGHYARERPQQKRKTPMRTEDEVRKMIITSTEWPPPGMTRRQRRNTFRGAPQLTEHLLANGGRVSDSEDSDQVSSDDEDEMECKACSRCGEIGHVASSCATICVHCEEDHPPDRCPTSRITCFFCEGIDHVPKDCQFSFLLTKKMANQPASSNGEKHQGNTNPRQDYSFSLTPVPGQRNQNERRKCRVREDICCFNCQGMGHFADKCPKPRNIAASTSVHAAPCNQKLAPQRIVIHASQSSPMARVATAPTPASALPQGVNAHFQPQQRIVVDGRSCVSPRPTPGQAKGNRPPEGDTKQKTVIRLNQQSEGNFSCE

SEQ ID NO: 20531 - protein, 601 aa, Oryza sativa
  Clone ID: TF_OSC1509j.C1.p2.fg
MSWQRVGALLLGAQSCLPVPEVPAVGGIGSVLLSMARMGWKLCHVVRLYTVVNKPNIHHNSKRLRSVKVLSLVPNLSLPFVFPLSLSKPLQQMADNEKGNKVRSQDIGTSSSRVNEAPDTSCVTLVQHLINQNRLLIEILQQHQTPILNLSQIQPQVQLEAVQALTPQVSMPPASRRTHGDVPHVDSKEASIICFMCDEQGHYARECPQQKRKTPMRTEDEVRKMIITSTEWPPPGMTKRQRRNTFRGAPQLTEHLLANGGRVSDSEDSDQVSSDDEDEKSPQGFNQNKMERKACSRCGEIGHVASSCATTCVHCEEDHPPDRCPTSRITCFFCEGTDHVPKDCQSSFLLTKKMANQPASSNGEKHQGNTNPRQDYSFSLTPVPGQRNQNEKRKCRVREDICCFNCQGMGHFTDKCPKPRDIAASTSVHATPCNQKLAPQRIVIHASRSSPIARVATAPTPASALPQGVNAQFQPQPPVDKTEASIGIVPLDVPAQPPRNQVQDEEPEPLTILCTDGLSKELSSMEEVVSLPDLLQAERRAINLRRVIPSRRPLFASTSNQKEASPVNDSNMQSHHIITEPIKDDAVTRTMPAIPLQNQNE

SEQ ID NO: 20532 - protein, 160 aa, Oryza sativa
  unsure (1)..(160): unsure at all Xaa locations
  Clone ID: TF_OSC102138j.C1.p17.gp
GGGGGGGGGFGSRGGGGSGGGGRSYGGSWGGGRRSGGGGPGGGCFKCGESGHMARDCFNGGGVGVGGGGGGGGGAGGGCFKCGEMGHMARDCFNSGGGGGGGGGGGGGGACYNCGETGHLARDCYNGGGGGGGGRFGGGGDRSCYNCGEAGHIARDCHKX

SEQ ID NO: 20533 - protein, 373 aa, Oryza sativa
  unsure (1)..(373): unsure at all Xaa locations
  Clone ID: TF_OSC19735j.C1.p3.np
KACSRCEEIGHVASSCASTCVHCEEDHPPDRCPTSRITCFFCEGTDHVPKDCRFSFLLTKKMANQPVSSNGEKHQGNTNPRQDYSFSLTPVPGQRKQNEKRKCRVREDICCFNCQGMGHFADKCPKPRNVAASTSVHANPRNQKLAPQRIVIHASRSSPIARVATAPIPMSALPQGVNAQFQPQPPADKTEASICVVPLEVPIQQLRNQVQDEEPEKKGITPKTVPNQGKKGITPKTVPNQGKIDLHITANLHEADIPIVLWSLEQTPYQRVKSSTRYQMLHGVKNASTGYQVDSKDMNYAKFWNXSPIFMPQPSRSQLKVQPWFESGEKKIPPATGDRAKQSRVEKLCYKFVIKAERKKSDKKRRPPNLSSC

SEQ ID NO: 20534 - protein, 883 aa, Oryza sativa
  Clone ID: TF_OSC401219j.C1.p8.fg
MDISRTNEGYTSCGPVVEMSWHRAGVLLLGAQSCLPVPEVPAVGGVGSVLLSMARMGWKLCHVFRPYAVVNKPNIHHNSKRLRSVKVLSLVSNLSLPFVFPLSLSKPLQQMADNEKGNKVRSQDIGTSSSRVNEAPDTSCVTLVQHLINQNRLLIEILQQHQTPILNLSQIQPQVQLEAVQALTPQVSMPPASRRTHGDVPHVDSKEASIICFMCDEQGHYARECPQQKRKTPMRTEDEVRKMIITSIEWPPPGMTKRQRRNTFRGAPQLTEHLLANGGRVSDSEDSDQVSSDDEDEKSPQGFNQNKMERKACSRCGEIGHVASSCATTCVHCEEDHPPDRCPTSRITCFFCEGTDHVPKDCQFSFLLTKKMANQPASSNGEKHQGNTNPRQDYSFSLTPVPGQRNQNEKRKCRVRKDICCFNCQGMGHFADKCPKPRNIAASTSVHATPCNQKLAPQRIVIHASRSSPIAPVATAPTPASALPQGVNAQLQPQPPVDNTEASIGIVPLDVPAQQPRNQNWNNPAGATNVQVPTVQQQCKLSEFLKTETPTFAIAVDPMEASDWLRTVEKKLGLVQCTDQERVVFATHQLISHVPAGMITLRKREFRYLNQEDLTVTEYLHEFHRLAHYAPEDVENDEDKQEKFLQALKDEIAVQLLLEEYEDFEKLVDKAIQLESEHNRMKNCKRRIVSIPVSSCGNQRQRTEPLQIIGSSVAHQEFPPQEDGHNADNNISNTNDDDTTNNHAPCPISDHSNQACNVNIIHQGVDDSIDDGTQNDNPSNCDSEKDSNGDSNYGTTDANVSKDFQPPIPTPSQNDRPQTDSSAKKTLICYNCKEPRHYSRDCLQPRQSRPPHYRQVTQSRHPNRIVVTGANTVPVRPRVNQNP

SEQ ID NO: 20535 - protein, 645 aa, Oryza sativa
  unsure (1)..(645): unsure at all Xaa locations
  Clone ID: TF_OSC22429j.C1.p2.np
MLDLGGKDGEIGNEDGASSKGTPSPKGATIPFDYRKLTIPSHNFVSVPSGRAPQFDGTHYAAWKHKMKLHLISLHPSIWKVVCTGIDVPHEDMELTSEKEQLIHRNAQASNAILSALSPEEFDKVDGLEEAKEIXDTLQLAHEGSPAVREAKIELLEGRLGRFVMDDNETPQEMYDRMMILVNKIKGLGSEDMTNHFVVKRLLRAFGPRNPTLVSMIHERKDFKRLTPSDILGRIVSHKMQEEEAREVRQMVKNAAMIKNQEVALKAKQEEMAFIVKRFKHFLRKSGYGKGRKLKAKQEEMAFIVKRFKHFLRKSGYGKGRKVDDKGKRQSKRACFNCGEFGHFIADCPKSNEAKAKGGKKKLERAHVAEAHMAEVWYSGDEEDPEVKPKPKSKDKVEGEGGVATVTFKSSSSSKERLFNNLSDDDDDSYHYSCFMAQGRKVMTQKPSHTSLDVESSDEESDNELDDVLKSFSKPAMQHLAKLMRALDSTEQLLVRQEELLILEKKRNLALEESLAKESAKNKQLANELNFANGSLASLRDVNETLQEKFACLDKSHKVQIDTLWNSTSQPNVVSNSSNPSTSNGCARCYNIDLNSYATNIVEMQALKKENERLGTLVKYGCMKTYHSKDALYKTITAHPNKDGH

SEQ ID NO: 20536 - protein, 1713 aa, Oryza sativa
  Clone ID: TF_OSC401835j.C1.p29.fg
MSDLGGKDGEIGNEDGASNKGTPSPKGATIPFDYNKLTIPSHNFVSVPSGRAPQFDGTYYAAWKHKMKLHLISLHPSIWKIVCTGIDVPHEDMELTSEQEQLIHRNAQASNAILSALSPEEFNKVDGLEEAKEIWDTLQLAHEGSPAICDAKIELLEGRLGRFVMDDKETPQEMYDRMMILVNKIKGLGSEDMTNHFVVKRLLRTFGPRNPTLVSMIRERKDFKRLTPSDILGRIVSHEMQEEEAREVRQMVKNAAMIKNQEVALKAKQEEESSGEESQDEEMAFIVKRFKHFLRKSGYGKGRKDDDKGKRQSKRACFNCGEFGHFIADCPKSNEAKAKGGKKKTERAHVAEAHMAEVWYSRDEEDPEVKLKPKSKDKVEGEGGVATIAFKSSSSSKERLFNNLSDDDDDSYHYSCFMAQGRKVMTQKPSHTSLDVDSSDEESDNELDDVLKSFSKPAMQHLAKLMRALDSKEQLLERQEELLIHEKKRNLALEESLAKECAKNEQLANELNLANGSLASLRDVNETLQEKFACLDKSHKDLEVQFDTLWNSTSQPNVVSNSSNPSTSNGCAKCYNIDLNSYATNIDAMQALKKENERLGTLVKYGCMKTYHSKDALYKTITAHPNKDGHGHGFSGGSPVSKRVMVNGKECLMFVREGKAPQASEITNLVSSQGPGTSGQTGQNLWVGVSISQKFPPGSSGRFARKFRANGRAQDMTGSSRHNARRFRPDGLYYDSYAYSSGGSSWVVDSGCTNHMTGERSMFTSLNDENGTRENIVFGDDGKGKLGYNCLFTDEDVTVFRRDDSSVAFKGKIKGDLYLVDFDVDRVNPEACLIAKSSMSWLWHRRLAHVGMRNLATLLKGEQSSGSLMSHLRKIRVRSDNGGEFKNTQVKEFLDEVGIKHEFSAPYDPPQNGIVERKNQTLIEAARSMLDEYKTSDIFWVEAVSTTCHAINRLYLHKILKKTSYELLSGKKPNVSYFRVFGSKCFILSKRPRSSKFSPKVDEGFLLGYESNAHAYRVFNKTSGIVEVTRDVTFDESNGSQGEQVVVHVVGDVDSSQAIGTKAIGDIRPVKTQDDQEDRDQPSSSTSNSPTLSQVSVDPEVPGPDGRNLRTSPSQEVPGPSARKFRAEDSQGVPTAQVDGIDAEGTVEHPDQAQVPSVHHPRIHHTVQRDHPVDNILGDIRKEVTTRSRVANFCQHYLFVSSLEPTRVEDALGDLDWVMAMQVELNNFTRNQVWTLVERPDQNVIGTKWIFRNKPDEHGVVVRNKARLVAQGFTQIEGLDFGETFTPVAHLESIRILLAYAAHHDFRLFQMDVKSAFLNGPISELVYVEQPPGFEDPRLPNHVYKLHKALYGLKQAPRAWYECLRDFLLKNGFEIGKADTTLFTKKSKSDLFICQIYVDDIIFGSTNASFCEEFSSIMTKRFEMSMMGELTFFLGLQVKQVQEGTFISQTKYVKDILKKFGMEDAIPIKTPMPTNGHLDLDDNGKCVDQKVYRSMIGSLLYLCTSRPDIMLSVCMCARFQAEPKECYLIAVKRILRYLVHTPNLGLWYPKGCDFELLGYSDSDYAGCKVDRKSTTGTCQFLGRSLVSWSSKKQNSIALSTAEVEYVATGSCCVQLLWMKQTLKDFGYNFTKIPLLCDNESAIKIANNPVQHSRTKHIDIRHHFLRDHETKGDICLTHVRTESILADIFTKPLDEKRFCELRSELNILDSRNIR

SEQ ID NO: 20537 - protein, 2049 aa, Oryza sativa
  Clone ID: TF_OSC900009j.C1.p24.fg
MLDLGGKDGEIGNEDGASSKGTPSPKGATIPFDYRKLTIPSHNFVSVPSGRAPQFDGTHYAAWKHKMKLHLISLHPSIWKVVCTGIDVPHEDMELTSEKEQLIHRNAQASNAILSALSPEEFDKGSPAVREAKIELLEGRLGRFVMDDNETPQEMYDRMMILVNKIKGLGSEDMTNHFVVKRLLRAFGPRNPTLVSMIQERKDFKRLTPSDILGRIVSHKMQEEEAREVRQMVKNAAMIKNQEVALKAKQEEESSGEESEDEEMAFIVKRFKHFLRKSGYGKGRKVDDKGKRQSKRACFNCGEFGHFIADCPKSNEAKAKGGKKKLERAHVAEAHMAEVWYSGDEEDPEVKPKPKSKDKVEGEGGVATVTFKSSSSSKERLFNNLSDDDDDSYHYSCFMAQGRKVMTQKPSHTSLDVESSDEESDNELDDVLKSFSKPAMQHLAKLMRALDSTEQLLVRQEELLILEKKRNLALEESLAKESAKNKQLANELNFANGSLASLRDVNETLQEKFACLDKSHKVQIDTLWNSTSQPNVVSNSSNPSTSNGCARCYNIDLNSYATNIVAMQALKKENERLGTLVKYGCMKTYHSKDALYKTITAHPNKDGHGLGFSGGSPVSKRVMVNGKECLMFVREGKAPQASEVTNLVSSQGPGTSGQTGQNLRVGVSVSQKFPPGSSGQFARKFRANGRAQDITGSSEHNARRFWPDGLYYDSYVIFKNSEGKVVAYFNGNYNDEYRTCVWVPKALAYSSGGSSWVVDSGCTNHMTGERSMFTSLDEENGTRENIVFGDDGKGKLGYNCLFTDEDVTVFRRDDSSVAFKGKLKGDLYLVDFDVDRVNPEACLIAKSSMGWLWHRRLAHVGMRNLATLLKGEHILRLTNVTFEKDRVCSACQAGKQVGNPHPIKNIMTTTRPLELLHMDLFGPMVYISIGGNKYDFFIVDDFSRFTWVYFLHDKSEAQDVFKRFAKQAQNLYDLTIKRVRSDNGGEFKNTQVEEFLDEVGIKHEFSAPYDPPQNGIVERKNRTLIEAARSMLDEYKTSDIFWAEAVSTACHAINRLYLHKILKKTSYELLSGKKPNVSYFRVFGSKCFILSKRPRSSKFSPKVDEGFLLGYESNAHAYRVFNKTSGIVEVTRDVTFDESNGFQGEQVVVHVVSDVDPSQAIGTKAIGDIRPVETQDDQEDRDQPSSSTSNSPKLSQVSVDPEVPGPDGRNLRTSPGQEVPGPSARKFRAEDSQGVPMAQVDGIDAEGTVEHPDQAQVPSVHHPRIHHTVQRDHPVDNILGDIRKGVTTRSRVASFCQHYSFVSSLESTRVEDALGDPDWVMAMLFQMDVKSAFLNGPISELVFVEQPPGFEDPKLPNHVYKLHKALYGLKQAPRAWYECLRDFLLKNGFEIGKADTTLFTKKFKSDLFICQIYVDDIIFGSTNASFCEEFSSIMTKRFEMSMMGELTFFLGLQVKQAQEGTFISQTKYVKDILKKFGMEDAKPIKTPMPTNGHLDLDDNGKCVDQKDVSGDESPPIRFPRGRLGKEKVVEGGSGSGTRTSPRFRRQTSNRPVQIRDVDSGQGSDAPSSRGRGRGGGRSSGAGRASHDFPVGSRENLVRLYKTIGFDTTPMHHIGRPKSNYLHQLAKCRRGRLIDPETQPEESQDPRFRTLTQLDWYNSVIMARDNLVVEMKWIDWTYMRKKNNEVFNQAMQVCHNKNLGDILALEYDWNEEVIAQFYATAFFGSTRKGTPYVKWMTEGVRHKISIAQFAEILGLEDEDLNRPNIHSEAPLPLIKTKFMYTKNAPRTCMGPTHGLHPNYKVLYSIFRWSLLPKVGDATALPSKHAHLLSRMRYNQPPFSVKLIWYEIANTILEPKRGCIYAPFIMKMIESVTGVFYIKDGRHNPFRPRVPPSSSSVAPRSIPSTSAGPSSSAPPPSSSSSPIKKALQAIFCMCAKTAKKVKKIERRQKEDRREAGKEVSDDSEDEVYVDPFEAYEAARNVAGEGPSTYFNEESSQSDDDDDDDDDEDDIDAAAEYVPTDVEEAVDTAAQSDESHLSGDTEIVPSDGDGDE

SEQ ID NO: 20538 - protein, 2336 aa, Oryza sativa
  Clone ID: TF_OSC900298j.C1.p14.fg
MSDLGGKDGEIRNEDGASSKGTPSPKGATIPFDYSKLTIPSHNFVSMPSGRAPQFDGTHYAAWKHKMKLHLISLHPSIWKVVCTGIDVPHEDMELTSEQEQLIHCNAQASNAILSALSPEEFNKVDGLEEAKEIWDTLQLAHEGSPAVREAKIELLEGRLGRFVMDDKETPQEMYDRMMILVNKIKGLGRRFVMDDKETPQEMYDRMMILVNKIKGLGSEDMTNHFVVKRLLRAFGPRNPTLVSMIRERKDFKRLTPSDILGRIVSHEMQEEEAREVRQMVKNAAMIKNQEVALKAKQEEESSGEESEDEEMAFIVKRFKHFLRKSGYGKGRKDDDKGKRQSKRACFNCGEFGHFIADCPKSNEAKAKGGKKKPERAHVAEAHMAEVWYSGDEEDPEVKPKPKSKDKVEGEGGVATVAFKSSSSSKEHLFNNLSDDDDDDSYHYSCFMAQGRKVMTQKPSHTSLDVESSDEESDNELDDVLKSFSKPAMQHLAKLMRALDSKEQLLERQEELLILEKKRNLALEESLAKECAKNEQLANELNFANGSLASLRDANETLQEKFACLDKSHKDLEVQFDTLWNSTSQPNVVSNSSNPSTSNGCARCYNIDLNSYATNIDAMQALKKENERLDTLVKYGCMKTYHSKDALYKTITAHPNKDGHGLRFSGGSPVSKRVMVNGKECLMFVREGKAPQASEVTNLVSSQGLGTSGQTGQNLWVGVSVSQKFPPGSSGQFAGKFRANGRAQDMTGSSRHNARRFRPDGLYYDSYVISKNSEGKVVVYFNGNYNDEYRTCVWVPKALTYSSGGLSWVVDSGCTNHMTGERSMFTSLDEENGTRENIVFGDDGKGKVMGLGKIAISNNQSLSNVLLVNSLSYNLLSVSQLCKLGYNCLFTDEDVTVFRRDDSSVAFKGKLKGDLYLVDFNVDRVNPEACLIAKSSMGWLWHRRLAHVGMRNLATLLKGEHILGLTNVTFEKDRVCSACQAGKQVGNPHPIKNIMTTTRPLELLHMDLFGPVAYISIGGNKYGFVIVDDFSRFTWVYFLHNKSEAQDVFKRFAKQAQNLYDLTIKRVRSDNGGEFRNTQVEEFLDEVGIKHEFSTPYDPPQNGIVERKNRTLIEAARSMLDEYKTSDIFWAEAVSTACHAINRLYLHKILKKTSYELLSGKKPNVSYFRVFGSKCFILSKRPRSSKFSPKVDEGFLLGYESNAHAYRVFNKTSGSVEVTRDVTFDESNGSQGEQVVVHVVGDMDPSQAIGTKAIGDIRPVETQDDQEDRDQPSSSTSNSPTLSQVSVDPKVPGPDGRNLQTSPGQEVPGPSAKKFRAEDSQGVPTAQVDGIDAEGTVEHPDQAQVPSVHHPRIHHCPKRSSRRQHTWVEDALGDPDWVMAMQEELNNFTRNQVWMLVERPNQNVIGTKWIFRNKQDEHGVVLRNKARLRKGSPKLFQMDVKSAFLNGPISELVFVEQPPGIEDPKLPNHVYKLHKALYGLKQAPRAWYECLRDFLLKNGFEIGKADTTLFTKKFKSDLFICQIYVDDIIFGSTNASFCEEFSSIMTKRFEMSMMGELTFFLGLQVKQAQEGTFISQTKYVKDILKKFGMEDAKPIKTPMPTNGHLDLDDNGKCVDQKVYRFMIGSLLYLCASRPDIMLSVCMCARFQAEPKECHLIAVKRILRYLVHTPNLGLWYPKGCDFELLGYSDSDYAGCKVDRKSTTGTCQFLGRSLVSWSSKKQNSIALSTAEAEYVAAGSCCAQLLWMKQTLKDFGYNFTKIPLLCDNESAIKIANNPVQHSRTKHIDIRHHFLRDHETKGDICLTHVRTKTQLADIFTKPLDEKRFCELRISTMTREKRQKASQDVSGDESPPIRFPRGRLGKEKVVEGGSGSGTRTSPRFTRQSSNRPVQIRDVDSGQGSDAPSSRGRGRGGGRTSGAGRASHDFPVGFRENPVRLYKTIGFDTTPIHHIGRPKSNYLHQLAKCRRDRLIDPETQPEESQDPRFRTLTQLDWYNSMIMARDNPVVEMKWIDWTYMRKKNNEVFNQAMQVCHNKNLGDILALEYDWTEEVIAQFYATAFFGTTRKGTPYVKWMTAGVRHKISIAQFAEILGLEDEDLNRPNIHSEAPLPMIKTKFMYTKDAPRTCMGTTHGLHPNYKVGDATALPSKHAHLLSRMRYNQPLFSVMKLIWYEIANTILEPKRGCIYAPFIMKMIETVTGVFYIKDGRHNPFRPCVPPSSSPVAPRSIPSTSAGPSSSAPPQSSSSSPIKKALQAIFCMCAKTAKNAYEAARNVAGEGSSTYFNEESSQLDDDDDDDEDDTDAAAEDAPTDVDTAAQSDESHLSGDTEIVPSDGDGDGDE

SEQ ID NO: 20539 - protein, 1092 aa, Oryza sativa
  Clone ID: TF_OSC34887j.C1.p12.fg
MMQQMQQQHQQMYQRMRQQAEQQQQQFGPSPPQSKLPEFLRVRPPTFSSTTNPMEANDWLHAIEKKLNLLQCNDQEKAAFTTHQLQGPASAWWDNHMATRPPGTEVTWVEFCRSFRKAQVPDGVVAQKKREFRALHQGNRTVTEYLHEFNRLARYAPEDVRTDAEKQEKFLAGLDDELTNQLISGDYADFERLVDKAIRQEDQRNKMDRKRKAAQFRNFHQGASGSQNHHGGQPNRSAAPRPPMAPAQSASSTQAKKETGTKPGSCFNCGELGHFANKCPKPRRAGPRFVQARVNHASAEEAQVAPEVVLGTFPVNSIPATVLFDSGATHSFISKKFVGMHGLIREELSTPMRVHTPGNSSTLVQFSPSVTIEIQRSLFLANLILLESKDLDVILGMDWLTRFKGVIDCANRTVTLTNEKGETVVYKSLVSPKQGVSLNQIKVENPVTTEEKGTAPIYKRPYRMAANELAEVKKQVDEQLQKGYIRPSTSPWGAPVIFVEKKDKTKRMCVDYRALNEVTIKNKYPLPRIDDFFDKLKGAKLRIREEDIPKTAFTTRYGLYECTVMSFRLTNAPAFFMNLMNKVFMEFLNKFVVVFIDDILIYSKSEEEHKQHLRLVLEKLKEHQLYAKFSKCDFLLSEVKFLGHVITAQGVAVDPSNVESVTKWTPPKTVSQIRSFLGLAGYYRRFIENFSRIARPMTQLLKKDEKFKWTAECDKSFEEFKKKLVSAPVLILPDQMKDFQGRVVAYASRQLRPHEGNYPTHDLELAAVVHALKIWRHYLIGNRCEVYTDHKSLKYIFTQPDLNLRQRRWLELIKDYDMSIHYHPGKVNVVANARSRKSYCNALCIEGMCGELQQELERLNLRLVEHGYVAALEARPTLVDQVRVAQVNDPEIAELKKNMRVGKAWDFHEDEHGTIWMGERLCVPDDKLAELYLSRIMCLHGVPKKIVSDRGSQFTSKFWQKLQEELGTRLNFCTAYHPQTDGQTERVNQILEDMLRACALDFGGAWDKSLPYAEFLYNNSYQASLQMAPFEALYGRKCRTPLFWDQTGERQLFGTEVLTEAEEKVRIVRERLRIAQSRQKSYVDNRRRELTF

SEQ ID NO: 20540 - protein, 1472 aa, Oryza sativa
  Clone ID: TF_OSC416291j.C1.p22.fg
MVYTRNGSRATGEGSNGEERTDGAHPHSDSGHGPPPLPKNPTLAQVMAHQTQMMAAMMQQMQQQHQQMHQRMLQHAEQQHQQFGPPPPQSKLPEFLRVRPPTFSSTTNPMEANDWLHVIEKKLNLLQCNDQEKVAFATHQLQGPASAWWDNHMATRPPGTEVTWAEFCRSFRKAQGNRTVTEYLHEFNRLARYAPEDVRTDAEKQEKFMAGLDDELTNQLISGDYADFERLVDKAIRQEDQRNKMDRKRKAAQFRAPQGSHQRPRFAPGQQGGPTTMIVHQHRPFNPSNFPQGASGSQNHHGGQSNHGAAPRPPMAPAQTGPPAQSKKETGAKPGSCFNCGELGHFANKCPKPRRAGPRFIQARVNHASAEEAQAAPEAVLGTFPVNSIPATILFDSGATHSFISKKFVGMHGLIREELSTPMRVHTPGNSSTSVQFSPSITIEIQRSPFLANLILLESKDLDVIHGMDWLTKFKGVIDCANRTVTLTNEKGETVVYKSLVSPKRGVSLNQIETEIPVDTVEKNLGKLEDIPIVCEYPEVFPKDLTTMPPKREIEFRIDLAPGTAPIYKRPYRMAANELAEVKKQVDEQLQKGYIRPSTSPWGAPVIFVEKKDKTKRMCVDYRALNEIDLRSGYHQLRIWEEDIPKTEIRLYECTVMSFGLTNAPAFFMNLMNKVFMEFLDKFVVVFIDDILIYSKSEEEHEQHLRLVLEKLKEHQLYAKFSKCDFWLTEVKFLGHVITAQGVAVDPSNVESVTKWTPPKTVSQIRSFLGLAGYYRRFIENFSRIARPMTQLLKKDEKFKWTAECDKSFEELKKKLVSAPVLILPDQMKDFQVYCDASRHGLGCVLMQEGRVVAYASRQLRPHEGNYPTHDLELAAVVHALKIWRHYLIGNRCEVYTDHKSLKYIFTQPDLNLRQRRWLELIKDYDMSIHYHPGKANVVADALSRKSYCTALCIEGMCEELRQEFEHLNVGIVEHGFVAALEARPTLVDQVRAAQVNDSEIAELKKNMRVGKARDFHEDEHGTIWLGERLCVPDDKELKDLILTEAHQTQYSIHPGSTKMYQDLKEKFWWVSMRREIAEFVALCDVCQRVKAEHQRPAGLLQPLQIPEWKWEEIGMDFITGLPRTSSGHDSIWVVVDRLTKVAHFIPVHTTYTGKRLAELYLSRIMCLHGVPKKIVSDRGSQFTSKFWQKLQEELGTRLNFSTGYHPQTDGQTERVNQILEDMLRACALDFGGAWDKSLPYAEFSYNNSYQASLQMAPFEALYGRKCRTPLFWDQTGERQLFGTEVLAEAEEKVRIIRERLRIAQSRQKSYADNRRRELTFEAGDYVYLCVTPLRGVHRFQTKGKLAPRFVGPYKILERRGEVAYQLELPSNMIGIHDVFHVSQLKKCLRVPEEQADSEHIDIQEDLTYVEKPVRILDTSERKTRNKVTRFCRVQWSHHSKEEATWEREDELKAAHPHLFTSSSESRGRDSV

SEQ ID NO: 20541 - protein, 506 aa, Oryza sativa
  Clone ID: TF_OSC10633j.C1.p1.fg
MSGVTSMSPTAGARSDASPEPESESESGVPNIGTEDPCQNAVQIPEDNDSQVNVRPKESHYVRNCPWKVFARSPEKDEKQCPGSNQAPSQSTDKKDGTLQPNSGANRTVIWKMDNGRTMIITGSEFTPEDAARIPKRQRGRNTFRGARQLTRHLIKYGPPRPEDDESGERFSADDDDDNDDDNDENDDATLDSFRERELKFKACARCGIVGHTASLCLPTCRCGEYTHYSDACPLRKVTCFLCEGTDHVPKDCQLNAVIAKTKKEQGTTVQPIRQPMTIDNSGHNPSALPPTPAPVEANHGRSNVTKDVHKSLLVPVSAAKVHNQKPAPWDQASRSCRNCRKPGHCFSDCPLPRAAKAVRRDSQVTSTAHDTNRHLNVQPPPQRIIVKGTVKGRIVPPAIVSSLQHQRQQGKQCQENNSSLQLQRGSTLLRQHPRQASSAPGHPAVVSSSNAPRIAPIQRPIGKSPLGNPASKKFLPAAAVKRVVTPPSKINKQSNIPGETSASRN

SEQ ID NO: 20542 - protein, 548 aa, Oryza sativa
  Clone ID: TF_OSC404116j.C1.p1.fg
MSALGGKDGKIGNEDGASSKGTPSPKVATIPFDYSKLTIPSHNFVSVPSGRAPQFDGTHYAAWKHKMKLHIISLHPSIWKVVCTGIDVPYEDMELTSEQEQLIHHNAQASNAILSALSPEEFNKVDGLEEAKEIWDTLQLAHEGSPAVREAKIELLEGRLGRFVMDDKETPQEMYDRMMILVNKIKELGSEDMTNHFVVKRFLRAFGLRNPTLVSMIWERKDFKRLTPSDILGRIVSHEMQEEEAREAKQEEESSGEESEDEEMAFIVKRFKHFLRKSGYGKGRKDDDKGKRQSKIACFNCGEFGHFIADCPKSNEAKAKGGKKKPERAHVAEAHMAEVWSSGDEEDPEVKPKPKSKDKVEGEGGVATVAFKSSSSSKERLFNNLSDDDNDSYHYSCFMAQGRKVMTQKPSHTSLDVYSSNEESDNELDDVLKSFSKPAMQHLAKLMRALDSKEQLLERQEELLILEKKRNLALEESLAKECAKNEQLANELNLANGSLASLRDVNETLQEKFACLDKSHKDLEVQFDTLWNSTSQPNVVMLGVTILI

SEQ ID NO: 20543 - protein, 1258 aa, Oryza sativa
  Clone ID: TF_OSC10942j.C1.p1.fg
MMPPHSPRNLIKVLGFVRELRLMAFEVGYEVAPEYRQISHDPDEEKCRVRVTLASDSDDLPSFKFEAGGRSYSHACQEAALVAIGELRQRFEEELDSSAFQYHPHKPHGQDYGTYTCPDGEESATLMHAVHMLSAMDAVSVERDKAAHDRENWNRGKICKLESKVYRLQKELAELKGETPPPTPKHRLTQRKRTCPPPRLQLASKIRVMGEAVPDRAEPVIDIISDEEEEEDPEEREPATPEEEDPSLRSDTRRMVNTRTGSGSGSGSGATNNGGDPTLAQILAQQTQLINLLVQQAQNQQANNQNQNPPPPPQNKLADFLRVRPPTFSSTTNPVEAGDWLHAVEKKLDLIQCTEQEKVSFASHQLHGPAAEWWDHFRQGRAEGEPITWQEFTAAFRKTHIPSGVVALKKREFRALNQGSRSVTEYLHDFNRLARYAPEDVRTDEERQEKFLEGLNDELSYALMSTDFRDFQQLVDKAIRQEDKYNRMEQKKRRAAQFKAQQGSNQRPRLVTGPQVPSYPQGGSSSVVRPQRQFYNNNTSNRGNDNRNVVARPAATSAQNQPVRKEQGSKPVICFNCGDPGHYADKCPKPRRVKNAPAPNNSNVPAPKARVNHVAAAEAQNAPDVVLGTFPVNSIPATVLFDSGATHSFLSKSFTSNHGMEVISLERPLLVNTPGNQVFSTQYCPSATIEIEEVPFPSSLILLESKDLDVILGMDWLSCHRGVIDCANRKVTLTSSNGETVSFFMSSPKSHGVILNQVALQEIPIVQDYPDVFPEDLPGMPPKREIEFRIDLVPGTNPIHKRPYRMAANELVEVKRQVEDLLQKGYIRPSTSPWGAPVIFVEKKDHTQRMCVDYRALNEVTIKNKYPLPRIDDLFDQLEGATVFSKIDLRSGYHQLRIREEDIPKTAFTTRYGLFECTVMSFGLTNAPAFFMNLMNKVFMEYLDKLVVVFIDDILIYSKTKEEHEEHLRLALEKLREHQLYAKFSKCEFWLSEVKFLGHVISSGGVAVDPSNVESVLSWKQPKTVSEIRSFLGLAGYYRRFIENFSKIARPMTRLLQKEVKYKWTEDCEQSFQELKKRLATALVLILPDSRKGFQVYCDASRLGLGCVLMQEGKVVAYASRQLRPHENNYPTHDLELAAVVHALKIWRHYLFGNRTEVYTDHKSLKYIFTQPDLNMRQRRWLELIKDYDMEIYYHPGKANVVADALSRKSYCNMSEGRRLPWELCQEFEKLNLGIVSNGFVAALEAKPTLFDQVKRLK

SEQ ID NO: 20544 - protein, 1784 aa, Oryza sativa
  unsure (1)..(1784): unsure at all Xaa locations
  Clone ID: TF_OSC11373j.C1.p1.np
FFVISLTLPINGNNVVNAXFGMDNSWFGGLICSTMPPHSPRNLIEVLGFVRELRLMAFEVGYEVAPEYRQISHDPDEEKCRVRVTLASDREDLPSIKFEAGGRSYCHACQEAALVAIGELRQRFEEELDSSAFQYHPHKPHGQDYGTYICPDGEESATLMHVVHMLSAMDAVSVERDKAAHDRENWNRGKICKLESKVYRLQKELAELKGETPPPTPKLRLVARKRTCPPPRLQLASKIRVMGEAVPDRAEPVIDIISDEEEEEDPEEREATPEEEDPSLRSMVNTRTGTGSGSGSGSGSGATNNGGPTLAQILAQQTQLINLLVQQAQNQQANNQNHPPPQNKLADFLRVRPPTFSSTTNPVEAGDWLHAVEKKLDLIQCTEQEKVSFASHQLHGPAAEWWDHFRQGRAEGELITWQEFTTAFKKTHIPSGVVALKKREFRALNQGSRSVTEYLHDVNRLARYAPEDVRTDEERQEKFLEGLNDELSYALMSTDFRDFQQLVDKAIRQEDKYNRMEQKKRRAAQFKAQQGSNQRPRLVTGPQAPSYPQGGSSSVVRPQRQFYNNNSGNDNRNMVARPAATPAQNQPVRKEQGSKPVICFNCGDPGHYADKCPKPRHVKNAPAPNNSNVLAPKARVNHVAAAEAQNAPDVVLGTFPVNSIATVLFDSGATHSFLSKSFASKHGMEVVSLGRPLLVNTPGNQVFSTXYCPSVTIEIEEVLFPSSLILLESKDLDVILGMDWLSRHRGVIDCANRKVTLTSSNWETVSFFVSSPKYHGVNLNQVALQEIPIVQDYPDVFPEDLPGMPPKRDIEFRIDLVPGTNPIHKRPYRMAANELAEVKKQVDDLLQKGYIRPSTSPWGAPVIFVEKKDHTQRMCVDYRALNEVTIKNKYPLPRIDDLFDQLEGATVFSKIDLRSGYHQLRIREYGLFECTVMSFGLTNAPYGLFECTVMSFGLTNAPAFFMNLMNKVFMEYLDKFVVVFIDDILIYSKTKEEHEEHLRLALEKLREHQLYAKFSKCEFWLSEVKFLGHVISSGGVAVDPSNVESVLSWKQPKTVTEIRSFLGLAWYYRRFIENFSKIARPMTRLLQKEVKYKWTEDCERSFQELKKRLVTAPVLILPDSRKGFQVYCDASRHGLGCVLMQEGKVVAYASRQLRPHENNYPTHDLELAAVVHALKIWRHYLFGNRTEEFEKLNLGIISKGFVAALEAKPTLFDQVREAQVNDPDIQEIKKNMRRGKAIGFVEDEQGTVWLGETICVPENKELKNTIMKEAHETLYSVHPGSTKMYQDLKQQFWWASMRREIAEYVALCDVCQRVKAEHQKPAGLLQPLKIPEWKWEEIGMDFITGLPRTSAGHDSIWVVVDRLTKVAHFIPVKTTYTGHKLAELYMARVVCLHGVPKKIVSDRGSQFTSKFWQKLQLELGTRLNFSTAYHPQTDGQTERVNQILEDMLRACVLDFGGSWDKNLPYAEFSYNNSYQASLQMAPYDALNGRKCRTPLLWDQTGERQVFGTDILRQAEEKVKIIQERLRVAQSRQKSYADNRRRDLAFEEGDYVYLRVTPLRGVHRFQTKGKLAPRFVGPFKIVSRRGEVAYQLELPPSMAGIHDVFHVSQLKKCLRVPTEEADPDRIELQEDLTYVEKPVRILEVSERNTRNRVIRFCKVQWSNHSEEEATWEREDELNLEFDLFNPSLYKFPSSSSSVCPLSRALPCPVAPPPRAPARRRRRPSSACRRAVSAVAAACRRRRXVRRGERNLGRPFPFAADHRSPLVAVKPPPPPSSSSPAAIVRL

SEQ ID NO: 20545 - protein, 597 aa, Oryza sativa
  Clone ID: TF_OSC14733j.C1.p1.fg
RYAPEDVRTDEERQEKFLEGLNDELSYTLMSTEFRDFQQLMDKAIRQEDKYNRMEQKKRRAAQFKAQQGSNQRPRLVTGPQVPSYPQGGSSSVVRPQRQFYNNNTGNRSNDNRNVVARPAATSVQNQPVRKEQGSKPVICFNCGDPGHYADKCPKPRRVKNVPAPNNSNVPAPKARVNHVAAAEAQNAPDVVLGTFPVNSIPATVLFDSGATHSFLSKSFASKHGMEVVSLGRPLLVNTPGNQVFSTRYCPSVTIEIEEVSFPSSLILLESKDLDVILGMDWLSRHRGIIDCANRKVILTNSNGKTVSFFASSPKFHGVILNQVALQEILIVQDSSRVFPEDLSGMPLKRDIEFRIDLVLATNPIHKRPCTGNFRASVIHVSVRVKKQVDDWAQKGYIRPSTSPWGAPVIFVEKKDHTQRMCVDYRALNEVTIKNKYPLPRIDDLFDQLKGATVFSKIDVRSGYHQLRIREEDIPKTAFTTRYGLFECTVMSFGLTNAPAFFMNLMNKVFMEYLDKFVVVFIDDILIYSKTKEEHEEHLRLALDKLREHQLYAKFSKCEFWLSEVKFLGHVISSGGVAVDPSNVESVLSWKQPKTVS

SEQ ID NO: 20546 - protein, 1083 aa, Oryza sativa
  unsure (1)..(1083): unsure at all Xaa locations
  Clone ID: TF_OSC1737j.C1.p1.np
NXFNSWSGMANSWFGGLICSIMPRHSPRNLIEVLGFVRELRLMAFEVGYEVAPEYRQISHDPDEEKCRVRVTLASDSEDLPSFKFEAGGRSYCHACQEAALVAIGELRQHFEEELDSSAFQYHPHKPHGQDYGTYTCPDGEESATLMHAVHMLSAMDAVSVERDKAAHDRENWNRGKICKLKSKVYRLQKELAELKGETPPPTSXLRLTARKRTCPPPRLQLASKIRVMGEAVPDRVEPVIDIISDEEEEEDPEEREATPEEEDSSLRSDARRMVNTRTGTGSGSGSGANNNEENPTLAQILAQQTQLINLLVQQAQNQQANNQNHPPPQNKLADFLRVSPPTFSSTTNPVEAGDWLHAVEKKLDLIQCTEQEKVSFASHQLHGPAAEWWDHFRQGRAGGEPITWQEFTTAFKKTHIPTGVVALKKREFRALNQGSRSVTEYLHDFNRLARYAPEDVRTDEERQEKFLEGLNDELSYALMSTDFRDFQQLVDKAIRQEDKYNRMEQKKRRAAQFKSQQGSNQRPRLVTGPQVPSYPQGGSSSVVRPQRQFYNNNSGNDNRSVVARPAATPVQNQPVRKEQGSKPVICFNCGDPGHYADKCPKPRRVKNAPAPNNSSAPAPKARVNHVAAAEAQNAPDVVLGTFPVNSIPATVLFDSGATHSFLSKSFASNHGIEVISLGRPLLVNTPGNQVFSTQYCPSVTIEIEEVLFPSSLILLESKDLDVILGMDWLSRHRGVIDCANRKVTLTNSNGETVSFFASSPKSHGVVLNQVALQEIPIVQDYPDVFPEDLPGMPPKRDIEFRIDLVPGTNPIHKRPYRMAANELAEVKKQVDDLLQKGYIRPSTSPWGAPVIFVEKKDHTQRMCVDYRALNEVTIKNKYPLPRIDDLFDQLEGATVFSKIDLRSGYHQLRIREYGLFECTVMSFGLTNAPAFFMNLMNKVFMYGLFECTVMSFGLTNAPAFFMNLMNKVFMEYLDKFVVVFIDDILIYSKTKEEHEEHLRLALEKLREHQLYAKFSKCEFWLSEVKFLGHVISSGGVAVDPSNVESVLSWKQPKTVSEIRSFLGLAGYLRERREGGSERSGPR

SEQ ID NO: 20547 - protein, 1150 aa, Oryza sativa
  Clone ID: TF_OSC25598j.C1.p1.fg
MMPPRSPRNLIEVLGLVRELRLMAFEVGYEVAPEYRQIPHDPDEEKCRVRVTLASDSEDLPSFKFEAGGRSYCHACQEVALVAIGELRQHFEEELDSSAFQYHPHKPHGQDYGSYTCPDGEESATLMHVVHMLSAMDTVSVERDKAAHDRENWNRGKICKLKSKVHRLQKELAELKGEMPPPTSKLRLTARKRTCPPPRLQLASKIRVMGEAVPDRAEPVIDIISDEEEEEDPEEREPATPEEEDSSLRSDARVMVNTRTGSGSGSGANNNEGEPTLAQILAQQTQLINLLVQQAQNQQGNNQNQNPPPPPQNKLADFLRVRPPTFSSTTNPVEAGDWLHAVEKKLDLIQCTEQEKVSFASHQLHGPAAEWWDHFRQGRAGGEPITWQEFTAAFKKTHIPSGVVALKKREFRALNQGSRSVTEYLHDFNRLARYAPEDVRTDEERQEKFLEGLNDELSYTLMSTEFRDFQQLVDKAIRQEDKYNRMEQKKRRAAQFKAQQGSNQRPRLVTGPQVPSYPQGGSSSVVRPQRQFYNNNTGNRGNDNRNVVARPAATSVQNQPVRKEQGSKPVICFNCGDPGHYADKCPKPRQSKDLDVILGMDWLSRHRGVIDCANRKVTVTNSNGEIVSFFASSPKSHGVVLNQVTLQEIPIVQDYPDVFPEDLPGMPPKRDIEFRIDLVPGTNPIHKRPYRMAANELAEVKKQVDDLLQKGYIRPSTSPWGAPVIFVEKKDHTQRMCVDYRALNEVTIKNKYPLPRIDDLFDQLKGATVFSKIDLRSGYHQLRIREEDIPKTAFTTRYGLFECTVMSFGLTNAPAFFMNLMNKVFMEYLDKFVVVFIDDILIYSKTKEEHEEHLRLALEKLREHHFYAKFSKCEFWLSEVKFLGHVISSGGVAVDPSNVESVLSWKQPKTVSEVRSFLGLAGYYRRFIENFSKIARPMTRLLQKEVKYKWTEDCERSFQELKKRLVSAPVLILPDSRKGFQVYCDASRLGLGCVLMQEGKVVAYASRQLRPHENNYPTHDLELAAVVHALKIWRHYLYGNRTEIYTDHKSLKYIFTQPDLNMRQRRWLELIKDYDMEIHYHPGKANVVADALSRKSYCNMSEGRCLPWELCQEFEKLNLGIVSKGFVAALEAKPTLFDQIREAQVNDPDI

SEQ ID NO: 20548 - protein, 778 aa, Oryza sativa
  Clone ID: TF_OSC27003j.C1.p1.np
LSLPQSEGYVIVLHQMLRRLRYPGFPSYRVRQCGPVWEARVEIHPRVPSELDYSFQTRHHRDLPETAMQDAAREAFLRLSSIHRAELVSTEFAHHPFREEGNSVCTVQNTPCCYNPIVTRLSRWAEAVDDYYEEALLEIDDHQRRMGELETEVTDLTAQQLQLEEEHQAWGSEIDSLKAQLQLGSGLETPIQIDSETEETDTEPEIEPDITDPSEDEAPVPRITFLGGPRTLSTARKSTRPPGKRPKPDPEATTSEPWGLRVIEKKLTLVRVREADKVIFAANQLEGPAGDWWDTYKEAREDGAGEPTWEEFTAAFRENFVPAAVMRMKKNEFRRLRQGNTTVQEYLNKFTQLARYAIGDLADEEEKIDKFIEGLNDELRGPMIGQDHESFQSLINKVVRLENDQRTVEHNRKRRLAMSRPPQTVPQRLKGATPSGWKPPVVVTNRPAAPSNFNRPVALQNRTPTPTLAAPGAKKNVDCFNCGEYGHYANNCPHPRKTPVRTGANAMTVRGTTTPTVGRGLFKTPQSNRTTTGFGRGQVNHVRAEEAQEDQGVLMGMFSINSTPVKVLFDSGASHSFISLKASQKHNLTLVGLRKPMIVHSPGGEITVSHACIDVPILLRDVVFPSNLMVLIPQTLDVILGMDWLAKHTGVIDCRRREVTLTTPWGSDMRATMDQDPRLTERAGGIFTMLPLKGMPVVQRFPDVFPEDLPGMPPDRDIEFIIDLIPGTTPISKRPYRMPVNELEELKKQIRELQEKGFVRPSSSPWGAPVLFVKKKDG

SEQ ID NO: 20549 - protein, 1262 aa, Oryza sativa
  unsure (1)..(1262): unsure at all Xaa locations
  Clone ID: TF_OSC29560j.C1.p2.np
MPPHSPRNLIEVLGFVRELRLMAFEVGYEVAPEYRQISHDPDEEKCRVRVTLASDREDLLSIKFEAGGRSYSHACQEVALVAIGELRQRFEEELDSSAFQYHPHKPHGQDYGTYICPDGEESATLMHAVHMLSAMDAVSVERDKAAHDRENWNRGKICKLESKVYRLQNELAELKGETPPPTPKLRVTLRKRTCPPPRLQLASKIRVMEAVPDRAEPVIDIISDEEEEEDPEEREATPEEEDPSLRSDARRSSRLVRSLPYLSVVLSCCCQMVNTRTGSGSGSGSGATNDGGDPTLAQILAQQTQLINLLVQQAQNQQANNQNHPPPQNKLADFLRVRPPTFSSTTNPVEAGDWLHAVEKKLDLIQCTEQEKVSFASHQLHGPAAEWWDHFRQGRAEGEPITWQEFTAAFKKTHIPAGVVALKKREFRALNQRSRSVTEYLHDFNRLARYAPEDVRTDEERQEKFLEGLNDELSYALMSTDFRDFQQLVDKAIRQEDKYNRMEQKKRRAAQFKAQQGSNQRPRLVTGPQAPSYPQVGSSSVVRPQRQFYNNNSGNDNRNMVARPAATSAQNQPVRKEQGSKPVICFNCGDPGHYADKCPKPRRVKNAPAPNNSNVPVPKARVNHVAAVEAQNAPDVVLGTFPVNSIPATVLFDSGATHSFLSKSFASNHGMEVISLGRPLLVNTPGNQVFSTQYCPSVTIEIEEVPFPSSLILLESKDLDVILGMDWLSRHRGVIDCANRKVTLTSSNGETVSFFASSPKSHGVTLNQVVLQEIPIVQDYPDVFPEDLPGMPPKRDIEFRIDLVPGTNPIHKRPYRMAANELADVKRQKDHTXRMCVDYRALNEVTIKNKDPLPRIDDLFDQLKGATVFSKIDLRSGYHQLRIREEDIPKTAFTTRYGLFECTVMSFGLTNAPAFFMNLMNKVFMEYLDKFVVVFIDDILIYSKTKEEHEEHLRLALEKLREHQLYAKFSKCEFWLSEVKFLCHVISSGGVAVDPSNVESVLSWKQPKTVSEFRSFLGLAGYYRSFIENFSKIARPMTRLLQKEVKYKWTDDCEQSFXELKKRLVTAPVLILPDSRKGFQVYCDASRLGLGCVLMQEGKVVAYASRQLRPHENNYPTHDLELAAVVHALKIWRHYLFGNRTEMYTDHKSLKYIFTQPDLNMRQRRWLELIKDYDMEIHYHPGKANVVADALSRKSYCNMSEGRRLPWELCQEFENLNLGIVNKGFVAALQAKPTLFDQVRCHARKSKDARRRPATREGGAAV

SEQ ID NO: 20550 - protein, 566 aa, Oryza sativa
  Clone ID: TF_OSC2960j.C1.p1.fg
MAFEVGYEVAPEYRQISHDPDEEKCRVRVTLASDSEDLPSYKFEAGGRSYCHACQEVALVAIGELRQHFEEELDSSAFQYHPHKPHGQDYGTYTCPDGEESATLMHVVHMLSAMDAVSVERDKAAHDRENWNRGKICKLKSKVHRLQKELAELKGETPPPTSKLRLTARKRTCPPPRLQLASKIRVMGEAVPDCAQPVIDIISDEEEEEDPKEREPATPEEEDSSLRSDARRNAAGTESAGKQSEPESTPPPQNKLADFLRVRPPTFSSTTNPVEAGDWLHAVEKKLDLIQCTEQEKVSFASHQLHGPAAEWWDHFRQGRAGGEPITWQEFTAAFKKTHIPSGVVALKKREFRALNQGSRSVTEYLHDFNRLARYAPEDVRTDEERQEKFLEGLNDELSYALMSTDFRDFQQLVDKAIRQEDKYNRMEQKKRRAAQFKAQQGSNQRPRLVTGPQAPSYPQGGSSSVVRPQRQFYNNNTGNRGNDNRNVIARPAATPVQNQSVRKEQGSKPVICFNCGDPGHYADKCPKPRRVKNVPAPNNSNVPAPKARVNHVVAAEAQNAPDVVL

SEQ ID NO: 20551 - protein, 1777 aa, Oryza sativa
  Clone ID: TF_OSC31236j.C1.p2.fg
MVPGLEWLVPGLEVIFVQLGLVVQMWLGLCNMEIPGVTSWYQSHLDLRISQMMPRHSPRNLIEVLGFVRELRLMAFEVGYEVAPEYRQIPHDPDEEKCRVRVTLASDSEDLPSFKFEAGGRSYCHACQEVALVAIGELRQHFEEELDSSAFQYHPHKPHGQDYGTYICPDGEESATLMHAVHMLSAMDAVSVERDKAAHDRENWNRGKICKLESKVYRLQKELAELKGEMPPPTPKLRLVARKRTCPPPRLQLASKIRVMGEAVPDRAEPVIDIISDEEEEEDPEEREPATPEEEDSSLRSDASCCLHHGWDMVNTRTGTGSGSGSGANNNEGEPTLAQILAQQTQLINLLVQQAQNQQGNNQNQNPPPPPQNKLADFLRVRPPTFSSTTNPVEAGDWLHAVEKKLDLIQCTEQEKVSFASHQLHGPAAEWWDHFRQGRAGGEPITWQEFTAAFKKTHIPSGVVALKKREFRALNQGSRSVTEYLHDFNRLARYAPEDVRTDEERQEKFLEGLNDKLSYALMSTDFQDFQQLVDKAIRQEDKYNRMEQKKRRAAQFKAQQGSNQRPRLVTGPQVPSYPQGGSSSVVRPQRQFYNNNTGNRGNDNRNVVARPAATPVQNQPVRREQGSKPVICFNCGDPGHYADKCPKPRRVKNAPAPNNFNVPAPKARVNHVAAAEAQNAPDVVLGTFPVNSIPATVLFDSGATHSFLCKSFAIKHGMEVVSLGRPLLVNTPGNQAFSTRYCPSVTIEIEEVPFPSSLILLESKDLDVILGMDWLSRHRGVIDCANRKVTLTSSNGETVSFFASSPKSHGEVLNQVALQEIPIVQDYPDVFPEDLPGMPPKRDIEFRIDLVPGTNPIHKRPYRMAANELAEVKKQVDDLLQKGYIRPSTSPWGAPVIFVEKKDHTQRMCVDYRALNEVTIKNKYPLPRIDDLFDQLKGATVFSKIDLRSGYHQLRIREEDIPKTAFTTRYGLFECTVMSFGLTNAPAFFMNLMNKVFMEYLDKFVVVFIDDILIYSKTKEEHKEHLRLALEKLREHQLYAKFSKCEFWLSEVKFLGHVISSGGVAVDPSNVESVLSWKQPKTVSEVRSFLGLAGYYRRFIENFSKIARPMTRLLQKEVKYKWTEDCEQSFQELKKRLVTAPVLILPDSRKGFQVYCDASRLGLGCVLMQEGKVVAYASRQLRPHENNYPTHDLELAAVVHALKIWRHYLYGNRTEVYTDHKSLKYIFTQPDLNMRQRRWLELIKDYDMEIHYHPGKANVVADALSRKSYCNMSEGRCLPWELCQEFEKLNLGIVSKGFVAALEAKPTLFDQIREAQVNDPYIQEIKKNMRRGKAIGFVEDEQGTVWLGERICVPENKELKDTIMKEAHETLYSIHPGSTKMYQDLKQQFWWASMRREIAEYVALCDVCQRVKAEHQKPAGLLQPLKIPEWKWEEIGMDFITGLPRTSAGHDSIWVVVDRLTKVAHFIPVKTTYTGHKLAELYMARVVCLHGVPKKIVSDRGSQFTSKFWQKLQSELGTRLNFSTAYHPQTDGQTERVNQILEDMLRACVLDFGGSWDKNLPYAEFSYNNSYQASLQMSPNEALYGRKCRTPLLWDQTGERQVFGTDILREAEEKVKIIQERLRVAQSCQKSYADNRRRDLVFEEGDYVYLRVTPLRGVHRFQTKGKLAPRFVGPFKIVSRRGEVAYQLELPPSMAGIHDVFHVSQLKKCLRVPTEEADPDCIELQEDLTYVEKPVRILEFPTFRRRAFPLRKVPKRLWKLKASHTDPKQPFEHVDPV

SEQ ID NO: 20552 - protein, 1532 aa, Oryza sativa
  Clone ID: TF_OSC31236j.C1.p4.fg
MPHRSPRNLIKVLGFVRELRLMAFEVGYEVAPEYRQIPHDPDEEKCRVRATLASDSEDLPSFKFEAGGRSYSHACQEVALVAIGELRQHFEEELDSSAFQYHPHKPHGQDYGSYTCPDGEESATLMHVVHMLNAMDTVGVEREKAAHDRENWNRDKICKLKSKVNRLQKELAELKGETPPPTSKLRLTARKRTCLPPRLQLASKIRVMGEAVPDRAEPVIDIISDEEEEEDPEEREPATPEEEDSSLHFLRVRPPTFSSTTNPVEAGDWLHAVEKKLDLIQCTEQEKVSFASHQLHGPAAEWWDHFRQGRAGGEPITWQEFTAAFKKTHIPTGVVALKKREFRALNQGSRSVTEYLHDFNRLARYAPEDVHTDEERQEKFLEGLNDELSYTLMSTEFRDFQQLVDKAIRQEDKYNRMEQKKRRAAQFKAQQGSNQRPRLIPGPQVPSYPQGGSSSVVRPQRQFYNNNTGNRGNENRNVVARPAATPVQNQPVRKEQGSKPVICFNCGDPGHYADKCPKPRHVKNVPVPNNSNVPAPKARVNHVAAAEAQNAPDVVLGTFPVNSIPATVLFDSGATHSFLSKSFATKHGMEVVSLGRPLLVNTPGNQVFSTRYCPSVTIEIEGVPFPSSLILLESKDLDVILGMDWLSRHRGVIDCANRKVTLTNSNGETVSFFASSPKSHGVVLNQVALQEIPIVQDYPDVFPEDLPGMPPKRDIEFRIDLVPGTNPIHKRPYRMAANELAEVKKQVDDLIQKGYIRPSTSPWGAPVIFVEKKDHTQRMCVDYRALNEVTIKNKYPLPRIDDLFDQLEGATVFSKIDLRSGYHQLRIREEDIPKTAFTTRYGLFECTVMSFGLTNAPAFFMNLMNKVFMEYLDKFVVVFIDDILIYSKTKEEHEEHLRLALEKLREHQLYAKFSKCEFWLSEVKFLGHVISSGGVAVDPSNVESVLSWKQPKTVSEIRSFLGLAGYYRRFVENFSKIARPMTRLLQKDVKYKWTEDCEQSFQELKKMLVTAPVLILPDSRKGFQVYCDASRHGLGCVLMQEGKVVAYASRQLRPHENNYPTHDLELAAVVHALKIWRHYLFGNRTEIYTDHKSLKYIFTQPDLNMRQRRWLELIKDYDMEIHYHPGKANVVADALSRKSYCNMSEARCLPWELCQEFERLNLGIVSKGFVATLEAKPTLFDQIREAQMNDPDIQEIKKNMRRGKAIGFVEDEQGTVWLGERICVPENKELKNTIMKEAHETLYSIHPGSTKMYQDLKLQFWWASMRREIAEYVALCDVCQRVKAEHQKPAGLLQPLKIPEWKWEEIGMDFITGLPRTSAGHDSIWVVVDRLTKVAHFIPIKTTYTGHKLAELYMARVVCLQGVPKKIVSDRGSQFTSMFWQKLQSELGTRLNFSTAYHPQTDGQTERVNQILEDMLRACVLDFGGSWDKNLPYAEFSYNNSYQASLQMSPNEALYGRKCCTPLLWDQTGERQVFGTDILREAEEKVKIIQERLRVAQSRQKSYADNRRRDLAFEEGDYVYLRVTPLRGVHRF

SEQ ID NO: 20553 - protein, 1170 aa, Oryza sativa
  unsure (1)..(1170): unsure at all Xaa locations
  Clone ID: TF_OSC32906j.C1.p1.np
MTSWYQSHLDLRISQMMPPHSLRNLIKVLGFVRELRLMAFEVGYEVAPEYRQISHDPDEEKCRVRVTLASDSEDLPSFKFEAGGRSYCHACQEAALVAIGELREHFEEELDSSAFQYHPHKPHGQDYGIYTCPDGEESATLMHAVHMLSAMDAVSVERDKAAHDRENWNRGKICKLESKVYRLQKELAELKGETPPPTPKLRLTPRKRICPPPRLQLASKIHVMGEAVPDRAEPVIDIISDEEEEEDPEEREPATPEEEDSSLRSDARRTTNPVEAGDWLHAVEKNLDLIQCTEQEKVSFASHQLHRPAAEWWDHFRQGRAEGEPITWQEFMAAFKKTHIPTGVVALKKREFRALNQGSRSVTEYLHDFNRLARYAPEDVRTDEERQEKFLEGLNDELSYALMSTDFRDFQQLVDKAIRQEDKYNRMEQKKHRAAQFKAQQGSNQRPRLVTGPQAPPYPQGGSSSVVCPQRQFYNNNTGNRGNDNRNTVARPAATPAQNQPVRKEQGSKPVICFNCGDPGHYADKCPKPRRVKNAPTPNNSNVPAPKARVNHVAAAEAQNAPDVVLGTFPVNSIPATVLFDSGATHSFLSKSFASNHGMEVISLGRPLLVNTPGNQVFSTQYCPSATIEIEEVPFPSSLILLESKDLDVILGMDWLSRHRGVIDCANRKVTLTSSNGETVSFFVSSPKYHGVILNQVALQEIPIVQDYPDVFPEDLPGMPPKRDIEFRIDLVPGTNPIHKRPYRMAANELAEVKRQVDDLLQKGYIRPSTSPWGAPVIFVEKKDHTQRMCVDYRALNEVTIKNKYPLPRIDDLFDQLEGATVFSKIDLRSGYHQLRIREEDIPKTAFTTRYGLFECTVMSFGLTNAPAFFMNLMNKVFMEYLDKFVVVFIDDILIYSKTKEEHEEHLRLALEKLREHXLYAKFSKCEFWLSEVKFLGHVISCGGVAVDPSNVESVLSWKQPKTVSEIRSFLGLAGYYCRFIENFSKIARPMTRLLQKEVKYKWTEDCERSFQELKKRLVTAPVLILPDSRKGFQVYCDASRLGLGCVLMQEGKVVAYASRQLRPHENNYPTHDLELAAVVHALKIWRHYLFGNRTEMYTDHKSLKYIFTQPDLNMRQRRWLELIKDYDMEIHYHPGKANVVADALSRKSYCNMSEGRHLPWELCQEFEGL

SEQ ID NO: 20554 - protein, 859 aa, Oryza sativa
  Clone ID: TF_OSC33037j.C1.p1.fg
MMPPHSPRNLIKVLGFVRELRLMAFEVGYEVAPEYRQISHDPDEEKCRVRVTLASDSDDLPSFKFEAGGRSYSHACQEAALVAIGELRQRFEEELDSSAFQYHPHKPHGQDYGTYTCPDGEESATLMHAVHMLSAMDAVSVERDKAAHDRENWNRGKICKLESKVYRLQKELAELKGETPPPTPKHRLTQRKRTCPPPRLQLASKIRVMGEAVPDRAEPVIDIISDEEEEEDPEEREPATPEEEDPSLRSDTRRMVNTRTGSGSGSGSGATNNGGDPTLAQILAQQTQLINLLVQQAQNQQANNQNQNPPPPPQNKLADFLRVRPPTFSSTTNPVEAGDWLHAVEKKLDLIQCTEQEKVSFASHQLHGPAAEWWDHFRQGRAEGEPITWQEFTAAFRKTHIPSGVVALKKREFRALNQGSRSVTEYLHDFNRLARYAPEDVRTDEERQEKFLEGLNDELSYALMSTDFRDFQQLVDKAIRQEDKYNRMEQKKRRAAQFKAQQGSNQRPRLVTGPQVPSYPQGGSSSVVRPQRQFYNNNTSNRGNDNRNVVARPAATSAQNQPVRKEQGSKPVICFNCGDPGHYADKCPKPRRVKNAPAPNNSNVPAPKARVNHVAAAEAQNAPDVVLGTFPVNSIPATVLFDSGATHSFLSKSFTSNHGMEVISLERPLLVNTPGNQVFSTQYCPSATIEIEEVPFPSSLILLESKDLDVILGMDWLSCHRGVIDCANRKVTLTSSNGETVSFFMSSPKSHGVILNQVALQEIPIVQDYPDVFPEDLPGMPPKREIEFRIDLVPGTNPIHKRPYRMAANELVEVKRQVEDLLQKGYIRPSTSPWGAPVIFVEKKDHTQRMCVDYRALNE

SEQ ID NO: 20555 - protein, 1602 aa, Oryza sativa
  Clone ID: TF_OSC34537j.C1.p1.fg
MADSDSPATWELSLPQSEGYVIVLHQMLRRLRYPGFPSYRVRQCGPVWEARVEIHPRVPSELDYSFQTRHHRDLPETAMQDAAREAFLRLSSIHRAELVSTEFAHHPFREEGNSVCTVQNTPCCYNPIVTRLSRWAEAVDDYYEEALLEIDDHQRRMGELETEVTDLTAQQLQLEEEHQAWGSEIDSLKAQLQVHGDQYQQLSDQYNDRRGMMDTLEEQLRESQEHVSQLEEQLRAAKISTTGASTSTAAGRDRYFFLTPPYPPAFHALLGEASMLATESAPYLVDPTAAQPPVPELVHTPLVPTPSPQLGSGLETPIQIDSETEETDTEPEIEPDITDPSEDEAPVPRITFLGGPRTLSTARKSTRPPGKRPKPDPEATTSEPWGLRVIEKKLTLVRVREADKVIFAANQLEGPAGDWWDTYKEAREDGSREFPEPDQQGRQARERSKDGEHNRKRRLAMSRPPQTVPQRLKGATPSGWKPPVVVTNRPAAPSNFNRPVALQNRTPTPTLAAPGAKKNVDCFNCGEYGHYANNCPHPRKTPVRTGANAMTVRGTTTPTVGRGLFKTPQSNRTTTGFGRGQVNHVRAEEAQEDQGVLMGMFSINSTPVKVLFDSGASHSFISLKASQKHNLTLVGLRKPMIVHSPGGEITVSHACIDVPILLRDVVFPSNLMVLIPQTLDVILGMDWLAKHTGVIDCRRREVTLTTPWGSDMRATMDQDPRLTERAGGIFTMLPLKGMPVVQRFPDVFPEDLPGMPPDRDIEFIIDLIPGTTPISKRPYRMPVNELEELKKQIRELQEKGFVRPSSSPWGAPVLFVKKKDGSMRICVDYRSLNEVTIKNKYPLPRIDDLFDQLKGAKVFSTIDLRSGYHQLKIRTEDIPKTAFSTRYGLYEFTVMSFGLTNAPAYFMNLMNKVFMDYLDKFVVVFIDDILIYSKDEEEHAEHLRLVLQKLRKHKLYKKFSKCEFWLKEVAFLGHVISAGGVAVDPAKVEAVTEWKAPKSVTEIRSFLGLAGYYRRFIEGFSKIARPMTQLLKKEKKFVWSEQCQESFEQLKEKLTSAPILVLPDIRKDFVIYCDASRQGLGGVLMQDGKVVAYASRQLRPHEENYPTHDLELAAVVHALKIWRHYLIGNHCDIYTDHKSLKYIFTQSDLNLRQRRWLELIKDYDLEVHYHPGKANVVADALSRKSHYNHLRMEGMVPELREEIAQLNLHIVPHGRINTLDIQPLLRTQIEEAQKDNEEVREVKERLAAGRAKEFSTDGKDVLWYKKRIYVPEQGGLRGLILKEAHESAYSLHPGSTKMYQDLKEGYWWPNMKRDVAEYVALCDVCQKVKAEHQRPAGLLQPLRIPEWKWDEIGMDFIVGLPKTATGYDSIWVIVDRLNKTARFIPVKTNYSSAKLAELYMTRIVCLHGIPKKIISDRGTQFTSHFWEKVHEALGSYLAFSTAYHPQTDGQTERTNQTGERAVFGPDIIQEAEEKVRLIRDRLKVAQSRQKSYADTRRRNLEFKEGDYVYLKVSPMRGTKRFKVKGKLAPRYVGPFQIIARRGEVAYQLQLPEYIADVHPVFHVSQLKKCLRVPEEQAPLEEIHISNDLTYPEHPIRILDEAD

SEQ ID NO: 20556 - protein, 1575 aa, Oryza sativa
  unsure (1)..(1575): unsure at all Xaa locations
  Clone ID: TF_OSC400236j.C1.p2.np
MQDAAREAFLRLSSIHRAELASTEFAHHPFREESNSVCTVQDTPCCYNPIVTRLSRWAEAVDDFYEEALLEINDQQRRVGELETEVTDLTVQQLQLEEEHQAWGTGLQYGDSDPGRLRDRGDQHRAEIEPDITDPSEDETPVPRITFIGGPCTLSTAHKNTRPPGKKPKPDPEATTSEPWGLSSHQNNSLNGIKPXELVRKLXYLLNRPTQMASRRRASTSNEETXTPDLTTLAGVMATQTQLLQAIANNQGNRGGSSFGEFVRTKPPTFATADEPMEAEDWLRIIEKKLTLVRVREADKVIFAVNQLEGPAGDXWDTYKEAREEDAGEPTWEEFTAAFCENFVPAAVMRMKNEFRRLRQGNTTVQEYLNRFTQLARYAIGDLADEEEKIDKFIEGLNDELHGPMIGQDHESFQSLINKVVRLENDQRTVEHNRKRRLAMNRPPQGVPQRLKGAPSSGWKPPIVATNRPAAPSNFNRPIAIQNHTPTPTLAALGAKKNVDCFNCGEYGHYANNCPHPRKTPVRTGANAMTVRGTTTPAARRGLFKTPQTNRTATGFGRGQASQKHNLTLVGLRKPMIVHSPGGEITGCGVSLQPGCGVSLQPYGFDTPDPGCHIGYGLVNKEQREDLPGMPPDRDIEFIIDLIPGTAPISKRPYRMPVNELEELKKQIRELQEKGFVRPSSSPWGAPVLFVKKKDGSMRMCVDYRSLNEVTIKNKYPLPWIDDLFYQLKGAKVFSKFDLRSGYHQLKIKTGDISKTAFSTCYRLYEFTVMSFGLTNAPACFMNLMNKVFMDYLDKFVVVFIDDILIYSKDEEEHAEHLRLVLEKLRKHKLYAKFSKCEFWLKEVAFLGHVISAGGVAVDPAKVEAVTEXKAPKSVTEIRTFLGLAGYYRRFIEGFSKIARPMTQLLKKEKKFVWSGQCQESFEQLKEKLTLAPILVLPDIRKNFVIYYDASRQGLGGVLMQDGKVVAYASRQLRPHEENYPTHDLELAVVVHALKIWRHYLIGNHCDIYTDHKSLKYIFTQSDLNLRQRRWLELIKDYDLEVHYHPGKANVVADALSRKSHCNHLRTEGMAPELKEEMAQLNLHIVPHGQINTLDVQPLLRTQIEEAQKDNEEIREVKERLAAGRAKEFSTDEKGVLWYKKRIYVPEQGGLRGLILKEAHESAYSLHPGSTKMYQDLKEGYWWPNMKDVAEYVALCDVCQKVKAEHQRPAGLLQPLRIPEWKWDEIGMDFIVGLPKTATGYDSIWVIVDRLTKTARFIPVKTNYSSAKLAELYMTRIVCLHGVPKRIISDRGTQFTSHFWEKVHEALGSYLAFSTAYHPQIDGQTERTNQLLEDMLRACALDFSKDWEICLPYAEFSYNNSFQASLKMPPNEALFGRRCRTPLMWSETGERAVFGPDIINEAEEKVRLIRDRLKVAQSRQKSYADTRRRNLEFKEGDYVXLKVSPMRGTKRFKVKGKLAPRYVGPFQITARRGEVAYQLQLPENIADVHPVFHVSQLKKCLLVPEEQAPLEEIHISNDLTYPEHPIRILDEAEKRTRSKVWRVYKVQWSNHTEDEATWESEEFLRTEYPHLFENW

SEQ ID NO: 20557 - protein, 1415 aa, Oryza sativa
  Clone ID: TF_OSC400304j.C1.p3.fg
MASRRRASISNEETQTPDLTTLAGVMATQTQLLQAIANNQGNRGRSSFGEFMRTKPPTFTTADEPMEAEDWLRIIEKKLTLVRVREADKVIFAVNQLEGPAGDRWDTYKEAREEDAGEPTWEEFTAAFQENFVPAAVMRMKKNEFRRMRQGNTTVQEYLNRFTQLARYAIGDLADEEEKIDKFIEGLNDELRGPMIGQDHESFQSLINKVVRLENDQRTVEHNHKRRLAMNRPPQGVPQRLKGATSSGWKPPIVAPNRPAAPSNFNRPVVIQNRTPTPTLAAPGAKKNVDCFNCGEYGHYANNCPHPRKTPVRTGANAMTVRGTTTPAAGRGLFKTPQTNRTATGFGRGQVNHVRAEEAQEDQGVLMGMFSINSTPVKVLFDSGASHSFISRKASQKHNLTLVGLRKPMIVHSPGGEITVSHACIDVPIRLRDVVFPSNLLVLIPQTLDVILGMDWLTKNRGVIDCRRRKVTLTTPWRSDMRATMDQDPRLIERAGGIFTMLPLKGMPIVQRFPDVFPEDLPGMPPDRDIEFIIDLIPGTAPISKRPYRMPVNELEELKKQIRELQEKGFNKYPLPRIDDLFDQLKGAKVFSKIDLRSGYHQLKIRTGDVPKTAFSTRYGLYEFTVMSFGLTNTPAYFMNLMNKVFMDYLDKFVVVFIDDILIYSKDEEEHVEHLRLVLEKLRKHKLYAKFSKCEFWLKEVAFLGHVISAGGVVVDPAKVEAVTEWKAPKSVTEIRSFLGLAGYYRRFIEGFSKITRPMTQLLKKEKKFVWSEQCQESFEQLKEKLTSAPILDWGGVLMQEGKDVAYASRQLRPHEENYPTHDLELAVVVHELKIWRHYLIGNHCDIYTDYKSLKYIFTQSDLNLRQRRWLELIKDYDLEVHYHPGKANIVADALSRKSHCNHLRMEGITPELKEEIAQLNLHLVPYGQINTLDIQPLLRTQIEEAQKDNGEIQEVKERIAAGCAKEFSIDEKETLWYKKRIYVPEQGGLRGLILREAHESAYSLHPGSTKMYQDLKEGYWWPNMKRDVAEYVALCDVCQRVKAEHQRPAGLLQPLRIPECKWDEIGMDFIVGLHKTATGYDSIWVIVDRLTKTARFIPVKTNYSGAKLAELYMTRIVCLHGVPKRIISDRGTQFTSHFWEKVHEALGSYLAFSTAYHPQTDGQTERTNQVLEDMLRACALDFSKDWEKCLPYAEFSYNNSFQASLKMSPNEALFGRRCRTPLMWSETGERTVFGPDIIQEAEEKVRLIRDRLKVAQSRQKSYADTRRRDLEFKEGDYVYLKVSPMRGTKMFKVKGKLAPRYVGPFQIIARRGEVAYQLQLPENIADVHPVFHVSQLKKCLRVPEEQAPLEEIHISNDLTYPEHPVRILDEAEKRTRTKVWRMYKVQWSNHTEDEATWESEEFLETEYPHLFEIR

SEQ ID NO: 20558 - protein, 673 aa, Oryza sativa
  unsure (1)..(673): unsure at all Xaa locations
  Clone ID: TF_OSC400340j.C1.p1.np
MGVPRSEGYVIELHRVMRRLRYPRFPIYRVRQCGPFWEGRIEVHPRVPSESDYSFSTRHRRDLPETAMQDAAREAFLXLSSIHWAELASTEFAHHPFREESNSVCTVQDIPCCYNPMVTRLSRWAEAVDDFYEEALLEIDDQQRRMGELETKVTDLTAQQLQLEEEHQAWGSEIDSLKAQLQPGSSLETPIQVDSETEGTDTEPEIEPDITDPSEDATPVPRITFIGGPRTLSNARKSTRPPGKKPKPDLEATTSEPWGLRIIEKKLTLVRVREADKVIFAVNQLEGPVGDRWDTYKEAREKDAGEPTWEEFTAAFQENFVPAAVMRMKKNEFRRMRQGNTTVQEYLNRFTQLARYAIGDLADEEEKIDKFIEGLNDELRGPMIGQDHESFQSLINKVVRLENDQRTVEHNHKRRLAMNRPPQGVPQRLKGATSSGWKPPIVAPNRPAAPSNFNRPVVIQNRTPTPTLAAPGAKKNVDCFNCGEYGHYANNCPHPRKTPVRTGANAMTVRGTTTPAAGRGLFKTPQTNRTATGFGRGQVNHVRAEEAQEDQGVLMGMFSINSTPVKVLFDSGASHSFISRKASQKHNLTLVGLKPMIVHSPGGEITVSHACIDVPIRLRDVVFPSNLLVLIPQTLDVILGMDWLTKNRGVIDCRRRKVTLTTPWRSDMRATMD

SEQ ID NO: 20559 - protein, 1569 aa, Oryza sativa
  Clone ID: TF_OSC400724j.C1.p13.fg
MQDAAREAFLRLSSIHRAELASTEFAHHPFREESNSVCTAQDTPCCYNPIVTRLSRWAEAVDDFYEEALLEINDQQRRVGELETEVTDLTVQQLQLEEEHQAWGTRFEFGDSDPGRLRDRGDRHRAEIEPDITDPSEDETPVPRITFLGRPHTLSTARKSTRPPGKKPKPDPEATTSEPWGLSSHQNNSLNGIKPQELVRKLGYLLNRPTQMASRRRASTNNEETQTPDLTTLAGVMATQTQLLQAIANDQGNRGGSSFGEFMRTKPPTFAMADKPMEAEDWLRIIEKKLTLVRVREADKVIFVVNQLEGPAGDWWDTYKEAREEDAGEPTWEEFTAAFHENFVPAAVMRMKKNEFRRLQQGNTTVQEYLNRFTQLARYAIGDLANEEEKIDKFIEGLNDELRGPMIGQDHESFRSLINKVVRLENDQRTVGHNRKRRLAMNCPPQGVPQRHKGATSSGWKPPIVATNRPAAPRNFNRPVAIQNRTPTPTLAAPGAKKNVDCFNCGEYGHYANNCPHPRKTPVHTGANAMTVSGTTAPAAGRGLFKTPQTNRTATRFGRGQASQKHNLTLVGLRKPMIVHSPGGEITGCGVSLQPYGFDTPDRGCHIGYGLVNKEQREDLPGMPPDRDIEFIIDLIPGTAPISKRPYRMPVNELEELKKQIRELQEKGFVRPSSSPWGAPVLFVKKKDGSMRMCVDYRSLNEVTIKNKYPLPWIDDLFDQLKGAKVFSKIDLRSGYHQLKIRTGDIPKTAFSTRYGLYEFTVMSFGLTNAPAYFMNLMNKVFMDYLDKFVVVFIDDILIYSKDEDEHAEHLRLVLEKLRKHKLYAKFSKCEFWLKEVAFLGHVISAGGVAMDPAKVEAVTEWKAPKFVTEIRSFIGLAGYYRRFIEGFSKIARPMTQLLKKEKKFVWLEQCQESFEQLKEKLTSSPILVLPDIWKDFVIYCDASRQGLGGVLMQDGKVVAYASRQLRPHEENYPTHDLELAAVVHALNIWRHYLIGNHCDIYTDHKSLKYIFTQSDLNLRQRRWLELIKDYDLEVHYHPGKANVVADALSRKSHCNHLRTEGMAPELKEEIAQLNLHMVPHGQINNLDIQPLLRTQIEEAQKDNEEIREVKERLVAGFAKEFSTDEKDVLWYKKRIYVPEQGGLRGLILKEAHKSAYSLHPGSTKMYQDLKEGYWWPNMKRDVAEYVALCDVCQKVKAEHQRPAGLLQPLRIPEWKWDEIGMDFIVGLPKTATGYDSIWVIVDRLTKTARFIPVKTNYNSAKLTELYMTRIVCLHGVPKRIISDRGTQFTSYFWEKVHEALGSYLAFSTAYHPQTDGQTERTNQVLEDMLRVCAMDFSKDWERCLPYAEFSYNNSFQASLKMSPNEALFGRRCRTPLMWTETGERAIFGLDIIKEAEEKVRLIRDHLKVAQSRQKSYADTRRRNLELKEGDYVYLKVSPMRGTKRFKVKGKLAPRYVRPFQITARRGEVAYQLQLPENIADVHPVFHVSQLKKCLRVPEEQATLEEIHISNDLTYPEHLVRILDEAKKKTRTKVWRMYKVQWSNHTEDEATWESEEFLKTEYPHLFENL

SEQ ID NO: 20560 - protein, 1540 aa, Oryza sativa
  unsure (1)..(1540): unsure at all Xaa locations
  Clone ID: TF_OSC401044j.C1.p17.np
PSRLTGEAFLRISSIHRAELASTEFAHHPFREESNSVCTVQDTPCCYNPTVTRLSRWAEAVDDFYEEALLEIDDQXRRVGELETEVTDLTVQQLQLEEEHLAWGTGFQFGDSNPGRLRDRGDRHKPEIEPDITDLSEDETPAHRITFVGGPRTLSTARKSTRPPGKKPKPDPEATTSEPWGLSSHQNNSLNGIKPKGLVRKIGYIPHRPTQMASRRRASTSNEETQVPDLTTLARVMATQTQLLQAIANNQDNCGGSSFGEFMRTKPPTFATADEPMEAEDWLRIIEKKLTLVRVREADKVIFAVNQLEGPTGDWWDTYKEAREEDAGEPTWGEFTTAFRENFVPAAVMRMKKNKFRRLRQGNTMVQEYLNRFTQLACYAIGDLADEEEKIDKFIEGLNDELRGPMIGQDHESFQSLINKVIRLENDQRTVEHNRKRRLAMNRPPQGPQRLKGATSSGWKPPIVATNRPAAPSNFNRLVAIQNHTPTPTLATPGAKKNVDCFNCGEYGHYANNCPHPRKTPVRTGANAMTIRGTTTPAAGRGLFKTPQTNRTATGFGRGQVNHRGNSTTTTSSSAGAAASPSSVTDVAAVSAACDLASPLLGVLAATGATSGNSRMKLPGLPPARVFDHSIPLLPGAKPVNLRPYXYNPAQKDEIERQVADMLQQGIIQPSSSPFSSPVLLVLKKDLTWRFCIDYRHLNAITVKNRYPLPIIDELLDELAGSCLFTSFDLRAGYHQIRMRPEDEHKTAFKTHNGHYEFRVMSYGLTSAPATFQVLMNQILAPLLRKGVLVFTDDILIYSQNLDDHVALLRRVFQLLTDHQLKVKRSKCSFARASLPYLGHVISAEGVATDSKNIQAVHNWAVPCNVKEVRGFLGLAGYYRKFVHSFGIISRPLTDLLKKNVVFVWTSEHQASFDALKEALVSAPVLALPDFSKVFEIETDASDKGVGAVLMQAGHPLAFLSKSLGPRNQGLSTYEKECLAILLAVEQXRSYLQFGEFIIRTDQRSLIHLDDQRLVTPWQQRALTKLLGLQYRIVYKKGLENKAADALSRNQSTDVFQLSAVSSCIPVWLADVQLGYAGSSILSTVDXTLVXVLRRSLSTDQNGIIYHKGRIWLGNNVELQTKVLTALHNAAIGGHSGTQATFSRVNKLFAWPGLRKAVRQFVSACSICKQAKAERVRYPGFLQPLPVPEHAWQTVSLDFIEGLPSSSGFDCILVVVDKFSKYAHFVALAHPFTAFDVALAYLNNVYKMHGLPQHLISDRDRIFTSALWKELFQLADTQLQMSSAYHPQTDGQTERVNQCLETFLRCFVHACPKRWYRWLALAEFWYNTAFHSALDKSPFEVLYGHSPRHFGVFDRFECAVPDLQDWLKEREVITSLPRQHLLRAQQSMKLQADKKRSDREFAVGDWVFLKAQPHAQFSMTGRSNHKLAFRYFGPFQILARIGSVAYRLQLPTTCAIHPVVHVSQLRQASSPAPDSSIQDLPALTEDEALPVQILARRAVKKGAGAVEQLKIRWSGQTSAEATWEDGAALRARFPEAPAWG

SEQ ID NO: 20561 - protein, 1474 aa, Oryza sativa
  Clone ID: TF_OSC401051j.C1.p12.np
MVNTRTGSGSGSGSGATNNGGEPTLAQILAQQTQLINLLVQQAQNQQANNQNQNPPPPPQNKLADFLRVRPPTFSSTTNPVEAGDWLHAVEKKLDLIQCTEQEKVSFASHQLHGPAAEWWDHFRQGRAGGEPITWQEFTAAFKKTHIPSGVVALKKREFRALNQGSRSVTEYLHDFNRLARYAPEDVRTDEERQEKFLEGLNDELSYALMATDFRDFQQLVDKAIRQEDNNQRPRLITGPQAPSNQRPRLITGPQAPSYPQGGSSSVARPQRQFYNNNTSNRGNDNRNMVACPAATPVQNQPVRKEQGSKPVICFNCGDPGHYADKCPKPRRVKNAPVPNNPNVPAPKARVNHVAAAEAQNAPDVVLGTFPVNSIPATVLFDSGATHSFLSKSFASKHGMEVVSLGRPLLVNTPGNQVFSTQYCPSVTIEIEEVPFPSSLILLESKDLDVILGMDWLSRHRGVIDCANRKVTLTNSNGETVSFFASSPKSHGVVLNQVALQEIPIVQDYPDVFPEDLPGMPPKRDIEFRIDLVPGTNPIHKRPYRMAANELAEVKKQVDDLLQKGYIRPSTSPWGAPVIFVEKKDHTQRMCVDYRALNEVTIKNKYPLPRIDDLFDQLEGATVFSKIDLHSGYHQLRIREEDIPKTAFTTRYGLFECTVMSFGLTNAPAFFMNLMNKVFMEYLDKFVVVFIDDILIYSKTKEEHEEHLRLALEKLREHQLYAKFSKCEFWLSEVKFLGHVISSGGVAVDPSNVESVLSWKQPKTVSEIRSFLGLAGYYRRFIENFSKIARPMTRLLQKEVKYKWTEDCERSFQELKKRLVTAPVLILPDTRKGFQVYCDASRLGLGCVLMQEGKVVAYASRQLRPHENNYPTHDLELAAVVHALKIWRHYLFGNRTEIYTDHKSLKYIFTQPDLNMRQRRWLELIKDYDMEIHYHPGKANVVADALSRKSYCNMSEGRRLPWELCQEFELNLGIVSQGLVATLEAKPTLFDQIREAQVNDPDIQEIKKNMRRGKAIGFVEDEQGTVWLGERICVPDNKELKDTIMKEAHETLYSIHPGNTKMYQDLKQQFWWASMRREIAEYVALCDVCQRVKAEHRKPAGLLQPLKIPEWKWEEIGMDFITGLHRTSAGHDSIWVVVDRLTKVAHFIPVKTTYTGHKLAELYMARVVCLHGVPKKIVSDRGSQFTSKFWQKLQLELGTRLNFSTAYHPQTDGQTERVNQILEDMLRACVLDFGGSWDKNLPYAEFSYNNSYQASLQMAPYEALYGRKCRTPLLWDQTGERQVFGTDILRQAEEKVKIIQERLRVAQSRQKSYADNRRRDLAFEEGDYVYLRVTPLRGVHRFQTKGKLAPRFVGPFKIVSRRGEVAYQLELPPSMAGIHDVFHVSQLKKCLRVPTEEADPDRIELQEDLTYVEKPVRILEESERKTRNRVIRFCKVQWSNHSEEEATWEREDELKSAHPHLFASSSESRGRDSV

SEQ ID NO: 20562 - protein, 1646 aa, Oryza sativa
  unsure (1)..(1646): unsure at all Xaa locations
  Clone ID: TF_OSC401235j.C1.p43.np
MTSWYQSHLDLRISQMMPPHSLRNLIKVLGFVRELRLMAFEVGYEVAPEYRQISHDPDEEKCRVRVTLASDSEDLPSFKFEAGGRSYCHACQEAALVAIGELREHFEEELDSSAFQYHPHKPHGQDYGIYTCPDGEESATLMHAVHMLSAMDAVSVERDKAAHDRENWNRGKICKLESKVYRLQKELAELKGETPPPTPKLRLTPRKRICPPPRLQLASKIHVMGEAVPDRAEPVIDIISDEEEEEDPEEREPATPEEEDSSLRSDARRTTNPVEAGDWLHAVEKNLDLIQCTEQEKVSFASHQLHRPAAEWWDHFRQGRAEGEPITWQEFMAAFKKTHIPTGVVALKKREFRALNQGSRSVTEYLHDFNRLARYAPEDVRTDEERQEKFLEGLNDELSYALMSTDFRDFQQLVDKAIRQEDKYNRMEQKKHRAAQFKAQQGSNQRPRLVTGPQAPPYPQGGSSSVVCPQRQFYNNNTGNRGNDNRNTVARPAATPAQNQPVRKEQGSKPVICFNCGDPGHYADKCPKPRRVKNAPTPNNSNVPAPKARVNHVAAAEAQNAPDVVLGTFPVNSIPATVLFDSGATHSFLSKSFASNHGMEVISLGRPLLVNTPGNQVFSTQYCPSATIEIEEVPFPSSLILLESKDLDVILGMDWLSRHRGVIDCANRKVTLTSSNGETVSFFVSSPKYHGVILNQVALQEIPIVQDYPDVFPEDLPGMPPKRDIEFRIDLVPGTNPIHKRPYRMAANELAEVKRQVDDLLQKGYIRPSTSPWGAPVIFVEKKDHTQRMCVDYRALNEVTIKNKYPLPRIDDLFDQLEGATVFSKIDLRSGYHQLRIREEDIPKTAFTTRYGLFECTVMSFGLTNAPAFFMNLMNKVFMEYLDKFVVVFIDDILIYSKTKEEHEEHLRLALEKLREHXLYAKFSKCEFWLSEVKFLGHVISCGGVAVDPSNVESVLSWKQPKTVSEIRSFLGLAGYYCRFIENFSKIARPMTRLLQKEVKYKWTEDCERSFQELKKRLVTAPVLILPDSRKGFQVYCDASRLGLGCVLMQEGKVVAYASRQLRPHENNYPTHDLELAAVVHALKIWRHYLFGNRTEMYTDHKSLKYIFTQPDLNMRQRRWLELIKDYDMEIHYHPGKANVVADALSRKSYCNMSEGRHLPWELCQEFERLNLGIVSKGFVAALEAQPTLFDQVREAQVNDPDIQEIKKNMRRGKAIGFVEDEQGTVWLGERICVPENKELKDTIMKEAHETLYSIHPRSTKMYQDLKQQFWWASMRREIAEYVALCDVCQRVKAEHQKPAGLLQPLKIPEWKWEEIGMDFITGLPRTSAGHDSIWVVVDRLTKVAHFIPVKTTYTGNKLAELYMARVVCLHGVPKKIVSDRGSQFTSKFWQKLQLELGTRLNFSTAYHPQTDGQTERVNQILEDMLRACVLDFGGSWDKNLPYAEFSYNNSYQASLQMAPYEALYGRKCRTPLLWDQTGERQVFGTDILRQAEEKVKIIQXRLHVAQSRQKSYADNRRRDLAFEEGDYVYLRVTPLRGVHRFQTKGKLAPRFVGPFKIVSRRGEVAYQLELSPRRGEVAYQLELSPSMAGIHDVFHVSQLKKCLCVPTEEADPDRIELQEDLTYVEKPVRILEFPTFRRRAFPLRK

SEQ ID NO: 20563 - protein, 1630 aa, Oryza sativa
  unsure (1)..(1630): unsure at all Xaa locations
  Clone ID: TF_OSC401235j.C1.p75.np
KVGCEHMVLMVVLMTIKDRFASYCCETFIVPTTSQRGQRLYLLYSMIHYSAPDXEVARSPWGSLGSPCLVLKGVIMIQVRCTVVNCVMRGVLSLLLSEMPRHSPRNLIEVLGFVRELRLMAFEVGYEVAPEYRQIPHDPDEEKCRVRVTLASDSEDLPSFKFEAGGRSYCHACQEVALVAIGELRQHFEEELDSSAFQYHPHKPHGQDYGTYICPDGEESATLMHAVHMLSAMDAVSVERDKAAHDRENWNRGKICKLESKVYRLQKELAELKGEMPPPTPKLRLVARKRTCPPPRLQLASKIRVMGEAVPDRAEPVIDIISDEEEEEDPEEREPATPEEEDSSLRSDARWKAGGEPITWQEFTAAFKKTHIPSGVVALKKREFRALNQGSRSVTEYLHDFNRLARYAPEDVRTDEERQEKFLEGLNDKLSYALMSTDFQDFQQLVDKAIRQEDKYNRMEQKKRRAAQFKAQQGSNQRPRLVTGPQVPSYPQGGSSSVVRPQRQFYNNNTGNRGNDNRNVVARPAATPVQNQPVRREQGSKPVICFNCGDPGHYADKCPKPRRVKNAPAPNNFNVPAPKARVNHVAAAEAQNAPDVVLGTFPVNSIPATVLFDSGATHSFLCKSFAIKHGMEVVSLGRPLLVNTPGNQAFSTRYCPSVTIEIEEVPFPSSLILLESKDLDVILGMDWLSRHRGVIDCANRKVTLTSSNGETVSFFASSPKSHGEVLNQVALQEIPIVQDYPDVFPEDLPGMPPKRDIEFRIDLVPGTNPIHKRPYRMAANELAEVKKQVDDLIQKGYIRPSTSPWGAPVIFVEKKDHTQRMCVDYRALNEVTIKNKYPLPRIDDLFDQLEGATVFSKIDLRSGYHQLRIREEDIPKTAFTTRYGLFECTVMSFGLTNAPAFFMNLMNKVFMEYLDKFVVVFIDDILIYSKTKEEHEEHLRLALEKLREHQLYAKFSKCEFWLSEVKFLGHVISSGGVAVDPSNVESVLSWKQPKTVSEIRSFLGLAGYYRRFVENFSKIARPMTRLLQKDVKQLRPHENNYPTHDLELAAVVHALKIWRHYLFGNRTEIYTDHKSLKYIFTQPDLNMRQRRWLELIKDYDMEIHYHPGKANVVADALSRKSYCNMSEARCLPWELCQEFERLNLGIVSKGFVATLEAKPTLFDQIREAQMNDPDIQEIKKNMRRGKAIGFVEDEQGTVWLGERICVPENKELKNTIMKEAHETLYSIHPGSTKMYQDLKLQFWWASMRREIAEYVALCDVCQRVKAEHQKPAGLLQPLKIPEWKWEEIGMDFITGLPRTSAGHDSIWVVVDRLTKVAHFIPIKTTYTGHKLAELYMARVVCLQGVPKKIVSDRGSQFTSMFWQKLQSELGTRLNFSTAYHPQTDGQTERVNQILEDMLRACVLDFGGSWDKNLPYAEFSYNNSYQASLQMSPNEALYGRKCCTPLLWDQTGERQVFGTDILREAEEKVKIIQERLRVAQSRQKSYADNRRRDLAFEEGDYVYLRVTPLRGVHRFXTKGKLAPRFVGPFKIVSRRGEVAYQLELPPSMAGIHDVFHVSQLKKCLRVPTEEADPGRIELQEDLTYVEKPVRILEFPTFRRRAFPLRKVPKHLWKPKASHTDPKQPFEHVDPV

SEQ ID NO: 20564 - protein, 1778 aa, Oryza sativa
  Clone ID: TF_OSC401235j.C1.p76.fg
MGVAGESMPCFKGGDYDPGTVHCSELCYARGIVTTPFRGIVVVLRHMMPRHSPRNLIEVLGFVRELRLMAFEVGYEVAPEYRQIPHDPDEEKCRVRVTLASDSEDLPSFKFEAGGRSYCHACQEVALVAIGELRQHFEEELDSSAFQYHPHKPHGQDYGTYTCPDGEESATLVHVVHMLSAMDAVSVERDKAAHDRENWNRGKICKLKSKVHRLQKELAELKGEMPPPTSKLRLTARKRTCPPPRLQLASKIRAMGDAVPVRAEPVIDIISDEEEEEDPEEREPATPEEEDSSLRSDASCCLHHGWDMVNTRTGTGSGSGSGANNNEGEPTLAQILAQQTQLINLLVQQAQNQQGNNQNQNPPPPPQNKLADFLRVRPPTFSSTTNPVEAGDWLHAVEKKLDLIQCTEQEKVSFASHQLHGPAAEWWDHFRQGRAGGEPITWQEFTAAFKKTHIPSGVVALKKREFRALNQGSRSVTKYLHDFNRLACYAPEDVCTDEERQEKFLEGLNDELSYALMSTDFRDFQQLVDKAIRQEDKAAQFKAQQGSNQRPRLVTGPQVPSYPQGGSSSVVRPQRQFYNNNTGNRGNDNRNVVARPAATPVQNQPVRREQGSKPVICFNCGDPGHYADKCPKPRRVKNAPAPNNFNVPAPKARVNHVAAAEAQNAPDVVLGTFPVNSIPATVLFDSGATHSFLSKSFAIKHGMEVVSLGRPLLVNTPGNQAFSTRYCPSVTIEIEEVPFPSSLILLESKDLDVILGMDWLSRHRGVIDCANRKVTLTSSNGETVSFFASSPKSHGEVLNQVALQEIPIVQDYPDVFPEDLPGMPPKRDIEFRIDLVPGTNPIHKRPYRMAANELAEVKKQVDDLLQKGYIRPSTSPWGAPVIFVEKKDHTQRMCVDYRALNEVTIKNKYPLPRIDDLFDQLEGATVFSKIDLRSGYHQLRIREEDIPKTAFTTRYGLFECTVMSFGLTNAPAFFMNLMNKVFMEYLDKFVVVFIDDILIYSKTKEEHEEHLRLALEKLREHQLYAKFSKCEFWLSEVKFLGHVISSGGVAVDPSNVESVLSWKQPKTVSEIRSFLGLAGYYRRFIENFSKIARPMTRLLQKDVKYKWTEDCEQSFQELKKRLVTAPVLILPDSRKGFQVYCDASRHGLGCVLMQEGKVVAYASRQLCPHENNYPTHDLELAAVVHALKIWRHYLFGNRTEIYTDHKSLKYIFTQPDLNMRQRRWLELIKDYDMEIHYHPGKANVVADALSRKSYCNMSEGRCLPWELCQEFERLNLGIVSKGFVATLEAKPTLFDQIREAQMNDPDIQEIKKNMRRGKAIGFVEDEQGTVWLGERICVPENKELKNTIMKEAHETLYSIHPGSTKMYQDLKLQFWWASMRREIAEYVALCDVCQRVKAEHQKPAGLLQPLKIPEWKWEEIGMDFITGLPRTSAGHDSIWVVVDRLTKVAQFIPIKTTYTGHKLAELYMARVVCLHGVPKKIVSDRGSQFTSKFWQKLQSELGTRLNFSTAYHPQTDGQTERVNQILEDMLRACVLDFGGSWDKNLPYAEFSYNNSYQASLQMSPNEALYGRKCRTPLLWDQTGERQVFGTDILREAEEKMKIIQERLRVAQSRQKSYADNRRRDLAFEEGDYVYLRVTPLRGVHRFQTKGKLAPRFVGPFKIVSRRGEVAYQLELPPSMAGIHDVFHVSQLKKCLRVPTEEADPGRIELQEDLTYVEKPVRILEVSERNTRNRVIRFCKVQWSNHSEEESTWEREDELKSAHPHLFSSSSESRGRDSV

SEQ ID NO: 20565 - protein, 1691 aa, Oryza sativa
  Clone ID: TF_OSC401235j.C1.p80.fg
MGVAGESMPCFKGGDYDPGKVHCGELCYARDIVTIPFRDTVVVLRHMMPHRSPRNLIKVLGFVRELRLMAFEVGYEVAPEYRQIPHDPDEEKCRVRATLASDSEDLPSFKFEAGGRSYSHACQEVALVAIGELRQHFEEELDSSAFQYHPHKPHGQDYGSYTCPDGEESATLMHVVHMLNAMDTVGVEREKAAHDRENWNRDKICKLKSKVNRLQKELAELKGETPPPTSKLRLTARKRTCLPPRLQLASKIRVMGEAVPDRAEPVIDIISDEEEEEDPEEREPATPEEEDSSLRSDARRNYTTNPVEAGDWLHAVEKKLDLIQCTEQEKVSFASHQLHGPAAEWWDHFRQGRAGGEPITWQEFTAAFKKTHIPTGVVALKKREFRALNQGSRSVTEYLHDFNRLARYAPEDVHTDEERQEKFLEGLNDELSYTLMSTEFRDFQQLVDKAIRQEDKYNRMEQKKRRAAQFKAQQGSNQRPRLIPGPQVPSYPQGGSSSVVRPQRQFYNNNTGNRGNENRNVVARPAATPVQNQPVRKEQGSKPVICFNCGDPGHYADKCPKPRHVKNVPVPNNSNVPAPKARVNHVAAAEAQNAPDVVLGTFPVNSIPATVLFDSGATHSFLSKSFATKHGMEVVSLGRPLLVNTPGNQVFSTRYCPSVTIEIEGVPFPSSLILLESKDLDVILGMDWLSRHRGVIDCANRKVTLTNSNGETVSFFASSPKSHGVVLNQVALQEIPIVQDYPDVFPEDLPGMPPKRDIEFRIDLVPGTNPIHKRPYRMAANELAEVKKQVDDLLQKGYIRPSTSPWGAPVIFVEKKDHTQRMCVDYRALNEVTIKNKYPLPRIDDLFDQLKGATVFSKIDLRSGYHQLRIREEDIPKTAFTTRYGLFECTVMSFGLTNAPAFFMNLMNKVFMEYLDKFVVVFIDDILIYSKTKEEHKEHLRLALEKLREHQLYAKFSKCEFWLSEVKFLGHVISSGGVAVDPSNVESVLSWKQPKTVSEVRSFLGLAGYYRRFIENFSKIARPMTRLLQKEVKYKWTEDCEQSFQELKKRLVTAPVLILPDSRKGFQVYCDASRLGLGCVLMQEGKVVAYASRQLRPHENNYPTHDLELAAVVHALKIWRHYLYGNRTEVYTDHKSLKYIFTQPDLNMRQRRWLELIKDYDMEIHYHPGKANVVADALSRKSYCNMSEGRCLPWELCQEFEKLNLGIVSKGFVAALEAKPTLFDQIREAQVNDPYIQEIKKNMRRGKAIGFVEDEQGTVWLGERICVPENKELKDTIMKEAHETLYSIHPGSTKMYQDLKQQFWWASMRREIAEYVALCDVCQRVKAEHQKPAGLLQPLKIPEWKWEEIGMDFITGLPRTSAGHDSIWVVVDRLTKVAHFIPVKTTYTGHKLAELYMARVVCLHGVPKKIVSDRGSQFTSKFWQKLQSELGTRLNFSTAYHPQTDGQTERVNQILEDMLRACVLDFGGSWDKNLPYAEFSYNNSYQASLQMSPNEALYGRKCRTPLLWDQTGERQVFGTDILREAEEKVKIIQERLRVAQSCQKSYADNRRRDLVFEEGDYVYLRVTPLRGVHRFQTKGKLAPRFVGPFKIVSRRGEVAYQLELPPSMAGIHDVFHVSQLKKCLRVPTEEADPDCIELQEDLTYVEKPVRILEFPTFRRRAFPLRKVPKRLWKLKASHTDPKQPFEHVDPV

SEQ ID NO: 20566 - protein, 1244 aa, Oryza sativa
  Clone ID: TF_OSC401468j.C1.p1.fg
MEIPGVTSWYQSHLDLRISQMMPPHSPRNLIEVLGFVRELRLMAFEVGYEVAPEYRQISHDPDEEKCRVRVTLASDSEDLPSFKFEVGGRSYCHACQEVALVAIGELRQHFEEELDSSAFQYHPHKAHGQDYGTYTCPDGEESATLMHVVHMLSAMDAVSVERDKAAHDRENWNQGKICKLKSKVHRLQKELAELKGETPPPISKLRLTARKRTCPPPRLQLASKIRVMGEAMPNRAEPVIDIISDEEEEEDHKEREPATPEEEDSSFRSDARRNCCLHHWWDMVNTRTGSGSGSGSGATNNGGEPTLAQILAQQTQLINLLVQQAQNQQANNQNQNPPPPPQNKLADFLRVRPPTFSSTTNPVEAGDWLHAVEKKLDLIQCTEQEKVSFASHQLHGPAAEWWDHFRQGRAGGEPITWQEFTAAFKKTHIPSGVVALKKREFRALNQGSRSVTEYLHDFNRLARYAPEDVRTDEERQEKFLEGLNDELSYALMATDFRDFQQLVDKAIRQEDKYNRIEQKKRRAAQFKAQQGSNQRPRLITGPQAPSYPQGGSSSVARPQRQFYNNNTSNRGNDNRNMVACPAATPVQNQPVRKEQGSKPVICFNCGDPGHYADKCPKPRRVKNAPVPNNPNVPAPKARVNHVAAAEAQNAPDVVLGTFPVNSIPATVLFDSGATHSFLSKSFASKHGMEVVSLGRPLLVNTPGNQVFSTQYCPSVTIEIEEVPFPSSLILLESKDLDVILGMDWLSRHRGVIDCANRKVTLTNSNGETVSFFASSPKSHGVVLNQVALQEIPIVQDYPDVFPEDLPGMPPKRDIEFRIDLVPGTNPIHKRPYRMAANELAEVKKQVDDLLQKGYIRPSTSPWGAPVIFVEKKDHTQRMCVDYRALNEVTIKNKYPLPRIDDLFDQLEGATVFSKIDLHSGYHQLRIREEDIPKTAFTTRYGLFECTVMSFGLTNAPAFFMNLMNKVFMEYLDKFVVVFIDDILIYSKTKEEHEEHLRLALEKLREHQLYAKFSKCEFWLSEVKFLGHVISSGGVAVDPSNVESVLSWKQPKTVSEIRSFLGLAGYYRRFIENFSKIARPMTRLLQKEVKYKWTEDCERSFQELKKRLVTAPVLILPDTRKGFQVYCDASRLGLGCVLMQEGKVVAYASRQLRPHENNYPTHDLELAAVVHALKIWRHYLFGNRTEIYTDHKSLKYIFTQPDLNMRQRRWLELIKDYDMEIHYHPGKANVVADALSRMSRPAIH

SEQ ID NO: 20567 - protein, 1710 aa, Oryza sativa
  Clone ID: TF_OSC401768j.C1.p3.fg
MADSDSPATWELSLPQSEGYVIELHRMLRRLRYPGFPSYRVRQCGSVWEARVEIHPRVPSELDYSFQTRHHRDLPETAMQDAAREAFLRLSSIHRAELVSTEFAHHLFREEGNSVCTVQDTPCCYNPMVTRLSRWAEAVDDYYEEALLEIDDHQRRVGELETEVTDLTAQQLQLEEEHQAWGSEIDSLKAQLQVHGDQFQQLSDQYNDHRGMMDTLEEQLRESQEHVSQLEEQLRAAKISTTGASTSTAVGRDRYFFLTPPYPPAFHALLGEASMLATESAPYLVDPTATQPPVPELVHTPLIPTPSPQLGSSLETPIQVDSETEGTDTEPEIEPDITDPSEDEAPVPRITFLGGPRTLSTARKSTRPPGKRPKPDPEATTSGPWGLSNDETQTPDLNTLAGVMATQTQLLQAIANNQGNRGGSSFGEFMRTKPPTFATADEPMEAKDWLRIIEKKLTLVRVREADKVIFAVNQLERPAGDWWDTYKEAREDGAGEPTWEEFTAAFRENFVPAAVMRMKKNEFRRLRQGNTTVQEYLNKFTQLARYAIGDLADEEEKIDKFIEGLNDELRGPMIGQDHESFQSLINKVVRLENDQRTVEHNRKRRLAMSHPPQTVPQRLKGAPPSGWKPPVMVTNRPAALSNFNRPVALQNRTPTPTLAAPGAKKNVDCFNCGEYGHYANNCPHPRKTPVRTGANAMTVRGTTTPAIGRGLFKTPQSNRTATGFGRGQVNHVRAEEAQEDQGVLMGMFSINSTPVKVLFDSGASHSFISLKASQKHNLTLVGLRKPMIVHSPGGEITMSHACIDVPIRLRDVVFPSNLMVLIPQTLDVILGMDWLAKHRGVIDCRRREVTLTTPWGSDMRATMDQEPRLTERAGGIFTMLPLKGMPVVQRFPDVFPEDLPGMPPDRDVEFIIDLIPGTAPISKRPYRMPVNELEELKRQIRELQEKGFVRPSSSPWGAPVLFVKKKDGSMRMCVDYRSLNEVTIKNKYPLPRIDDLFDQLKGAKIRTEDIPKTAFSTRYGLYEFTVMSFGLTNAPAYFMNLMNKVFMDYLDKFVVVFIDDILIYSKDEEEHAEHLRLVLQKLRKHKLYAKFSKCEFWLKEVAFLGHVISAGGVAVDPAKVEAVTEWKAPKSVTEIRSFLGLAGYYRRFIEGFSKIARPMTQLLKKKKKFVWSEQCQESFEQLKEKLTSAPILVLPDIRKDFVIYCDASRQGLGGVLMQDRKVVAYASRQLRPHEENYPTHDLELAAVVHALKIWRHYLIGNHCDIYTDHKSLKYIFTQSDLNLRQRRWLELIKDYDLEVHYHPGKANVVADALSRKSHCNHLRMEGMVPELREEIAQLNLHIVPRGQINTLDIQPLLRTQIEEAQKDNEEVRELKERLAAGRAKEFSTDEKDVLWYKKRIYVPEQGGLRGLILKEAHESAYSLHPGSTKMYQDLKEGYWWPNMKRDVAEYVALCDVCQKVKAEHQRPAGLLQPLRIPEWKWDEIGMDFIVGLPKTATGYDSIWVIVDRLTKTARFIPVKTNYSSAKLAELYMTRIVCLHGVPKKIISDRGTQFTSHFWEKVHEALGSYLAFSTAYHPQTDGQTERTNQVLEDMLRACALDFSKDWERCLPYAEFSYNNSFQASLKMSPNEALFGRRCRTPLMWSETGERAVFGPDIIQEAEEKVRLIRDRLKVAQSRQKSYADTRRRNLEFKEGDYVYLKVSPMRGNKKV

SEQ ID NO: 20568 - protein, 329 aa, Oryza sativa
  Clone ID: TF_OSC401836j.C1.p3.gm
MDLLLNGGIIFAKAGLKESLLRGRSSRPLSRRRTYQREKFLEGLNDELSYALMSTDFRDFQQLVDKAIRQEDKYNRMEQKKRRAAQFKAQQGSNQRPRLVTGPQAPSYPQVGSSSVVRPQRQFYNNNTGNRGNDNRNMVARPAATSAQNQPVRKEQGSKPVICFNCGDPGHYADKCPKPRRVKNAPAPNNSNVPVPKARVNHVAAVEAQNAPDVVLAFFMNLMNKVFMEYLDKFVVVFIDDILIYSKTKEEHEEHLRLALEKLREHQLYAKFSKSAARLDGDGGAPVVGGEGERAAEIPLTTAHLTAATANGGDGGGDGAAQLEIAGDG

SEQ ID NO: 20569 - protein, 763 aa, Oryza sativa
  unsure (1)..(763): unsure at all Xaa locations
  Clone ID: TF_OSC420873j.C1.p1.np
KVGCEHMVLMVVLMTIKDRFASYCCETFIVPTTSQRGQRLYLLYSVIHYSAPDXEVARSPWGSLGSPCLVLKGVIMIQERSTVMGYVVRGVLSRLLSEMPPHSPRNLIEVLGFVRELRLMAFEVGYEVAPEYRQISHDPDEEKCRVRVTLASDREDLPSIKFEAGGRSYCHACQEAALVAIGELRQRFEEELDSSAFQYHPHKPHGQDYGTYICPDGEESATLMHVVHMLSAMDAVSVERDKAAHDRENWNRGKICKLESKVYRLQKELAELKGETPPPTPKLRLVARKRTCPPPRLQLASKIRVMGEAVPDRAEPVIDIISDEEEEEDPEEREPATPEEEDPSLRSDARRRAEGELITWQEFTTAFKKTHIPSGVVALKKREFRALNQGSRSVTEYLHDVNRLARYAPEDVRTDEERQEKFLEGLNDELSYALMSTDFRDFQQLVDKAIRQEDKYNRMEQKKRRAAQFKAQQGSNQRPRLVTGPQAPSYPQGGSSSVVRPQRQFYNNNTGNRGNDNRNMVARPAATPAQNQPVRKEQGSKPVICFNCGDPGHYADKCPKPRHVKNAPAPNNSNVLAPKARVNHVAAAEAQNAPDVVLGTFPVNSIATVLFDSGATHSFLSKSFASKHGMEVVSLGRPLLVNTPGNQVFSTXYCPSVTIEIEEVLFPSSLILLESKDLDVILGMDWLSRHRGVIDCANRKVTLTSSNWETVSFFVSSPKYHGVNLNQVALQEIPIVQDYPDVFPEDLPGMPPKRDIEFRIDLV

SEQ ID NO: 20570 - protein, 1776 aa, Oryza sativa
  Clone ID: TF_OSC900401j.C1.p12.fg
MADSDSPATWELSLPQSEGYVIELHRMLRRLRYPGFPSYRVRQCGSVWEARVEIHPRVPSELDYSFQTRHHRDLPETAMQDAAREAFLRLSSIHRAELASTEFAHHPFREEGNSVCTVQDTPCCYNPMVTRLSRWAEAVDDYYEEALLEIDDHQRRVGELETEVTDLTAQQLQLEEEHQAWGSEIDSLKAQLQVHGDQFQQLSDQYNDRRGMMDTLEEQLRESQEHVSQLEEQLRAAKISTTGASTSTAVGRDRYFFLTPPYPPAFHALLGEASMLATESAPYLVDPTATQPPVPELVHTPLIPTPSPQLGSNLETPIQVDSETEGTDTEPEIEPDITDPSEDEAPVPCITFLGGPRTLSTARKSTRPPGKRPKPDPEATTSEPWGLRLFMMASRRRATTSNDETQTPDLNALAGIMATQTQLLQAIASNQGNRGGSSFGEFMRTKPPTFATADEPMEAEDWLRIIEKKLTLVRVREADKVIFAVNQLEGPAGDWWDTYKGAREDGAGEPTWEEFTAAFRENFVPAAVMRMKKNEFRRLRQGNTTVQEYLNKFTQLARYAIGDLADEEEKIDKFIEGLNDELRGPMIGQDHESFQSLINKVVRLENDQRTVEHNRKRRLAMSRPPQTVPQRLKEATPSGWKPPVMVTNRPAALSNFNRPVALQNRTPTPTLAAPGAKKNVDCFNCGEYGHYANNCPHPRKTPVRTGANAMTVRSTTTPAVGRGLFKTPQSNRTTTGFGRGQVNHVRAEEAQEDQGVLMGMFSINSTPVKVLFDSGASHSFISLKASQKHNLTLVGLRKPMIVHSPGGEITVSHACIDVPIRLRDVVFPSNLMVLIPQTLDVILGMDWLAKHRGVIDCRRREVTLTTPWGSDMRATMDQDPRLTERAGGIFTMLPLKGMPVVQRFPDVFPEDLPGMPPDRDIEFIIDLIPGTAPISKRPYRMPVNELEELKKQIKELQEKGFVRPSSSPWGAPVLFVKKKDGSMRMCVDYRSLNEVTIKNKYPLPRIDDLFDQLKGAKVFSKIDLRSGYHQLKIRTEDIPKTAFSTRYGLYEFTVMSFGLTNAPAYFMNLMNKVFMDYLDKFVVVFIDDILIYSKDEEEHAEHLRLVFQKLRKHKLYAKFSKCEFWLKEVAFLGHVISAGGVAVDPAKVEAVTEWKAPKSVTEIRSFLGLAGYYRRFIEGFSKIARPMTQLLKKEKKFVWSEQCQESFEQLKEKLTSAPILVLPDIRKDFVIYCDASRQGLGGVLMQDGKVVAYASRQLRPHEENYPTHDLELAAVVHALKIWRHYLIGNHCDIYTDHKSLKYIFTQSDLNLRQRRWLELIKDYDLEVHYHPGKANVVADALSRKSHCNHLRMEGMVPKLREEIAQLNLHIVPRGQINTLDIQPLLRTQIEEVQKDNKEVREKVKAEHQRPAGLLQPLRIPEWKWDEIGMDFIVGLPKTATGYDSIWVIVDRLTKTARFIPVKTNYSSAKLAELYMTRIVCLHGIPKRIISDRGTQFTSHFWEKVHEALGSYLAFSTAYHPQTDGQTERTNQILEDMLRACALDFSKDWERCLPYAEFSYNNSFQASLKMSPNEALFGRRCRTPLMWSETGERAVFGPDIIQEAEEKVRLIRDRLKVAQSRQKNYADTRRRDLEFKEGDYVYLKVSPMRGTKRFKVKGKLAPRYVGPFQIIARRGEVAYQLQLPENIADVHPVFHVSQLKKCLRVPEEQAPLEEIHISNDLTYPEHPIRILDEAEKRTRSKVWRMYKVQWSNHTEDEATWESEEFLRTEYPHLFENR

SEQ ID NO: 20571 - protein, 523 aa, Oryza sativa
  Clone ID: TF_OSC19735j.C1.p1.fg
MADNEKGNKVRSQDIGTSSSRVNEAPDTSCVAVVQHLINQNKLLIEILQQHRMPILNPSQIQPQVQLEAVQALTPQVSAPPTSQKAPHAMPHVDPKEASIICFMCDEQGHYARNCPQQKRKAPMRTEDEVRKMIITSTEWPPPGMTKCQRRNSSRGAQQLTEHLLANGGRVSGSEDSDQVSSDDEDEKSPQGFNQNKIELKACSRCGEIGHVASSCATTCVHCEEDHPPDRSHVPAGMITLRKREFRYLKQEDLTVTEYLHEFHRLAHYAPEDVENDEDKQEKYLQGLKDEITVQLLLEEYEDFEKLVDKAIQLESEHNRMKNCKRRIVSIPVFPCGNQRQRTEPLQITGSSVAHQEFPPQEDGHNADNNISNTNDDDTTNNHASCPISDHSNQACNVNIIHQGVDDSINDGTQNDNPSNCDSEKDSNGDSNYGTTDANVSKDFQPPIPTPSQNDRPQTDSSAKKTLICYNCKGPGHYSRDCLQPRQSRSPHYRQFTRSRHPNRIVVTGANAVPVRPRVNQNP

SEQ ID NO: 20572 - protein, 364 aa, Oryza sativa
  unsure (1)..(364): unsure at all Xaa locations
  Clone ID: TF_OSC25205j.C1.p1.np
VKWQRVGALLLGSVLPACPGGSGRRGIGSVLLSMARMGWKLCHVFRLYTVVVFSRSRQAGIRAISTVGXAKWIKPKVINKTICESSFFLLPLMLFAKGLPLLPSSDFNXYXMVRSVKKKTSSVVCPPEDCRICERSQESGHWYLKLPVNEAQDTSCAAVVQHLINQNKLLIEILQPSDANFEPESEGPSCHATCXPGPSCHATCXPKRSKYHLFMCDEQGHYARNCPQQKRKAPMRTEGEVRKMIITSTEWPPPGMTRRQRRNTFRGAPQLTEHLLANGGRVSDSEDSDQVSSEDEDEKSPQGFNQDKMERKACSRCGEIGHVASSCASTCVHCEEDHPPDRCPTSRITCLFCEGTDHVPKCQF

SEQ ID NO: 20573 - protein, 212 aa, Oryza sativa
  Clone ID: TF_OSC11782j.C1.p1.fg
FPNDLCNNCKRPGHFARDCPNVALCHACGLPGHIAAECSSKDLCWNCKEPGHMANSCPNEGICRNCGKSGHIARECSAPPMLPGEMRLCSNCYKPGHLAAECTNEKACNNCRKSGHLARNCPNEPVCNLCNVSGHLARECPKSDAINERGGPPPFRGGYSDVVCRACNQVGHMSRDCMAGAFMICHNCGGRGHMAYECPSGRLMDRFPPRRF

SEQ ID NO: 20574 - protein, 247 aa, Oryza sativa
  Clone ID: TF_OSC400622j.C1.p112.fg
MSSRSPPPKDRRIRTERTSYRDAPYRRDSRRGPSRFPNDLCNNCKRPGHFARDCPNVALCHACGLPGHIAAECSSKDLCWNCKEPGHMANSCPNEGICRNCGKSGHIARECSAPPMLPGEMRLCSNCYKPGHLAAECTNEKACNNCRKSGHLARNCPNEPVCNLCNVSGHLARECPKSDAINERGGPPPFRGGYSDVVCRACNQVGHMSRDCMAGAFMICHNCGGRGHMAYECPSGRLMDRFPPRRF

SEQ ID NO: 20575 - protein, 320 aa, Oryza sativa
  Clone ID: TF_OSC5579j.C1.p1.gm
EENESETQKLPEYSTSDSEDFWEEELFPELIKPLPDDGGMRLKNTFEEEFAEDTWCKLSKKVALNTSQSVVSLASFKDYSIPLAGVHQRSGEQVSGTSAFDVLHREKAAIRHCDFTMAGFADALRPDKFTGVHFKRWQIRVTLWLTAMKCFWEYSVEGLIASLDVEEKARKKDDASKGDGGQSSANVVHKAQNKSKGKYKAQQTTNFKKQKKNNNNPNQDEMTCFVCGQVGHLARKCPQRKGMKAPAGQTSKSANVTIGNTGDGSGYGNLPTVARGSTVLMGNGSHASVHGVGTVDLKFTSGKIVQLKNVQHVPSIDRNL

SEQ ID NO: 20576 - protein, 840 aa, Oryza sativa
  Clone ID: TF_OSC407628j.C1.p7.fg
MDISRTNEGYTSCGPVVEMSWHRAGVLLLGAQSCLPVPEVPAVGGIGSVLLSMARMGWELCHVFRPYTVVNKPNIHHNSKRLRSVKVLSLVSNLSLPFVFPLSLSKPLQQMADNEKGNKVRSQDIGTSSSRVNEAPDTSCVTLVQHLINQNRLLIEILQQHQTPILNLSQIQPQVQLEAVQALTPQVSMPPASQKTDGGVPHVDSKEASIICFMCDEQGHYARNCPQQKGKTPMRTEDEVRKMIITSTEWPPPGMTKRQRRNTFRGAPQLTEHLLANGGRVSDSEDSDQVSSDDEDEKSPQDCQFSFLLTKKMANQPASSNGEKHQGNTNPRQDYSFSLTPVPGQRNQNEKRKCRVREDICCFNCQGMGHFADKCPKPRNIAASTSVHATPCNQKLAPQRIVIHASRSSPIARVTTAPTPASALPQGVNAQFQPQPPVDKTEASIGIVPLDVPAQQPRNQNWNNPAGATNVQVPTVQQQCKLSEFLKIETPTFAIAVEPMEASDWLRTVEKKLGLIQCTDQERVVFATHQLVGLASEWWDSYEASRPEGHTITWDEFSSVFKRSHVPAGMITLRKREFRYLKQEDLTVTEYLHEFHRLAHYAPEDVENDEDKQEKYLQGLKDEIAVQLLLEEYEDFEKLNCKRRIVSIPVFPCGNQRQRTEPLQITGSSVAHQEFPPQEDGHNADNNISNTNDDDTTNNHASCPISDHSNQACNVNIIHQGVDDSINDGTQNDNPSNCDSEKDSNGDSNYGTTDANVSKDFQPPIPTPSQNDRPQTDSSAKKTLICYNCKGPGHYSRDCLQPRQSRPPHYRQFTRSRHPNRIVVTGANAVPVRPRVNQNP

SEQ ID NO: 20577 - protein, 863 aa, Oryza sativa
  Clone ID: TF_OSC900017j.C1.p25.fg
MADNEKGNKVRSQDIGTSSSRVNEAPDTSCVTLVQHLINQNRLLIEILQQHQTPILNLSQIQAQVQLEAVQSLTPQVSMPPASQKTHGGVPHVDSKEASIICFMCDEQGHYARECPQQKRKTPMRTEDKVRKMIITSTEWPPPGMTKRQGRNTFRGAPQLTEHLLANGGRVSDSEDSDQVSSDDEDEMERKACSRCGEIGHVASSCATTCVHCEEDHPPDRCPTSRITCFFCEGTDHVPKDCQFSFLLTKKMANQPASSNGEKHQGNTNPSQDYSFSLTPVPGQRNQNEKRKCRVREDICCFNCQGRGHFADKCPKPRNIAASTSVHATPCNQKLAPQRIVIHASRSSPIVPVATASTPASALPQGVNAQFQPQPPVDKIEASIGIVPLDVPAQQPRNQNWNNPAGATNVQVPTVQQQCKLSEFLKTEPPTFAIAVDPMEASDWLRTVEKKLGLIQCTDQERVVFATHQLVGLASEWWDSYEASRPEGHTITWDEFSSVFKRSHVPAGMITLRKREFRYLKQEDLTVTEYLHEFHRLAHYAPEDVENDEDKQEKFLQGLKDEIAVQLLLEEYEDFEKLVDKAIQLESEHNRMKNCKRRIVSIPVFPCGNQRQRTEPLQITGSSVAHQEFPPQEDGHNADNNISNTNDDDTTNNHAFCPISDHSNQACNVNIIHQGVDDSINDGTQNDNPSNCDSEKDSNGDSNYGTTDANVSKDFQPPIPTPSQNDHPQTDSSAKKTLICYNCKEPGHYSRDCLQPRQSRPPHYRQFTRSRHPNRIVVTGANAVPATTVSLAFDEPLEGSLKGSRLKYHFVTRSIHNSRSEEYLVDKVQKVIDRRYQQRCLSPGKEVGRKVIDKRNLKRTHQG

SEQ ID NO: 20578 - protein, 1018 aa, Oryza sativa
  Clone ID: TF_OSC400718j.C1.p77.fg
MAEAVKHHVSYEKKLLSLISNLLSEPRWLAGAMSEHTPPRPSCSPPPTPPRSRSPLVRPSQTPPCHNPAESPPCRGRGRGERQPFAAQPRVVRESSAAVHYPVLTRTNYEECALFMTVNQQAQGLWHAVEPYEDEEIEYRDDRLVLAAILRVVPPEMLRSLSTKRTVKSAWEAIKTVCVGTRRVREANEQLLRREFADARFKDGENIDDFSMRIFGIANSIRTLGGDLPEIDVIAISIETLLDIRDLSIKEVTVRLRSVEKCKAKPKEVVDSGGRLMLTEEQWLARLKNREQGGESSGTTPGAAANNSGKKRGNRRRRGRGQEHPGDKCHNCSKMGHWAKDCRSKAKKAEAHIATKDDDEPTLLMARACLVQRRCPPAEPTSKITPVLAHLDGDPDPADLWYLDTGVTNHMTGARSVFSELNTAVTGSVVTIEGYGTILFACKNGEHRGLTGVYYIPRLTVNLISLGQLDENGCESLGDMVRGLPLIDHVDQVCDSYLAGKQRCAPFPAHAKHFAEHLLDLVHGYLCGPILPAMLGGNHYFLLLVDDVSRYIWLTLLASKDQAPAAIKRFQAAAELESGCKLKVLRTDRGEETASFKEAEQHKSWRHAMMEEMESITHNKTWVLVDPPPSHRPIRLKWVYKVKQDERGVIVKYKARLIAKGYIQQAGIDFEEVFAPVARMESVRLLLAVAAHAGWGVHHMDVKSAFLNGELAEEVQGDAKLIVGVYVDDLIITGANQANIGEFKKEMCNIFKMSDLRLLSYYLGLESAYADKLLYKSGMGDCNSCATPMEIHLKLSKASSSPPVSATSYRSIIGGLRYLVNTRPDIAHAVGYLSRFMEEPHEDHQAAVKHVLRYIGRTRHHGVHYARGKGGWLELHGFSDSDMAGDLDTRRSTSGVLLPRLQSCLLAISETEGGHTIILARLLSDLLDSEPGAPEIMVDNKSAIAITKNPVFHDRSKHIDTRYHFIRECVENGKIVINYIRIEEQLAAVLMKPLGRVPFQELCNGIGIVELKGDGDKN

SEQ ID NO: 20579 - protein, 666 aa, Oryza sativa
  unsure (1)..(666): unsure at all Xaa locations
  Clone ID: TF_OSC401348j.C1.p24.np
MGPQIERVVDVSISPPNDKELSFKEEEKCIHLNAQVTNVLFSVLSEDVFKTIMPLEDAHLIWTTLKERYDKSKCDDVLFMEEPLEERSTSSPNCEEPQVTTFDDQDNHPTSTLSSTHDYIEGNELVSKVDDRPILPLDSNNTDNEIVILHCVVDSCISPSTKYVCEDDMDKCSTSYSTCGTNLLKEEVNERHWTSEESTSSRCSSSISEDYACFMGEDGDSEFDHLSKKDITMVIKLMEAIEKQQACTIKKNGEIVSLTEELKKLKNFHSSXTMRYEKLENEFACATNSIACVASLEKQNQELKSQLDEITNKYVDLQERHDELLCSHENLVDSHAMLEVSHEVIIAMVKSYEPHVQVDLTCTNPCCSQANISPSTICDLDCVGKREKQIDHGLVCIAQPSQDNREGMVKNLEEGSTVACTKIHQRDSKSINAYTKGRNQKMIKNSITCFKCKKVRHHVRNCPWKKGNKLIKKKDIPHIKCFKCTEVGHFASRSPCTLDERCKTSSERQKQTEKYISKSRLCYNCWAKGHIGKNSPMGNIPKPSLSFDYNLLRNAKNDICATRMICSPHTSTKAIWVSKSLVTNLYGPNVVGDQNVLKFYCGTKGFGKTARFAIKLIYHHAIDPGDPKKSTSTIRMXTVIKELNMFVMEKLSFSGLESRKRFHQAH

SEQ ID NO: 20580 - protein, 580 aa, Oryza sativa
  Clone ID: TF_OSC400390j.C1.p65.fg
MADNEKGNKVRSQDIGTSSSRVNEAPDTSCVAVVQHLINQNKLLIEILQQHRMPILNPSQMQPQVQLEAVQALTPQVSAPPTSQKAPHAMPHVDPKEASIICFMCDEQGHYARNCPQQKRKAPMRTEDEVRKMIITSTEWPPPGMTKHQRRNSFRGAQQLTEHLLANGGRVSDSEDSDQVSSDDEDEVELKACPRCGEIGHVASSCASTCVHCEEDHLPDRCPTSRITCFFCEGTDHVPKDCQFSFLLTKKMANQPASSNGEKHQGNTNPRQDHRFSLTPVPGQRNRNEKRKCRVREDICCFNCQGMGHFADKCPKPRNIAAGTSVHATPCNQKLAPQRIVIHASRSSPIARVATAPIPMNALPQGVNAQFQPQPPADKTGASICVVPLEVPIQQLRNQVQDEEPELKKGIIPKTVPNQGKIDLHITANLHEADIPIVLWSLEQTPYPFHRKAASQRTSSSPEASAIHIKEYHLLDISRKKIDKKRLAKMFSSMKEVGRKVDSEDMNHEKFWNGSITALPQPSLSQPKGAPWSKSGEEKIPSATGGQAKQFRVVKFCWKFVKTQRKKSDKKRRPPNLSSC

SEQ ID NO: 20581 - protein, 750 aa, Oryza sativa
  Clone ID: TF_OSC13329j.C1.p2.np
CGCTHYSLAPPPPRIPPHPAVPARIKERGITPRVSLSRFPLFSLSLSLGFVRIHPAKFAGVFNGARDLRARFPLSPAALSPSRCYKIVPRASLFRFRRSPLALAVGFVPAPCSSLSAVAAELRFAAVVAPVLLPTRRHLHRLRRVVADPVRRSASPADRRSTVDIGIPNRAAAFLHSGRRFRRPRCPGVSRGPPSRFPLLSALSGAAPPRRWSPAVTIGARARRSRRPCRRGRLRAPRGCQVGPAVSRPRPRVRLTRGTHGADRRQPRAPGPPWTERLTRGPHFPWTRNEGYTSCGPMADNEKGNKVRSQDIGTSSSRVNEAPDTSCVAVVQHLINQNKLLIEILQQHRMPILNPSQMQPQVQLEAVQALTPQVSAPPTSQKAPHAMPHVDPKEASIICFMCDEQGHYARNCPQQKRKAPMRTEDEVRKMIITSTEWPPPGMTKHQRRNSFRGAQQLTEHLLANGGRVSDSEDSDQVSSDDEDKIELKACSRCGEIGHVASSCASTCVHCDEDKIELKACSRCGEIGHVASSCASTCVHCEEDHPPDRCPTSRITCFLCEGTDHVPKDCQFSFLLTKKMANQPASSNGEKHQGNTNPRQDSSFSLTPVPGQRNRNEKRKCRVREDICCFNCQGMGHFADKCPKPRNVAAGTSVHATPCNQKLAPQRIVIHASRSSPIARVATTPIPMSALPQGVNAQFQPQQRIVVDGRSCVSPRPTPGLAKGNQPPEGDTKQKTVIRFNQQSEGSFACR

SEQ ID NO: 20582 - protein, 1235 aa, Oryza sativa
  Clone ID: TF_OSC414006j.C1.p3.fg
MAGFADALRPDKFTGVHFKRWQIRVTLWLTAMKCFWVSTGKPEGVLTAEQQKQFEEATTLFVGCILSVLGDRLVEVYMHMTDAKELWDALNTKFGATDASNDLYIMEQFHDYKMADNHSVVEQAHEIQTMAKELELLKCVLPDKFVAGCIIAKLPPSWRSFGTALKHKRQEYSVEGLIASLDVEEKAREKDAASKGDGGQSSANVVHKAQNKSKEKYKAQQTTNFKKQKKNNNNPNQDERTCFVCGQVGHLARKCPHRKGMKAPAGQTSKSANVTIGNTGDGSGYGRTGFHRPNGEWVTCFCSWCWHGRSEVYFGKDRAAEEHAACPFYRQESCYECGGLFRFSLSDFCNKYVNHICGSVDDEANVWHSRLCHINFGLMSRLSSMCLIPKFFIVKGSKCHSCVQSKQPRKPHKAAEERNLAPLELLHSDLCEMNGVLTKGGKRYFMTLIDDATRFCYVYLLKTKDEALDYFKIYKAEVENQLDRKIKRLRSDRGGEFFSNEFDLFCEEHGIIHERTPPYSPESNGIAERKNRTLTDLVNAMLDTAGLPKAWWGEALLTSNHVLNRVPNRNKDKTPYEIWIGRKPSLSYLRTWGCLAKVNVPITKKRKLGPKTVDCVFLGYAHHSIAYRFLIVKSEVPDMHVGTIMESRDATFLESFFPMKDTHSGSNQPSEIIPSSITPPEQTEHTHELVSEEDVSEAPRRSKRQRTAKSFGDDFTVYLVDDTPKSISKAYASPDADYWKEAVRSEMDSIIANGTWEVTERPYGCKPVGCKWVFKKKLRPDGTIEKYKARLVAKGYTQKEGEDFFDTYSPVARLTTIRVLLSLAASHGLLVHQMDVKTAFLNGELDEEIYMDQPDGFVVEGQEGKVCKLLKSLYGLKQAPKQWHEKFDKTLTSAGFAVNEADKCVYYRHGGGEGVILCLYVDDILIFGTNLQVINEVKSFLSQNFDMKDLGVADVILNIKLIRGENGINLLQSHYVEKILNRFGYIDSKPSPTPYDPSLLLRKNKRIARNQLEYSQIIGSLMYLASATRPDISFAVSKLSRFTSNPGDDHWRALERVIRYLKGTVELGLHYTGYPAVLEGHSDSNWISDVDEIKATSGYVFTLGGGAVSWRSCKQTILTRSTMEAELTALDTATVEAEWLRDLLMDQPVVEKPVPAILMNCDNQTVIVKVNSSKDNMKSSRHVKRRLKSVRKLRNSGVITLDYIQTARNLADPFTKGLSRNVIDNASKEMGLRPM

SEQ ID NO: 20583 - protein, 622 aa, Oryza sativa
  Clone ID: TF_OSC13321j.C1.p1.fg
PGLEWCIPGLEIELCSRDGCSERLGLCNRMPRYKPEYLFGTEGFVQELRTMSFLIGFGIAPLYAQIPHDRDEEKCGVKVTLNSNREDIPSVMFEAGGGSYIHACQEVARIAIGELRESYNDRLADTEYRYHPRQPQGSDCGSYFEPAGIENDATTRHLVEMLWAMDETRAEIVIAAQDREDRNRGKICKLEDKVDHLEKELAALKGEAPPQKARVRLPQGRELYSSLAISWHQRFVWWKKKLPQRILRLSITTNPVEAGDWLHAIEKKLDLLQCTDQEKVSFASHQLHGPASEWWDHFRLNRTTPEPISWLEFNAAFRKTHIPSGVVSLKKKEFRSLTQGSRTVTEYLHEFNRLARYAPEEVRTDEERQERFLKGLNDELSYPLMTGDYHDFQKLVDKAIRQEDKYNRMEQKKRRIAHFKAQQGNSQRPRLTLGPQSMPQGAPRPVASPTQQQPAKREQGSKPGVCFNCGDPGHYADKCPKPRRVKVVPAQNNPSAPAAKARVNHVAAAEAQGAPDVILGTFPVNSVPATVLFDSGAMHSFLSMSFAGNQGMEVKELRRPLMVSTPSNQALSSQRSPSVRIEIQGVPFLANLILLESKDLDVILGMDWLARYKGVIDCANRK

SEQ ID NO: 20584 - protein, 305 aa, Oryza sativa
  unsure (1)..(305): unsure at all Xaa locations
  Clone ID: TF_OSC15264j.C1.p1.np
RHSPFRLHASLQPSVQSREPNEENPLNPGNCFPPSLSYHVGSRTKHAKGKKSKNQKRKAPMRTEEEVRKMTITSTEWPPAGITIPRRQRGNTFRGARQLTQHLLSHGGRVSDSEGSDQVSSDYEYESPRRLGEEEMELKACTRCGEIGHIASMCLTLCPHCEEDHPPGECPTRKVTCFLCEGTNHVPKDCQLSVLLTKTAEIQRTTLRLSHQLVSSNSNLDDIIHSTNAPPAAPDSAINHSNNTFSTNHSLHXQPQQXIVVDGRSCFSPRPTPGRAKGNQPQEGDTKQKTIIHFNQQSEGIFSCE

SEQ ID NO: 20585 - protein, 224 aa, Oryza sativa
  Clone ID: TF_OSC15276j.C1.p1.hg
MAMDYWDFQQLMDKAIRQEDKYNRMEQKKRRAAHFKAQQGSSQRPHIALGPQAAPYPQGGSSSVARPQRQFYNNNTGNRSNDNRNMVTRPVAAPTQNHPVRKEQGSKPGVCFNCGDPGHYADKCPKPRRVKNAPVQNNSNAPAPKARVNHVAAAEAQNTPDVVLEEECFNEVAKQPGPHVSDSAAREAEAAGEQRRPTAFVAAYWLHHMWASFCWDLGDVSGAM

SEQ ID NO: 20586 - protein, 679 aa, Oryza sativa
  Clone ID: TF_OSC15283j.C1.p3.fg
MGVAGESIASGFEGEIMIQERCTVMPPHSPRNLIKVLGFVRELRLMAFEYHPHKPHGQDYGTYTYPDGEESATLMQAVHMLSSMYAVSVERDKAAHDRENWNRGKICKLESKVYRLQKELAELKGETPPPTPKLHLTARKRTCPPPRLQLASKLRVMGDAVPDRAEPVIHVLSDEEEEEYPEERMVNTRTGSGSGAANNGGDSTLAQILAQQTQLINLLVQQAQNQQANNQNQNQPPPPQNKLADFLRLHGPAAEWWDHFRQARAEGEPITWQEFTAAFKNTHIMTGVVALKKREFRALNQGSRSVTEYLHDFNRLARYAPKYVRTDEERQEKFLEGLNDELSYALMSTDFRDFQQLVDKAIRQEDKYNRIEQKKRRAAQFKAQQGSNQRSRLVTGPQATSYPQGGSSSVARPQRQFYNNNTGNRGNDNRNVVARPAATPAKNQPVRKEQGSKPGVCFNCGDPGHYADKCPKPRRVKNAPAPNNSNTPAPKARVNHVVAAEAQNAPDVVLDLDVILGMDWLSRHRGVIDCANRKVTLTSSNGETVSFFVSSPKYHGVILNQVALQEIPIVQDYPDVFPEDLPGMPPKRDIEFRIYLVPGTNPIHKRPYRMAANELAEVKRQVGDFLQKGYIRPSTSPWGAPVIFVEKKDHTQRMCVDYSEEFSGAIIQKKKPLGSEKMN

SEQ ID NO: 20587 - protein, 1177 aa, Oryza sativa
  Clone ID: TF_OSC15295j.C1.p2.fg
MAPGLEWYIPGLEIELCTRDGCSEWLGLYNRMPPHSPRNLIKVLGFVRELRLMAFEVGYEVAPEYRRISHDPNEEKCRVRVTLASDREDLPSIKFETRGRSYNHACQEAALVAIGELRQRFEEELDSSAFQYHPHKPRGQDYGTYTCPDGEESATLMHAVHMLSAMDAVSVERDKAAHDRENWNRGKICKLESKVYHLQKELAELKGETPLPTPKLLLTARKRTCPPPRLQLASKIRVMGEVVPDRAELVIDIMVNTRTGSGSGSGSGAANNGGDPTLAQILAQQTQLINLLVQQAQNQQANNQNQNPPPPPQNKLADFLRQLVDKAIRQEDKYNRMEQKKRRAAQFKAQQGSNQRPRLVTEPQAPSYPQGGSSSVVRPQRQFYNNNTGNRGNDNRNMVARPAATPAQNQPVRKEQGSKPGVCFNCGDPGHYADKCPKPRRVKNAPAPNNSNAPAPKARVNHVAAAEAQNAPDVVLGTFPVNSIPASVLFDSGATHSFLSKSFASNHEMEVISLGRPLLVNTPGNQVSSTQYCPSATIEIEEVPFPSSLILLESKDLDVILGMDWLSRHRGVIDCANRKVTLTCSDGETVSFFVSSPKSHGVTLNQVALQEIPVVQDYSDVFPEDLPGMPPKRDIEFRIDLVPGTNPIHKRPYRMAANELAEIKRQVDDLLQKGYIRPSTSPWGAPVIFVEKKDHTQRVFMEYLDKFVVVFIDDILIYSKTKEEHEEHLRLALEKLREHQLYAKFSKCEFWLSEVKFLGHVISSGGVAVDPSNVESVLNWKQPKTVSEIRSFLGLAGYYRRFIENFSKIARPMTRLLQKDVKYKWTEDCEQSFQELKKRLVTAPVLILPDSRKGFHVYCDASRLGLGCVLMQEGMVVAYASKQLRPHENNYPTHDLELAAVVHALKIWRHYLFGNRTEMYTDHKSLKWLELIKDYDMEIHYHPGKANVVADALSRKSYCNMSEGRHLPWELCQEFEKLNLGIVSKGFVAALEAQPTLFDQVREAQGNDPDIQEIKKNMRRGKAIGYVEDEQGTVWLGERICVPDNKELKDTIVKEAHETLYSIHPRSTKMYQDLKQQFWWASMRREIAEYVALCDVCQRVKAEHQKPAGLLQPLKIPEWKWEEIGMDFITGLPRTSAGHDSIWVVVDRLTKVAHFIPVKLSKQPTRGINLQSYTWPE

SEQ ID NO: 20588 - protein, 1708 aa, Oryza sativa
  unsure (1)..(1708): unsure at all Xaa locations
  Clone ID: TF_OSC15641j.C1.p2.np
IPTFPESLFSQEKILKSSKASKATPGLEWYIPGLEIDLYSRDGCSERLGLYNRMPRYKPEYLFGVEGFVQELRTMSFAIGFGTALFYAQIPHDRHEEKCRVKVTLNSNSEDIPSVMFEAGGRNYIHACQEVARIAIGELRNRYSDRLADTEYHYHPRQPQGSDRGSYLETEGIENDATTRHLVEMLWADETRAETVLAAQDREDRNRGKICKLEDKVDRLEKELAMLKGEAPPQKARVRFTARKRALFVPRYQLAPKMVLTRSNGNGPNNNNNNNNGENPTLAQVLAQQAQLMNMMMQQLQNQQNQGNNHAPPQNKLAEFLRVRPPTFSSTTNPVEAGDWLHAIEKKLDLLQCTDQEKVSFASHQLHGPASEWWDHFRLNRTTAEPITWLEFTAAFRKTHIPSGVVSLKKKEFRSLTQGSRSVTEYLHEFNRLARYAPEDVRTDEERQEKFLEGLNDELSYPLMTGEQKKCRIAHFKAQQGNSQRPRLTLGPXTMPQGGSSSVVRPQRQFFNNNAGNNIRNQAPRPIAASTPQQPAKREQGSKPGVCFNCGDPGHYADKCPKPRRVKVVPDQSNSTVPASKARVNHVVAAEAQDAPDVILGTFLVNLVPATVLFDSGATHSFLSMSFARNHGMEVEDLRRPLMVSTPSNQALSLQRSPSVRIEIQGVPFLANLILLESKDLDVILGMDWLARHKGVIDCANRKVTLTSNDGRVVTVHALSSESLRSKLNQITLEEIPIVREYPVVFPDDLPGMPPKRDIEFRIDLVPGTTPIHKRPYRMAANELAKVKRQVDDLLQKGYIRPSSSPWGAPVIFVEKKDHTQRMCVDYRALNDVTIKNKYPLPRIDDLFDQLKGATVFSKIDLRSGYHQLRIKEEDIPKTAFTTRYGLFECTVMSFGLTNAPAFFMNLMNKVFMEYLDNFVVVFIDDILIYSRTKEEHEEHLRLALEKLREHQLYAKFSKCEFWLSEVKFLGHVISAGGVAVDPSNVESVTNWKQPKTVSEIRRFLGLAGYYRRFIENFSKIAKPMTRLLQKDVKYKWSEECEQSFQELKNRLISAPILILPDPKKGFQVYCDASKLGLGCVLMQDGKVVAYASRQLRPHEKNYPTHDLELAAVVHALKIXRHYLFGTRTEVYTDHKSLKYIFTQPDLNMRQRRWLELIKDYDMGIHYHPGKANAVADALSRKGYCNATKGRQLPLELCKDFERLNLGIVSRGFVAALEAKPTLIDQVREAQINDPDIQETKKNMRRGKAIGFLEDEQGTVWLGERICIPNNKDLKDVILKEAHDTLYSIHPGSTKMYQDLKERFWWASMKREITEYVAVCDVCQRVKAEHQKPAGLLQPLKIPEWKWEEIGTDFITGLPRRSSGHDSIWVIVDRLTKVAHFIPVKTTYSGSRLAELYMARIVCLHGVPKKIVSDRGSQFTSNFWKKLQEEMGSKLNFSTAYHPQTDGQTERVNQILEDMLRACALDFGGSWDKNLPYAEFSYNNSYQASLQMAPYEALYGRKCRTPLLRDQTGERQVFGTDILREAKEKVKIIQERLRVAQSRHKSYADNRRRDLSFDEGDYVYLRVTPLREVHRFHTKGKLAPRFVGPYKIVSRRGEVAYQLELPQFLAGVHNVFHVSQLKKCLSVPTEEANLEQIEVQEDLTYVEKPIRILEIDERRTRNRVIRFCKVQWSNHSEEESTWEREDELKSAHPHLFASSSESRGRDSV

SEQ ID NO: 20589 - protein, 1591 aa, Oryza sativa
  Clone ID: TF_OSC15717j.C1.p3.fg
MAFEVGYEVAPEYRRISHDPNEEKCHVRVTLASDREDLPSIKFEAGGRSYSHACQEAALVAIGELRQRFEEELDSSAFQYHPHKPHGQDYGTYTCPDGEESAALMHAVHMLSAMDAVSVERDKAAHDRENWNRGKICKLESKVYRLQKELAELKGETPPPTPKLRLIARKRTCPPPRLQLASKIRVMGEAVPNRAEPVIDIISDEEEEEDPEEREPATPEEEDPSLRSDARRDYTTNPVEAGDWLHPVEKKLDLIQCTEQEKVSFASHQLHGPAAEWWDHFRQGRAEGEPITWQEFTAAFKKTHIPTGVVALKKREFRALNQGSRSVTEYLHDFNRLARYAPEDVLTDEERQEKFLEGLNDELSYALMSTDFRDFQQLVDKAIRQEDKYNRMEQKKRRAAQFKAQQGSNQRPRLVTGPQAPSYPQGGSSSVVRPQRQFYNNNTGNRGNDNRNMVARPAATPAQNQSVRKEQGSKPGVCFNCGDPGHYADKCPKPRCVKNVPAPNNSNAPAPKARVNHVAAAEAQNAPDVVLGTFPVNSIPASVLFDSGATHSFLSKSFASNNGMEVISLGRPLLVNTPGNQVFSTQYCPSVTIEIEEVPFPSSLILLESKDLDVILGMDWLSRHRGVIDCANRKVTLSSSNGETVSFFVSSPKYHGVILNQVALQEIPIVQDYPDVFPEDLPGMPPKRDIEFRIDLVPGTNPIHKRPYRMAANELAEVKRQVDDLLQKGYIRPSTSPWGAPVIFVEKKDHTQRMCVDYRALNEVTIKNKYPLPRIDDLFDQLEGATVFSKIDLRSGYHQLRIREEDIPKTAFTTRYGLFECTVMSFGLTNAPAFFMNLMNKVFMEYLDKFVVVFIDDILIYSKTKEEHEEHLRLALEKLREHQLYAKFSKCEFWLSEVKFLGHVISSRGVAVDPSNVESVLSWKQPKTVSEIRSFLGLAGYYRRFIENFSKIARPMTRLLQKEVKYKWTEDCEQSFQELKKRLVTAPVLILPDSRKGFQVYCDASRLGLGCVLMQEGKVVAYASRQLRPHENNYPTHDLELAAVVHALKIWRHYLFGNRREMYTDHKSLKYIFTQPDLNMRQRRWLELIKDYDMEIHYHPGKANVVADALSRKSYCNMSEGRHLPWELCQEFEKLNLDIVSKGFVATLQAQPTLFDQVREAQVNDLDIQEIKKNMRRGKAIGYVEDEQGTVWLGERICVPENKELKDTIMKEAHETLYSIHPGSTKMYQDLKQQFWWASMRREIAEYVALCDVCQRVKAEHQKPASLLQPLKIPEWKWEEIGMDFITGLPRTSAGHDSIWVVVDRLTKVAHFIPVKTTYTGNKLAELYMARVVCLHGVPKKIVSDRGSQFTSKFWQKLQVEMGTRLNFSTAYHPQTDGQTERVNQILEDMLRACVLDFGGSWDKNLPYAEFSYNNSYQASLQMAPYEALYGRKCRTPLLWDQTGERQVFGTDILREAEEKVKIIQERLRVAQSRQKSYADNRRRDLAFEEGDYVYLRVTPLRGVHRFQTKGKLAPRFVGPFKIVSRRGEVAYQLELPPSMAGIHDVFHVSQLKKCLRVPTEEADPDRIELQEDLTYVEKPVRILENFLGII

SEQ ID NO: 20590 - protein, 368 aa, Oryza sativa
  Clone ID: TF_OSC19350j.C1.p5.gm
MSTDFRDFQQLVDKAIRQEDKYNRMEQKKRRAAQFKAQQGSNQRPRLVTGPQAPSYPQGGSSSVVRPQRQFYNNNTGNRGNDNRNMVARPAATPAQNQPVRKEQGSKPGVCFNCGDPGHYADKCPKPRRVKNAPAPNNSNAPAPKARVNHVAAAEAQNAPDVVLGYYRRFIENFSKIARPMTRLLQKEVKYKQLRPHENNYPTHDLELAAVVHALKIWLSKKEIMYTFGLRRYEAGDQVFEECFRMTAPRLLFVVVVCYTMSGASAAAAPRDGGALGAGAAANENINGGSSASQSSGGTFTGLIKGAPCCDEPRVASALKSGGGSGGGGHDLPSTKSGHRGGGEMGGSDGACVLPSARSGGVFPIGAH

SEQ ID NO: 20591 - protein, 1371 aa, Oryza sativa
  Clone ID: TF_OSC20906j.C1.p1.fg
LLVWNIPGLEIELCSRDGCSEWLGLGNRMPRFKPEYLFGVEGFVQELRTMSFAIGFGTAPLYAQIPHDHDEEKCRVKVTLNSNSEDIPSVMFEAGGGNYIHACQEVARIAIGELRDRYSDQLADTEYRYHPRQPQGSDRGSYLETEGIENDATTRHLVEMLWAMDETRAEVVLAAQDREDQNRGKICRLEDKVDRLEKELAALKGEAPPQKARIRLTARKRALFVPRYQLAPKVRVVEKEVTPALADPPVVNMVLTRSNGNGPNNNNNNNGENPTLAQVLAQQAQLMNIMMQQLQNQQNQGNNHAPPQNKLAEFLRCTDQEKVSFASHQLHGPASEWWDHFRLNRTTAEPITWLEFTAAFRKTHIPSGVVSLKKKEFRSLTQGSRTVTEYLHEFNRLARYAPEDVRTDEERHERFLEGLNDELSYPLMTRDYHDFQKLVDKAIRQEDKYNRMEQKKRRIAHFKAQQGNSQRPRLTLGPQSMPQGGSWSVVRPQRQFFNNNAGNNIRNQAPRPVAAPTQQQPAKREQGSKPGVCFNCGDPGHYADKCPKPRRVKVVPAQSNSTAPAPKARVNHVAAAEAQVPATVLFDSGATHSFLSMSFVGNHGMEVEDLRRPLMVSTPSNQALSLQRSPSIRIEIQEVPFLANLILLESKDLDIILGMDWLARYKGMIDCANRKVILTSNDGRVVTVHALSSESLRSSLNQMTLEEIPIVREYPDVFPNDLLGMPPKRDIEFRIDLVPGTTPIHKRPYRMAANELAEVKRQVDDLLQKGYIRPSSSPWGAPVIFVEKKDHTQRMCVDYRALNDVTIKNKYPLPRIDDLFDQFKGATVFSKIDLRSGYHQLRIKEEDIPKTTFTTRYGLFECTVMSFGLTNAPAFFMNLMNKVFMEYLDKFVVVFIDDILIYSRTKEEHEEHLRLALEKLREHQLYAKFSKCEFWLSEVKFLGHVISAGGDAVDPSNVESVTNWKQPKTVSEIHSFLGLVGYYRRFIENFSKIAKPMTRLLQKDVKYKWSEECEQSFQELKNRLISAPILILPDPKKGFQVYCDASKLGLGCVLMQDGKVVAYASCQLRPHEKNYPTHDLELVAVVHALKIWRHYLFGTRTKDYDMGIHYHPGKANVVADALSRKGYCNATEGRQLPLELCKEFERLNLGIVSRGFVAALEAKPTLIDQVREAQIIDPDIQEIKKNMRRGKAIGFLEDEQGTVWLGERICVPDNKDLKDAILKEAHDTLYSIHPGSTKMYQDLKERFWWASMKREIAEYVAVCDVCQRVKAEHQKPTGLLQPLKIPEWKWEEIGMDFITGLPRTSSGHDSIWVIVDRLTKVAHFIPVKTTYSGSQLAELYMARIEKNLKSSKASKASHTDPKQPFEHVDSV

SEQ ID NO: 20592 - protein, 342 aa, Oryza sativa
  Clone ID: TF_OSC23055j.C1.p1.fg
IPSGVVSLKKKEFRSLTQGSRTVTEYLHEFNRLARYAPEEVRTDEERQERFLKGLNDELSYPLMTGDYHDFQKLVDKAIRQEDKYNRMEQKKRRIAHFKAQQGNSQRPRLTLGPQSMPQGAPRPVASPTQQQPAKREQGSKPGVCFNCGDPGHYADKCPKPRRVKVVPAQNNPSAPAAKARVNHVAAAEAQGAPDVILGTFPVNSVPATVLFDSGAMHSFLSMSFAGNQGMEVKELRRPLMVSTPSNQALSSQRSPSVRIEIQGVPFLANLILLESKDLDVILGMDWLARYKGVIDCANRKVTLTSNDGRVVTVHALSSESIRSRLNQLTLEEIPIVREYPD

SEQ ID NO: 20593 - protein, 1473 aa, Oryza sativa
  Clone ID: TF_OSC25185j.C1.p21.fg
MVRCGGLCCARGTVTAPFRAPGLEWYIPGLEIELCSRDGCSEWLGLCNRMPRYKPEYLFGVEGFVQELRTMSFVIGFRTTPFYAQIPHDRHEEKCRVKVTLNSNSEDIPSVMFEAGGGNYIHACQEVARIAIGELRDRYSDQLADTKYRYHPRQPQGSDRGSYLETEGIENDATTRHLVEMLWAMDETRAETVLAAQDREDQNRGKICKLEDKVDRLEKELAALKGEAPPQKARIRLTARKRALFVPRYQLAPKMVLTRSNGNGPNNNNNNNNGENPTLAQVLAQQAQLMNMMMQQLQNQQNQGNNHAPPQNKLVEFLRVRPPTFSSTTNPVEAGDWLHAIEKKLDLLQCTDQEKVSFASHQLHGPASEWWDHFRLNRTTAEPITWLEFTAAFRKTHIPSGVVSLKKKEFRSLTQGSRSVTEYLHEFNRLARYAPEDVRTDEQRQERFLEGLNDELSYPLMTGDYHDFQKLVDKAIRQEDKYNRMEQKKRRIAHFKAQQGNSQRPRLTLGPQSMPQGGSSSVVRPQRQFFNNNAGNNIRNQAPRPVAASTQQQPAKKEQGIKPGVCFNCGDPGHYADKCPKPRRVKVVPAQSNSTAPASKARVNHVAAAEAQGAPDVILDCANRKVTLTSNDGRVVTVHALSSESLRSSLNQITLEEIPVVREYPDVFPDDLPGMPPKRDIEFRIDLVPGTTPIHKRPYRMAANELAEVKRQVDDLLQKGYIRPSSSPWGAPVIFVEKKDHTQRMCVDYRALNDVTIKNKYPLPRIDDLFDQLKGATVFSKIDLRSGYHQLRIKEEDIPKTAFTTRYGLFECTVMSFGLTNAPAFFMNLMNKVFMEYLDKFVVVFIDDILIYSHTKEEHEEHLRLALEKLREHQLNVESVTNWKQSKTVSEIRSFLGLAGYYRRFIENFSKIAKSMTRLLQKDVKYKWSEECEQSFQELKNRLISAPILILPDPKKGFQVYCDASKLGLGCVLMQDGKVVAYASRQLRPHEKNYPTHDLELAAVVHALKIWRHYLFGTRTEVYTDHKSLKYIFTQPDLNMRQRRWLELIKDYDMGIHYHPGKANVVADALSRKGYCNATEGRQLPLELCKEFERLNLGIVSRGFVAALEAKPTLIDQVREAQINDPDIQEIKKNMRRGKAIGFLEDEQGTVWLDERICVPDNKDLKDVILKEAHDTLYSIHPGSTKMHQDLKERFWWASMKHEIAEYVATDGQTERVNQILEDMLRACALDFGGSWDKNLPYAEFSYNNSYQASLQMAPYEALYGRKCRTPLLWDQTGERQVFGMDILREAEEKVKIIQERLRVAQSRHKSYADNRRRDLSFDEGDYVYLCVTPLRGVHRFHTKGKLAPCFVGPYKIVSRRGEVAYQLELPQSLAGVHNVFHVSQLKKCLRVPTEETNLEQIEVQEDLTYVEKPIRILEIDERRARNRVIRFCKVQWSNHSEEESTWEQEDELKSAHPHLFASSSESRGRDSV

SEQ ID NO: 20594 - protein, 1607 aa, Oryza sativa
  Clone ID: TF_OSC29665j.C1.p2.fg
MMPPHSPRNLIEVLGFIRELRLMAFEVGYEVAPEYRQISHDPDEEKCRVRVMLASDREDLPSFKFEAGGRSYCHACQEVALVAIGELRQRFEEELDSSAFQYHPHKPHGQDYGTYTCPDGEESATLMHVVHMLSAMDAVSVERDKAAHDRENWNRGKICKLESKVYRLQKELSELKGETPPPTPKLRLVARKRTCPPPRLQLASKIRVMGEAVPDRAEPVIDIISDEEEEEDPEEREPATPEEEDPSLRSDARRDYAAGTESAGKQSESESTPPPQNKLADFLRVRPPTFSSTTNPVEAGDWLHAVEKKLDLIQCTEQEKVSFASHQLHGPAAEWWDHFRQGRAGGEPITWQEFTAAFKKTHIPTGVVALKKREFRALNQGSRSVTEYLHDFNRLARYAPEDVRTDEERQEKFLEGLNDELSYALMSTDFRDFQQLVDKAIRQEDKYNRMEQKKRRAAQFKAQQGSNQRPRLVTGPQAPSYPQGGSSSVVRPQRQFYNNNTGNRGNDNRNMVARPAATSVQNQPVRKEQGSKPGVCFNCGDPGHYADKCPKPRRVKNAPTPNNSNVPAPKARVNHVAAAEAQNAPDVVLGTFPVNSIPATVLFDSGATHSFLSKSFASNHGMEVVSLGRPLLVNTPGNQVFSTQYCPSVTIEIEEVPFPSSLILLECKDLDVILGMDWLSRHRGVIDCANRKVTLTSSNGETVSFFVSSPKYHGVILNQVALQEIPIVQDYPDVFPEDLPGMPPKREIEFRIDLVPGTNPFHKRSYRMAANELAEVKKQVDDLLQKGYIRPSTSPWGAPVIFVEKKDHTQRMCVDYRALNEVTIKNKYPLPRIDDLFDQLEGATVFSEIDLRSGYHQLRIREEDIPKTAFTTRYGLFECTVMSFGLTNALAFFMNLMNKVFMEYLDKFVVVFIDDILIYSKTKEEHEEHLRLALEKLREHQLYAKFSKCEFWLSEVKFLGQVISSGGVAVDPSNVESVLSWKQPKTVSEIRSFLGLAGYYRRFIENFSKIARPMTRLLQKEVKYKWTEDCEQSFQELKKRLVTAPVLILPDSRKGFQVYCDASRLGLGCVLMQEGKVVAYASRQLRPHENNYPTHDLELAAVVHALKIWRHYLFGNRTEIYTDHKSLKYIFTQPDLNMRQRRWLELIKDYDMEIHYHPGKANVVADALSRKSYCNMSEGRRLPWELCQEFERLNLGIVSKGFVAVLEAKPTLFDQVREAQVNDPDIQEIKKNMRRGKAIGFVEDEQGTVWLGERICVPENKELKDTIMKEAHETLYSIHPGSTKMYQDLKQQFWWASMRREIAEYVALCDVCQRVKAEHQKPAGLLQPLKIPEWKWEEIGMDFITGLPRTSAGHDSIWVVVDRLTKVAHFIPVKTTYTGNKLAELYMARVVCLHGVPKKIVSDRGSQFTSKFWQKLQSELDTRLNFSTAYHPQTDDILREAEEKVKIIQERLRVAQSRQKSYADNRRRDLAFEEGDYVYLRVTPLRGVHRFQTKGKLAPRFVGPFKIVSRRGEVAYQLELPPSMAGIHDVFHVSQLKKCLRVPTEEADPDRIELQEDLTYIEKPVRILEFPTFRRRAFPLRKVPKRLRKPKASHTDPKQPFEHVEPI

SEQ ID NO: 20595 - protein, 1120 aa, Oryza sativa
  Clone ID: TF_OSC34887j.C1.p15.fg
MSFLIGFGTAPLYAQIPHDCDEEKCRVKVTLNSNREDIPSVMFEAGGGSYIHACQEVARIAIGELHESYNDRLADTEYRYHPRQPQGSDRGSYLEPAEIENDATTRHLVEMLWAMDETRAEIVIAAQDCEDRNRGKICKLEDKVDRLEKELAALKGEAPPQKARVRLTARKRALFVPRYQLAPKVRVVEKEATPAPVDPPVVNVSDDDEEESKRTHSKVEWGATQDDGDMVLTRSNGNGPNPNKNNNNAENPTLAQVLAQQAQLKNLMMQQLQNQQNQGNNHAPPPNKLVEFLRVRPPTLSSTTNPIEAGDWLHAIEKKLDLLQCTDQEKVSFASHRLHGPASEWWDHFRLNRTTAEPITWLEFTAAFRKTHIPSGVVSLKKKEFRALTQGSRSVTKYLHEFNRLARYAPEDVRIDEERQEKFLEGLNDELSNPLMTGDYHDFQKLVDKAIRQEDKYNRMEQKKRRIAHFKAQQGNTPTQHQPAKREQGSKPGVCFNCGDPGHYADKCPKPHRAKVVPAQNNPSAPATKARVNHVAAAEAQGAPDVILGTFPVNSVPATVLFDSGATHSFLSLSFAGNHEMEVEDLRRPLMVSTPSNQALSSQRSPSVRIEIQGVPFLANLILLESKDLDVILGMDWLAKYKGVIDCANRKVTLTSNDGQVVTVHALPSEPLRSSLNQITLEEIPIVQEYPDVFPDDLPGMPPKRDIEFRIDLVPGTTPIHKRPYRMAANELAEVKRKVDDLLQKGYIRPSSSPWGAPVIFVEKKDHTQRMCVDYRELNDVTIKNKYPLPRIDDLFDQLKGATVFSKIDLRSGYHQLRIKEEDIPKIAFTTTYGLFECTVMSFGLTNAPAFFMNLMNKVFMEYLDKFVVVFIDDILIYSRTKEEHEEHLRLALEKLREHQLYAKFSKCEFWLSEVKFLDHVISAGGVAVDPSYYWRFIENFSKIAKPMTRLLQKDVKYKWSEECEQCFQELKSRLISAPILILPDPKKGFQVYCDASKLGLGCVLMQDGKVVAYASRQLRPHEKNYPTHDLELAAVVHALKIWRHYLFGTRTEVYTDHKSLKYIFTQPDLNMRQRRWLELIKDYDMGIHYCNILKMCHFLILHHADSYVLNNLLNLGKYT

SEQ ID NO: 20596 - protein, 992 aa, Oryza sativa
  Clone ID: TF_OSC400055j.C1.p4.gm
MERSRCVPSYLRLACGEEPRGAPEGGLAGTADGRRRTRAPMVAAGDHRRGGAAPERGEGRGKRIGGPRLTPDRRRRRERRPERREAAARLGSTGTAAFRRSATETERWTRSARTRRSRRWQRRGGRWSGATTAADRSSAAMAERESDGASWVIAPAQASSHDTPGPMSPTRSLTQGSRTVTEYLHEFNRLARYAPKDLRTDEERQEKFLEGLNDELSYPLMTGDYHDFQKLVDKAIRQEDKYNRMEQKKRRIAHFKAQQGNSQRPRLTLGPQSMPQGGSSSVVRPQRQFFNNNAGNNNRNQAPRPVATPSQQQPAKREQGSKPGVCFNCGDPGHYADKCPKPRRAKVVPAQNNSSAPAAKARVNHVAATEAQGAPDVILGTFPVNSVPATVLFDSGATHSFLSMSFAGNHGMEVEELRRPLMVSTPSNQALSSQRSPSVRIEIQGVSFLANLILLESKDLDVILGMDWLARYKGVIDCANRKVTLTSNDGQVVTVHALPSEPLRSSLNQITLEKIPIVREYPDVFPDDLPVMSFGLTNAPAFFMNLMNKVFMEYLDKFVVVFIDDILIYSRTKEEHEEHLRLALEKLREHQLYAKFSKCEFWLSEVKFLGHVISAGGVAVDPSNVESVTNWKQPKTVSEIRSFLGLAGYYRRFIENFSKIAKPMTRLLQKDDGKVVAYASRQLRPHEKNYPTHDLELAAVDYDLGIHYHPGKANVVADALSRKGYCNVMGGRQLPLELCKEFERLNLGIVSRGFVAALEAKPTLIDQVREAQINDPDILEIKKNMRRGKAIGFLEDEQGTVWLGERICVPDNKDLKDAILKEAHDTLYSIHPAFEDTRMEVGGNRYGFHHWTTQNVVGLAPPSPPPLQPCVAVAPVITVARGGRRLVAVLVRPFAVAVDRRSTVAVVKPKVAAASFSSPTSSGHRPPSLWSPVSSSCRLQPVGAFRSRCRAVVRRRARVVRSPPVVTSSLTSSSSSIREPRWIQSISAVRCR

SEQ ID NO: 20597 - protein, 1633 aa, Oryza sativa
  Clone ID: TF_OSC400677j.C1.p41.np
VTSWYQSHLDLRISQMMPPHSPRNLFKVLGFVRELRLMAFEVGYEVAPEYRQISHDPDEEKCRVRVTLASDREDLPSIKFEAGGRSYSHACQEAALVAIGELRQRFEEELDSSAFQYHPHKPHGQDYGTYTCPDGEESATLMHAVHMLSAMDAVSVERDKAAHDRENWNRGKICKLESKVYRLQKELAELKGETPPPTPKLRLTARKRTCPPPRLQLASKIRVRGEVVPDRAEPVIDIISDEEEEEDPEEREPATPEEEDPSLRSDARRTTNPVEAGDWLHAVEKKLDLIQCTEQEKVSFASHQLHGPAAEWWDHFRQGRAEGEPITWQEFTAVFKKTHIPAGVVALKKREFRALNQGSRSVTEYLHDFNRLARYAPEDVRTDEERQEKFLEGLNDELSYALMSTDFRDFQQLVDKAIRQEDKYNRMEQKKRRATQFKAQQGSNQRPRLVTGPQAPSYPQGGSSSVVRPQRQFYNNNTGNRGNDNRNVVARPAATPVQNQPVRKEQGSKPGVCFNCGDPGHYADKCPKPRRVKNAPAPNNSNAPAPKARVNHVAAAEAQNAPDVVLGTFPVNSIPATVLFDSGATHSFLSKSFASNHGMEVISLGRPLLVNTPGNQVFSTQYCPSVTIEIEEVHFPSSLILLESKDLDVILGMDWLSRHRGVIDCANRKVTLTNSNGETVSFFVSSPKSHGAVLNQVALQEIPIVQDYPDVFPEDLPGMPPKRDIEFRIDLVPGTNPIHKRPYRMAANELAEVKRQVDDLLQKGYIRPSTSPWGAPVIFVEKKDHTQRMCVDYRALNEVTIKNKYPLPRIDDLFDQLEGATVFSKIDLRSGYHQLRIREEDIPNTAFTTRYGLFECTVMSFGLTNAPAFFMNLMNKVFMEYLDKFVVVFIDDILIYSKTKEEHEEHLRLALEKLREHQLYAKFSKCEFWLSEVKFLGHVISSGGVAVDPSNVESVLSWKQPKTVSEIRSFLGLAGYYRRFIENFSKIARPMTRLLQKEVKYKWTEDCERSFQELKKRLVTAPVLILPDSRKGFQVYCDASRLGLGCVLMQEGKVVAYASRQLRPHENNYPTHDLELAAVVHALKIWRHYLFGNRTEIYTDHKSLKYIFTQPDLNMRQRRWLELIKDYDMEIHYHPGKANVVADALSRKSYCNMSEGRRLPWELCQEFEKLNLGIVSKGFVAALEAKPTLFDQVREAQVNDPDIQEIKKNMRRGKAIGYVEDEHGTVWLGERICVPENKKLKDTIMREAHETLYSIHPGSTKMYQDLKQQFWWASMRREIAEYVALCDVCQRVKAEHQKPAGLLQPLKIPQWKWEEIGMDFITGLPRPSAGHDSIWVVVDRLTKVAHFIPVKTTYTGNKLAELYMARVVCLHGVPKKIVSDRGSQFTSKFWQKLQLEMGTRLNFSTAYHPQTDGQTERVNQILEDMLRACVLDFGGSWDKNLPYAEFSYNNSYQASLQMAPYEALYGRKCRTPLLWDQTGERQVFGTDILREAEEKVKIIQERLRVAQSRQKSYADNRRRDLAFEEGDYVYLRVTSLRGVHRFQTKGKLAPRFVGPFKILSRRGEVAYQLELPPSMAGIHDVFHVSQLKKCLRVPTEEADPDRIELQEDLTYVEKPVSILEFPTFRRRAFPLRK

SEQ ID NO: 20598 - protein, 460 aa, Oryza sativa
  Clone ID: TF_OSC401071j.C1.p1.fg
MAFEVGYEVAPEYCQIPYDPNEEKCRVRVTLTSDREDLPSIKFEAGGRKYSHACQEAALVAIGELRHRFDEELESSAFQYHPHKPHGQDYGTYNCPEGEGSATVMHAVYMLSAMDAVGVEREKAAHDRENWNRGRICKLESKVYRLQKELAELKGEAPPPAPKLRLTARKRTRPPPRLQLASKTGVVGDAVPDHAKPVIHVLSDEEEEEDLEEREPATPEEEDPSLHSDARRDMLLTSMVGCNYMSLVLLLVRDSLCPRRCRTDEEHQEKFLEGLNDELSYALMAMDYWDFQQLMDKAIRQEDKYNRMEQKKRRAAHFKAQQGSSQRPHIALGPQAAPYPQGGSSSVARPQRQFYNNNTGNRSNDNRNMVTRPVAAPTQNHPVRKEQGSKPGVCFNCGDPGHYADKCPKPRRVKNAPVQNNSNAPAPKARVNHVAAAEAQNTPDVVLEEECFNEGDDQED

SEQ ID NO: 20599 - protein, 1639 aa, Oryza sativa
  unsure (1)..(1639): unsure at all Xaa locations
  Clone ID: TF_OSC401235j.C1.p70.np
VTSWYQSHLDLRTSQMTPPHPPESLINAVGFVRELRMMAFEVGYDVAPEYRQIPYDPNEEKCRVRVTLTSDREDLLSIKFEAGGRKYSHACQEVALVAIGELRHRFDEELESSAFQYHPHKPHGQDYGVYHCPEDEDSTTLKHAVYMLSAMDAVGVEREKTADDRENWNRGRICKLESKVYRLQKELAELKGEAPPPAPKLRLTARKRTRPPPRIQLASKTRVVGDVVPDHAEPIIHVLSNDEEEEDPEEREPATPEEEDPSLRSDARRTTNPVEAGDWLHAVEKKLDLILRTEXEKVSFALHQLHGPAAEWWDHFCQNRAAGEPITWREFTATFKKTHIPSGVVALKKRDFRALNQGSCSVTEYLHDFNRLAHYVPDDVRTDEERQEKFLEGLNDELSYALMAIEYRNFQQLVDKAIRQEDKYNRMEQKKRRAAYFKAQXGNSQRPRIALGPQAAPYPXGGSSSVARPQRQFYNNNTGNHSNDNRNVVTRPVAAPTQNQPVRKEQGIKPGVCFNCGDPGHYADKCPKPRRVKNAPVQNNSNAPAPKARVNHVAAAEAXNAPDVVLGTFPVNSIPATVLFDFGATHSFLSKSFASNHGMEVISLGRPLLVNTPGNQVSSTQYCPSITTEIQEIPFPSTLILLESKDLDVILGVDWLTHHRGVIDCANRKVTLTSSNGXTVSFFVSSPRSHGLTLNQVALQEIPIVQDYPDVFPEDLPGMPPKRDIEFRINLVPGTNPIHKRPYRMAAIELAEVKRQVDDLLQKGYIRPSTSPWGAPVIFVEKKDHTQRMCVDYRALNEVTIKNKYPLPRIDDLFDQLEGATVFSKKDLCSGYHQLXIREEDIPKIAFTTRYGLFESTVMSFGLTNAPAYFMNLMNNVFMEYLDKFVVVFIDDILIYSKTKEEHEEHLRLALEKLREHQLYAKFSKCEWLPEVKFLSHVISAGGVVVDPSNVEXVLNWKQPKMVSEIRSFLGAGYYRRFIENFSKIARPMSRLLQKDVKYKWTEECEQSFQELKKRLVTAPMLVLPDPRKGFQVYCDASRHGLGCVLMQDGKVVAYTSRQLRPHENNYPTHDVELAAVVHELKIWRHYLFDNRTEMYTDHKCLKYIFTQPNLNMRQRRWLELIKDYDMEIHYHPGKANVVADALSRKSYCNMSEGRHLPWELCQELEKLNLGIVNKGFVAALEAQPTLFDQVREAQVNDLDIXEIEKNMRRGKTIGYIEDEQGTVWLGERICVPDNKELKDTIMKEAHETLYSIHPGSTKMYQDLKQQFWWASMRXEIAEYVALCDVCQRVKAEHQKPACQLQPLKILEWKWEEIGMDYITGLPRTSAGQDSIWVVVDRLTKVAHFIPVKTTYSGNKLAELYMARVVCLHGVPKKIVSDRGSQFTSMFWRKLQEEMRTRLNFSTTYHPQTDGQTKRVNQILEDMLRACVLDFGGSWDKNMPYAEFGYINSYQASLQMAPYEALYGRKCRTPLLWDQTGERQVFGTDILREAEEKVKIIQERLRIAQSRXKSYADNRRRDLTFEEGDYVYLRVTLLRGVHRFQTKGKLAPRFVGPFKIVSRRGEVAYQLELPPSMAGIHDVFHVSQLKKCLRVPTEEADPEHIELQKDLTYVEKPVRILVFPTFRRRAFTLRKAIDQYXNA

SEQ ID NO: 20600 - protein, 1570 aa, Oryza sativa
  Clone ID: TF_OSC401314j.C1.p26.np
VTSWYQSHLDLRISQMMPPHSPRNLIKVLGFVRELRLMAFEVGYEVAPEYRRISHDPDEEKCRVRVTLASDREDLPSIKFEAGGRSYSQACQEAALVAIGELRQRFEEELDSSAFQYHPHKPHGQDYGTYTCPDGEESATLMHAVHMLSAMDAVSVERDKAAHDRENWNRGKICKLESKVYRLQKELAELKGETPPPTPKLHLIARKRTCPPPRLQLASKIRVMGEAVPDRAEPVIDIISDEEEEEDPEEREPATPEEEDPSLRSDARRTTNPVEAGDWLHAVEKKLDLIQCTEQEKVSFASHQLHGPAAEWWDHFRQGRAEGEPITWQEFTAAFKKTHIPAGVVALKKREFRALNQGSRSVTEYLHDFNRLARYAPEDVRSDEERQEKFLEGLNDELSYALMSTDFRDFQQLVDKAIRQEDKYNRMEQKKRRAAQFKAQQGSNQRPRLVTGPQAPSYPQGGSSSVVRSQRQFYNNNTGNRGNDNRNMVVRPAATPVQNQPVRKEQGSKPGVCFNCGDPGHYADKCPKPRRVKNVPAPNNSNAPAPKARVNHVAAVEAQNAPDVVLGTFPVNSIPATVLFDSGATHSFLSKSFASNHGMEVISLGRPLLVNTPGNQVFSTQYCPSVIIGIEEVLFPSSLILLESKDLDVILGMDWLSRHRGVIDCANRKVTLTSSNGETVSFFVSSPKSHGVILNQVALQEIPIVQDYPDVFPEDLPGMPPKRDIEFRIDLVPGTNPIHKRPYRMAANELAEVKRQVDDLLQKGYIRPSTSPWGAPVIFVEKKDHTQRMCVDYRALNEVTIKNKYPLPRIDDLFDQLEGATVFSKIDLRSGYHQLRIHEEDIPKTAFTTRYDLFECTVMSFGLTNAPAFFMNLMNKVFMEYLDKFVVVFIDDILIYSKTKEEHEEHLRLALEKLREHQVYAKFSKCEFWLSEVKFLGHVISSGGVAVDPSNVESVLSWKQPKTVSEIRSFLGLAGYYRRFIENFSKIARPMTRLLQKEVKYKWTEGCEQSFQELKKRLVTAPVLVLPDSRKGFQVYCDASRHGLGCVLMQEGKVVAYASRQLRPHENNYPTHDLELAAVVHALKIWRHYLFGNRTEIYTDHKSLKYIFTQPDLNMRQRRWLELIKDYDMEIHYHPGKANVVADALSRKSYCNMSEGRRLPWELCQEFEKMNLGIVSKGFVATLEAQPTLFDQVREAQVNDPDIQEIKHQKPAGLLQPLKIPEWKWEEIGMDFITGLPRTSAGHDSIWVVVDRLTKVAHFIPVKTTYTGNKLAELYMARVVCLHGVPKKIVSDRGSQFTSKFWQKLQVEMGNRLNFSTAYHPQTDGQTERVNQILEDMLRACVLDFGGSWDKNLPYAEFSYNNSYQASLQMAPYEALYGRKCRTPLLWDQTGERQVFGTDILREAEEKVKIIQERLRVAQSRQKSYADNRRRDLAFEEGDYVYLRVTPLRGVHRFQTKGKLAPRFVGPFKIVSRRGEVAYQLELPPSMAGIHDVFHVSQLKKCLRVPTEEADPDRIELQEDLTYVEKPVRILEPTFRRRAFPLRKIVRVPCQASLLGEGCKAKSIYRRKMT

SEQ ID NO: 20601 - protein, 1731 aa, Oryza sativa
  unsure (1)..(1731): unsure at all Xaa locations
  Clone ID: TF_OSC401388j.C1.p10.np
ILNNKFQYKIPTFPESPILQEKNLKSSKASKVTAGLEWYIPGLEIELCSRDGCSEWLGLCNRMPRYKPKYLFGTEGFVQELRTMSFLIGFGTAPLYAQIPHDRDEEKCRVKVTLNSNHEDIPSVMFEAGGGSYIHACQEVARIAIGKLRESYNDRLADTEYRYHPRQPQGSDRGSYLEPAGIENNATTRHLVEMLWAMDETRADIVIAAQDREDRNRGKICKLEDKVDRLEKEPAALKGEATARKRALFVPRYQLAPKMVLTRSNGNGPNPNNNNNNGENPTLAPVLAQQAQLMMNLMMQQLQNQQNQGNNHAPPQNKLAEFLRVRPPTFSSTTNPVEAGDWHAIEKKLDLLQCTDQEKVSFASHQLHGPASEWWDHFRLNRTTAEPITWLEFTAAFRKTHIPSGVVSLKKKEFRSLTQGSRTVTEYLHEFNRLARYAPEDVRTDEERQEKFLEGLNDELSYPLMTGDYHDFQKLVDKAIRQEDKYNRMEQKKRRIAHFKAXQGSSQRLRLALGPQSVPQGGSSSIVRPQRQFFNNNAGNNNRNQAPRPVAAPTQNQPAKREQGSKPGVCFNCGDPGHYADKCPKPRRTKVVPAKNNSSAPATKARVNHVAAAEAQGDPDVILGTFLVNSVPATVLFDSGATHSFLSMSFAGNHGMEVEDLRRPLMVSTPSNQALSSQRSPSVRIEIQGVPFLANLILLESKDLDVILGMDWLARYKGVIDCANRKVTLTSNDGQVVTVHALPSETLRSSLNQITLEEIPIVREYPDVFLDDLPGMPPKRDIEFRIDLVPGTTPIHKRPYRMAANELAEVKRQVDDLLQKGYIRPSSSPWGAPVIFVDKKDHTQRMCVDYRALNDVTIKNKYPLPRIDDLSDQLKGATVFSKIDLRSGYHQLRIKEEDIPKTAFTTRYGLFECTVMSFGLTNAPAFFMNLMNKVFMEYLDKFVVVFIDDILIYSRTKEEHEEHLRLALEKLREHQLYAKFSKCEFXLSEVKFLGHVISAGGVAVDPSNVESVTNXKQPKTVSEIRSFLGLAGYYMRFIENFSKIAKPMTRLLQKDVKYKWSEECEQSFQELKSRLISAPILILLDPKKGFQVYCDASKLGLGCVLMQDGKVVAYASRQLRPHKKNYPTHDLELAAVVHALKIWRHYLFGTRTEVYTDHKSLKYIFTQPDLNMRQRRWLELIKDYDLGIHYHPGKANVVADALSRKGYCNATEGXQLPLELCKEFERLNLGIVSRGFVAALEAKPTLIDQVREAQINDPDIHEIKKNMRRGKAIGFLEDEQGTVWLGERICVPDNKDLKDAILKEAHDTLYSIHPGSTKMYQDLKERFWWASMKREIAEYVTVCDVCQRVKAEHQKLAGLLQPLKIPEXKWEEIGMDFITGLPRTSSGHDSIXVIVDRLTKVAHFIPVRTTYSGSSLAELYMARIVCLHGVPKKIVSDRGSQFTSKFWKKLQEEMGSKLNFSTAYHPRTDEQTERINQILEDMLRACALDFGGSWDKNLLYAEFSYNNSYQASLQMPPYEALYGRKCRTPLLWDQTGERQVFGTDILREAEEKVKIIQERLRVAQSRHKSYADNRRRDLSFEEGDHVYLRVSPLRGVHRFHTKGKFAPRFVGPYKIVSRRGEVAYQLELPQSLAGVHNVFHVSQLKKCLRVPTEEANPEQIEFQEDLTYVEKPICILETDERRTRNRVIHFCMVQWSNHSEEEATWEREDELKSAHPHLFTSSSESRGRDSV

SEQ ID NO: 20602 - protein, 1319 aa, Oryza sativa
  Clone ID: TF_OSC401693j.C1.p22.fg
MAFEVGNEVAPEYRRISHDPNEEKCRVRVTLASDREDLPSIKFEAGGRTYSHACQEAALVAIGDLRQRFEEELDSSAFQYHPHKPHVHMLSAMDAVSVERDKAAHDRENWNRGKICKLESKVYRLQKELAELKGETPPPTPKLRLTARKRTCPPPCLQLASKIRVMGDAVPDCAEPIIHILSDEEEEEDPEERKAQNQEANNQNQNQPPTFSSTTNPVEAGDWLHAVEKKLDLIQCTKQEKVSFASHQLHGPAAEWWDHFRQGRAEGEPITWQEFTAAFNKTHIPTGVVALRKREFRALNQGSRSVIEYLHDFNRLARYAPEDVRTDEERQEKFLEGLNDELSYALMSMDFRDFQQLVDKAIRQEDKYNRMEQKKRRAAQFKAQQGSNQRPRLVTGPQAPSYPQGGSSLVVRPQRQFYHNNTGNRTNDNRNMVARPAATPAQNQPVRKEQGSKPGVCFNCGDPGHYADKCPKPRRVKNAPALKNCNTPAPKARVNHVAAAEAQNAPDAVLDVILGMDWLSRHRGVIDCANRKVTLTSSDGETVSFFASSPKSHGVTLNQVVLQEIPVVQDYPDVFPEDLPGATVFSKIDLRSGYHQLRIREEDIPKTAFTTRYGLFECTVMSFGLTNAPALFMNLMNKVFMEYLDKFVVVFIDDILIYSKTKEEHEEHIRLALEKLREHQLYAKFSKCEFWLSEVKFLGHVISSGGVAVDPSNVESVLNWKQPKTVSEIRSFLGLAGYYRRFIENFSKIARPMTRLLQKEVKYKWTEDCEQSFQELKKRLVTAPVLILPDSRKEGKVVAYASRQLRPHENNYPTHDLELAAVVHALKIWRHYLFGNRTGMYTDHKSLKYIFTQPDLNMRQRRLLELIKDYDMEIHYHPGKANVVADALSRKSYCNMSEGRHLPWELCQEFEKLNLGIVSKGFVAALEAQPTLFDQVREVQVNDPDIQEIKKNMRRGKAIGYVEDEQGTIPEWKWEEIGMDFITGLPRTSAGHDSIWVVVDRLTKVAHFIPVKTTYTANKLAELYMARVVCLHGVPKKIVSDRGSQFTSKFWQKLQVEMGTRLNFSTAYHPQTDGQTERVNQILEDMLRACVLDFGGSWDKNLPYAEFPYNNSYQASLQMAPYEALYGRKCRTPLLWDQTGEHQVFGTDILREPEEKVKIIQERLRVAQSRQKSYANNRRRDLAFEEGDYVYLRVTPLRGVHRFQTKGKLASHFVGPFKIVSRRGEVAYQLELPPSMAGIHDVFHVSQLKKCLRVPTEEADPEHIELQEDLTYVEKPVRILEFPTFRRRAFLLRKVPKRLWKPKASHTDPKQPFEHVEPV

SEQ ID NO: 20603 - protein, 1732 aa, Oryza sativa
  unsure (1)..(1732): unsure at all Xaa locations
  Clone ID: TF_OSC401740j.C1.p1.np
IPTFPESPFSQEKNLKSSKASKATPGLEWYIPGLEIDLYSRDGCSGWLGLSSMMPRYKPEYLFGVEGFVQELRTMSFAIGFGTAPFYAQIPHDRHEEKCRVKVTLNSNSEDISSVMFEAGGGNYIHACQEVARIAIGELRDRYSDQLADTEYRYHPRQPQGSDRGSYLETEGIENDATTRHLVEMLWAMDKTRAETVLAAQDREDRNRGKICKLEDKVDRLEKELAALKGEAPPQKARIRLTARKRALFVPRYQLALKMVLTRSNGNGPNNNNNNNNNGENPTLAQVLAQQAQLMNMMMQQLQNQQNQGNNHAPPQNKLAEFLRVRPPTFSSTTNHVEAGDWLHAIEKKLDLLQCTDXEKVSFASHQLHGPASEWWDHFRLNRTTAEPITWLEFTAAFRKTHIPSGVVSLKKKEFRSLTQGSRSVTEYLHEFNRLARYAPEDVRTDEERXERFLEGLNDELSYPLMTGDYHDFQKLVDKAIRQEDKYNRMEQKKRRIAHFKAQQGNSQRPRLTLGPQSMPQGVSSSVVRLQRQFFNNNAGNNIRNQAPRPVAASTQQQPAKKEQGSKPGVCFNCGDPGHYADKCPKPRRVKVVPAQSNSTAPASKARVNHVAAAEAQGAPDVILGTFLVNLVPATLLFDSGAIHSFLSMSFAGNHGMEVEDLRRPLMVSTPSNQALSLQHSPSVRIEIQGVPFLANLILLESKDLDVILGMDWLARYKGVIDCANRKVILTNNDGRVVTVHALSSESLRSSLNQITLKEIPIVREYPDVFPDDLPGMPSKRDIEFRIDLVPGTTPIHKRPYRMAANELVEVKRQVDDLLQKGYIRPSSSPWRAPVIFVEKKDHTQRMCVDYRALNDVTIKNKYPLPRIDDLFDQLKGATVFSKIDLRSGYHQLRIKEEDIPKTAFTTRYGLFECTVMSFGLTNAPAFFMNLMNKVFMEYLDKFMVVFIDDILIYSRTKEEHEEHLRLALEKLREHQLYAKFSKCEFWLSEVNFLGHVISAGGVAVDPSNVESVTNWKQPKTVSEIHSFLGLAGYYRRFIENFSKIAKPMTRLLQKDVKYKWSEECEQSFQELKNRLISAPILILPDPKKGFQVYCDASKLGLGCVLMQDGKVVAYASRQLRPHEKNYPTHDLELAAVVHALKIWRHYLFGTRTEVYTDHKSLKYIFTQPDLNMRQRRWLELIKDYDMGIYYHPGKANVVADALSRKGYCNATEGRQLPLELCKEFERLNLGMVSRGFVAALEAKPTLIDEVREAQINDPDIQEIKKNMRRGKAIGFLEDEQGTVWLGERICVPDNKDLKDAILKEAHDTLYSIHPGSTKMYQDLKERFWWASMKREIAEYVAVCDVCQRVKAEHQKPAGLLQPLKIPEWKWEEIGMDFITGLPRTSSGHDSIWVIVDRLTKVAHFIPVKTTYSGSRLAELYMARIVCLHGVPKKIVSDRGSQFTSKFWKKLQEEMGSKLNFSTAYHPQTDGQTERVNQILEDMLRACALDFGGSWDKNLPYAEFSYNNSYQASLQMAPYEALYGRKCRTPLLWDQTGERQVFGTDILREAEEKVKIIQERLRVAQSRHKSYADNRRRELSFDEGDYVYLRVTPLRGVHRFHTKGKLAPHFVGPYKIVSRRGEVAYQLELPXSLAGVHNVFHVSQLKKCLRVPTEETNLEQIEVQEDLTYLEKPIRILEIDERRTRNRVIRFCKVQWSNHSEEESTWEREDELKSAHPHLFASFSESRGRDSV

SEQ ID NO: 20604 - protein, 988 aa, Oryza sativa
  unsure (1)..(988): unsure at all Xaa locations
  Clone ID: TF_OSC401750j.C1.p20.np
EELDSSAFQYHPHKPHGQDYGTYTCPDGEESATLMHAVHMLSAMDAVSVERAKAAHDRENWNRGKICKLESKVYRLQKELAELKGETPPPTPKLRLTARKRTCPPPRLQLASKIRVMGEAVPDRAEPVIDIISDEEEEEDPEEREPATPEEEDPSLRSDARRTTNPVEAGDWLHAVEKKLDLIQCTEQEKVSFASHQLHGPAAEWWDHFRQGRAEGEPITWQEFTAAFKKTHIPTGVVALKKREFRALNQGSRSVTEYLHDFNRLARYAPEDVRTDEERQEKFLEGLNDELSYALMSTDFRDFQQLVDKAIRQEDKYNRMEQKKRRAAQFKAQQGSNQRPRLVTGPQAPSYPQGGSSSVVRPQRQFYNNNTGNRGNDNRNMVARPAATPAQNQPVRKEQGSKPGVCFNCGDPGHYADKCPKPRRVKNAPAPNNSNAPAPKARVNHVAAAEAQNAPDVVLGTFPVNSIPASVLFDSGATHSFLSKSFASNHGMEVISLGRPLLVNTPGNQVFSTQYCPSATIEIEEVPFPSSLILLESKDLDVILGMDWLSRHRGVIDCANRKVTLTNSNGETVSFFVSSPKSHGVILNQVALQEIPIVQDYPDVFPEDLPGMPPKRDIEFRIDLVPGTNPIHKRPYRMAANELAEVKRQVDDLLQKGYIRPSTSPWGAPVIFVEKKDHTXRMCVDYRALNEVTIKNKYPLPRIDDLFDQLEGATVFSKIDLRSGYYXLRIREEDIPKTAFTTRYGLFECTVMSFGLTNAPAFFMNLMNKVFMEYLDKFVVVFIDDILIYSKTKEEHEEHLRLALEKLREHQLYAKFSKCEFWLSEVKFLGHVISSGGVAVDPSNVESVLSWKQPKTVSEIRSFLGLAGYYRRFIENFSKIARPMTRLLQKEVKYKWTEDCEQSFQELKKRLVTAPVLILPDSRKGFQVYCDASRLGLGCVLMQEGKVVAYASRQLRPHENNYPTHDLELAAVVHALKIWRNHTFAXDL

SEQ ID NO: 20605 - protein, 1576 aa, Oryza sativa
  Clone ID: TF_OSC405551j.C1.p5.fg
MAFEVGYEVAPEYRRISHDPNEEKCHVRVTLASDREDLPSIKFEAGGRSYSHACQEAALVAIGELRQRFEEELDSSAFQYHPHKPHGQDYGTYTCPDGEESAALMHAVHMLSAMDAVSVERDKAAHDRENWNRGKICKLESKVYRLQKELAELKGETPPPTPKLRLIARKRTCPPPRLQLASKIRVMGEAVPNRAEPVIDIISDEEEEEDPEEREPATPEEEDPSLRSDARRDYTTNPVEAGDWLHPVEKKLDLIQCTEQEKVSFASHQLHGPAAEWWDHFRQGRAEGEPITWQEFTAAFKKTHIPTGVVALKKREFRALNQGSRSVTEYLHDFNRLARYAPEDVLTDEERQEKFLEGLNDELSYALMSTDFRDFQQLVDKAIRQEDKYNRMEQKKRRAAQFKAQQGSNQRPRLVTGPQAPSYPQGGSSSVVRPQRQFYNNNTATPAQNQSVRKEQGSKPGVCFNCGDPGHYADKCPKPRCVKNVPAPNNSNAPAPKARVNHVAAAEAQNAPDVVLGTFPVNSIPASVLFDSGATHSFLSKSFASNNGMEVISLGRPLLVNTPGNQVFSTQYCPSVTIEIEEVPFPSSLILLESKDLDVILGMDWLSRHRGVIDCANRKVTLSSSNGETVSFFVSSPKYHGVILNQVALQEIPIVQDYPDVFPEDLPGMPPKRDIEFRIDLVPGTNPIHKRPYRMAANELAEVKRQVDDLLQKGYIRPSTSPWGAPVIFVEKKDHTQRMCVDYRALNEVTIKNKYPLPRIDDLFDQLEGATVFSKIDLRSGYHQLRIREEDIPKTAFTTRYGLFECTVMSFGLTNAPAFFMNLMNKVFMEYLDKFVVVFIDDILIYSKTKEEHEEHLRLALEKLREHQLYAKFSKCEFWLSEVKFLGHVISSRGVAVDPSNVESVLSWKQPKTVSEIRSFLGLAGYYRRFIENFSKIARPMTRLLQKEVKYKWTEDCEQSFQELKKRLVTAPVLILPDSRKGFQVYCDASRLGLGCVLMQEGKVVAYASRQLRPHENNYPTHDLELAAVVHALKIWRHYLFGNRREMYTDHKSLKYIFTQPDLNMRQRRWLELIKDYDMEIHYHPGKANVVADALSRKSYCNMSEGRHLPWELCQEFEKLNLDIVSKGFVATLQAQPTLFDQVREAQVNDLDIQEIKKNMRRGKAIGYVEDEQGTVWLGERICVPENKELKDTIMKEAHETLYSIHPGSTKMYQDLKQQFWWASMRREIAEYVALCDVCQRVKAEHQKPASLLQPLKIPEWKWEEIGMDFITGLPRTSAGHDSIWVVVDRLTKVAHFIPVKTTYTGNKLAELYMARVVCLHGVPKKIVSDRGSQFTSKFWQKLQVEMGTRLNFSTAYHPQTDGQTERVNQILEDMLRACVLDFGGSWDKNLPYAEFSYNNSYQASLQMAPYEALYGRKCRTPLLWDQTGERQVFGTDILREAEEKVKIIQERLRVAQSRQKSYADNRRRDLAFEEGDYVYLRVTPLRGVHRFQTKGKLAPRFVGPFKIVSRRGEVAYQLELPPSMAGIHDVFHVSQLKKCLRVPTEEADPDRIELQEDLTYVEKPVRILENFLGII

SEQ ID NO: 20606 - protein, 1264 aa, Oryza sativa
  Clone ID: TF_OSC407994j.C1.p15.fg
MAAVRMTLRWDGSYQPPLRRKQMPRYKPEYLFGVEGFVQELRTMSFAIGFGTAPFYAQIPHDRHEEKCRVKVTLNSNSEDIPSVMFEAGGRNYIHACQEVARIAIGELRDRYCDQLADTEYRYHPRQPQGSDRGSYLETEGIENDATTKHLVEMLWAMDETRAETVLAAQDREDRNRGKICKLEDKVDRLEKELAALKGEAPPQKARIRLTARKRALFVPRYQLAPKVRVVEKEVTPALADPPVVNNKLAEFLRVRPPTFSSTTNPVEAGDWLHAIEKKLDLLQCTDQEKVSFASHQLHGPASEWWDHFRLNRTTAEPITWLEFTAAFRKTHIPSGVVSLKKKEFRSLTQGSRSVTEYLHEFNRLARYAPEDVRTDEERQEKFLEGLNDELSYPLMTGDYPDFQKLVDKAIRQEDKYNRMEQKKRRIAYFKAQQGNSQRPRLTLGPQSMPQGGSSSVVRPQRQFFNNNAGNNIRNQAPRPVAAPTQQQPAKKEQGSKPGVCFNCGDPGHYADKCPKPRRVKVVPAQSNSTIPASKARVNHVAAAEAQDAPDMILGTFLVNLVPATVLFDSGATHSFLSMSFAGNHRMEVEDLRRPLMVSTPSNQALSLQRSPSIRIEIQGVPFLANLILLESKDLDVILGMDWLARYKGVIDCANRKVTLTSNDGRVVTVHALSSESLRSSLNQITLEEIPVVREYPDVFPDDLPGMPPKRDIEFRIDLVPGTTPIHKRPYRMAANELAEVKRQVDDLLQKGYIRPSSSPWGAPVIFVEKKDHTQRMCVDYRALNDVTIKNKYPLPRIDDLFDQLKGATVFSKIDLRSGYHQLRIKEEDIPKTAFTTRYGLFECTVMSFGLTNAPAFFMNLMNKVFMEYLDKFVVVFIDDILIYSRTKEEHEEHLRLALEKLREHQLYAKFSKCEFWLSEVKFLGHVISAGGVAVDPSNVESVTNWKQPKTVSEICSFLGLAGYYRRFIENFSKIAKPMTRLLQEEMGSKLNFSTAYHPQTDGQTERVNQILEDMLRACALDFGGSWDKNLPYAEFSYNNSYQASLQMAPYEALYGRKCRTPLLWDQTGERQVFGTDILREAEEKVKIIQEILRVAQSRHKSYADNRRRDLSFDEGDYVYLRVTPLRGVHRFHTKGKLAPRFVGPYKIVSRRGEVAYQLELPQSLAGVHNVFHVSQLKKCLRVPTEETNLEQIEVQEDLTYVEKPIRILEIDERRTRNRVIRFCKVQWSNHSEEESTWEREDELKSAHPHLFASSSESRGRDSV

SEQ ID NO: 20607 - protein, 1989 aa, Oryza sativa
  unsure (1)..(1989): unsure at all Xaa locations
  Clone ID: TF_OSC408075j.C1.p2.np
VTSWYQSHLDLRISQMMPPHSPRNLIKVLGFVRELRLMAFEVGYEVAPEYRRISHDPNEEKCRVRVTLASDREDLPSIKFEAGGRSYSHACQEAALVAIGELRQRFEEELDSSAFQYHPHKPHGQDYGTYTCPDGEESATLMHAVHMLSAMDAVSVERDKAAHDRENWNRGKICKLESKVYRLQKELVELKGETPPPTPKLRLIARKRTCPPPRLQLALKIRVMGEAVPDRAEPVIDIISDEEEEEDPEEREPATPEEEDPSLRSDARRTTNPVEAGDWLHAVEKKLDLIQCTEQEKVYFASHQLHGPAAEWWDHFRQGRAEGEPITWQEFMAAFKKTHIPTGVVALKKREFRALNQGSRSVTEYLHDFNRLARYAPEDVRTDEERQEKFLEGLNDELSYALMSTDFRDFQQLVDKAIRQEDKYNRMEQKKRRAAQFKAQQGSNQRPRLVTGPQAPSYPQGGSSSVIRPQRQFYNNNIGNRGNDNRNMVARPTATLAQNQPVRKEQGSKPGVCFNCGDPGHYADKCPKPRRVKNAPASNNSSVPAPKARVNHVAAAEAQNAPDVVLGTFPVNSIPASMLFDSGATHSFLSKSFASNHGMEVISLGRPLLVNPPGNQVSSTQYCPSATIEIEKVPFPSSLILLESKDLDIILGMDWLSRHRGVIDCANRKVTLTSSNGETVSFFVSSPKYHGVILNQVALQEIPIVQDYPDVFPEDLPGMPPKRDIEFRIDLVPGTNPIHKRPYRMAANELAEVKRQVDDLLQKGYIRPSTSPWGAPVIFVEKKDHTQRMCVDYRALNEVTIKNKYPLPRIDDLFDQLEGATVFSKIDLRSGYHQLRIREEDIPKTAFTTRYGLFECTVMSFGLTNAPAFFMNLMNKVFMEYLDKFVVVFIDDILIYSKTKEEHEEHLRLALEKLREHQLYAKFSKCEFWLSEVKFLGHVISSGGVAVDPSNVESVLSWKQPKTVSEIRSFLGLAGYYRRFIENFSKIARPMTRLLQKEVKYKWTEDCEQSFQELKKRLATAPVLILPDSRKGFQVYCDESRLGLGCVLMQEGKVVAYASRQLRPHENNYPTHDLELAAVVHALKIWRHYLFGNRTEMYTDHKSLKYIFTQPDLNMRQRRWLELIKDYDMEIHYHPGKANVVADALSRKSYCNMSEGRHLPWELCQEFEKLNLDIVSKGFVATLEAQPTLFDQVREAQVNDPDIQEIKKNMRRGKAIGYVEDEQGTVWLGERICVPDNKELKDTIMKEAHETLYSIHPGSIKMYQDLKQQFWWASMRREIEEYVALCDVCQRVKAEHQKPAGLLQPLKIPEWKWEEIGMDFITGLPRTSAGHDSIWVVVDRLTKLAHFIPVKTTYTGNKLAELYMARVVCLHGVPKKIVSDRGSQFTSKFWQKLQVEMGTRLNFSTAYHPQTDGQTERVNQILEDMLRACVLDFGGSWDKNLRSKREEYQESRYTVLQVAIYFAPCPPKCLSDSSSALFWEFRWLAAPAVQLVHQPTLVLKSRVEPEENHESANEQSQHSNRSHRTASRNAEVEQPRRSDRSHRTASRDAERTVSPLSPLCQSQFWRRTPPFPTSCGKQHEALNGSSDTNLARISRHRQEEDQEILERDRSWNETPVACYDFPTFQHMINNIRKDFEIFCDASRQGLGCVLMQERKVVAYASRQLRPHEVNYPTHDLELAAVVHALKIWRHYLIGNRCEVYTDHKSLKYIFTQTELNMRQRRWLELIKDYDLGIHYHPGKANVVADALSRKAYCNVAQIRPDQDRLCRXMEKLRLTVVQSGVPASLTVQPTLESQIREAQKDDEGIKELIKRIQEKKDTNFSIDDQGTVWCGPRICVPAKKELRDLILKEAHESAYSIHPGSTKMYQDIKAYFWWAGMKRDVTEYVALCDICQRVKAEHQRPAGLLQPLPIPERKWEEIGMDFITGLPRTPSGYDSIWVIVDRLTKSAHFMPVKTTFDGKELAEKTIKFYKVQWSNHSEDEATWEREDLL

SEQ ID NO: 20608 - protein, 1082 aa, Oryza sativa
  Clone ID: TF_OSC409804j.C1.p8.gm
MVNTRTGSGSGSGSGAANNGGDPTLAQILAQQTQLINLLVQQAQNQQANNQNQNPSPPPQNKLADFLRVRPPTFSSTTNPVEAGDWLHAVEKKLDLIQCTEQEKVSFASHQLHGPAAEWWDHFRQGRAEGEPITWQEFTAAFKKTHIPTGVVALKKREFRALNQGSRSVTEYLHDFNRLARYAPEDVRTDEERQEKFLEGLNDELSYALMSTDFRDFQQLVDKAIRQENKYNRMEQKKRRAAQFKAQQGSNQRPRLVTGPQAPSYPQGGSSSVVRPQRQFYNNNTGNRGNDNRDMVARPAATPAQNQPVRKEQGSKPGVCFNCGDPGHYADKCPKPRRVKNAPAPNNSNAPVPKARVNHVAAAEAQNAPDVVLGMPPKRDIEFRIDLVPGTNPIHKRPYRMAANELAEVKRQVDDLLQKGYIRPSTSPWGAPVIFVEKKNHTQRMCVDYRALNEVTTKNKYPLPRIDDLFDQLEGATVFSKIDLRSGYHQLRIREEDIPKTAFTTRKGFVATLEAQPTLFDQVREAQVNDPDIQEIKKNMRRGKAIGYVEDEQGTVWLGERICVPDNKELKDTIMKEAHETLYSIHPGSTKMYQDLKQQFWWASMRREIAEYVALCDVYQRVKAKHQKPAGVGKPGRTSALAAGRRSPVAAADHPISGEVANPGRPLMILRSGEKSVWVAGESMPLVVEGVIMIQIEILGVTASEPYTRKKGLSLLDVVGVHYAVCPFDLSIALRVRNRGEANLDSQSNTVILEVSADELRAVVCYDAVRQSISAEYPFDKLDGIIGLDFSCGRCLNPLGEFVDGHKQELVAALSSWEWSEYVEPQHENGQEEMFAVVGRDAFEKYSVWSLFVQIFADHTVDFGLSGYLLSFSVVFGQLITTQQLNERGPPVFRGLDIGNDPRERARGPGPREWGPHVSLSVHGGPGARGWRRPAPWVPRVSRTRGRGRLTAGPYLAAAGRARRRPFPAQPTGDGAPAPRWSPPGDHRRGGTAPERAERTGTKGRSTAHPGSTATTGTAAEAEEGGGAVRDDEDDGAPTVGGRNGGADEVDEDAAKPMEVTPRREEARGDGGMRRIRRRRRR

SEQ ID NO: 20609 - protein, 961 aa, Oryza sativa
  Clone ID: TF_OSC5118j.C1.p2.fg
MGVAGESIASGFEGEIMIQERCTVMPPHSPRNLIKVLGFVRELRLMAFEYHPHKPHGQDYGTYTYPDGEESATLMQAVHMLSSMYAVSVERDKAAHDRENWNRGKICKLESKVYRLQKELAELKGETPPPTPKLHLTARKRTCPPPRLQLASKLRVMGDAVPDRAEPVIHVLSDEEEEEYPEERMVNTRTGSGSGAANNGGDSTLAQILAQQTQLINLLVQQAQNQQANNQNQNQPPPPQNKLADFLRLHGPAAEWWDHFRQARAEGEPITWQEFTAAFKNTHIMTGVVALKKREFRALNQGSRSVTEYLHDFNRLARYAPKYVRTDEERQEKFLEGLNDELSYALMSTDFRDFQQLVDKAIRQEDKYNRIEQKKRRAAQFKAQQGSNQRSRLVTGPQATSYPQGGSSSVARPQRQFYNNNTGNRGNDNRNVVARPAATPAKNQPVRKEQGSKPGVCFNCGDPGHYADKCPKPRRVKNAPAPNNSNTPAPKARVNHVVAAEAQNAPDVVLGMPPKRDIEFRIDLVPGTNPIHKRPYRMAANELAEIKRQVDDLLQKGYIRPSTSPWGAPVIFVEKKDHTQRVFMEYLDKFVVVFIDDILIYSKTKEEHEEHLRLALEKLREHQLYAKFSKCEFWLSEVKFLGHVISSGGVAVDPSNVESVLNWKQPKTVSEIRSFLGLAGYYRRFIENFSKIARPMTRLLQKDVKYKWTEDCEQSFQELKKRLVTAPVLILPDSRKGFHVYCDASRLGLGCVLMQEGMVVAYASKQLRPHENNYPTHDLELAAVVHALKIWRHYLFGNRTEMYTDHKSLKWLELIKDYDMEIHYHPGKANVVADALSRKSYCNMSEGRHLPWELCQEFEKLNLGIVSKGFVAALEAQPTLFDQVREAQGNDPDIQEIKKNMRRGKAIGYVEDEQGTVWLGERIWVPDNKELKDTIVKEAHETLYSIHPRSTKMYQDLKQQF

SEQ ID NO: 20610 - protein, 1336 aa, Oryza sativa
  unsure (1)..(1336): unsure at all Xaa locations
  Clone ID: TF_OSC5135j.C1.p1.np
MVAAGDHRRGGAAPEKGEGRGKXNRSTAHPGSTVTGTATGAEEGGGAARVNEGDGVPAVGGRNGGVDEVGEVAANPKKATPKRERVRGDDGGGPELGGDGGEREXRRELDSDGERERRVAETVEGGTGSVYIVLGGGENGRRGRKPARRSRAPSMRRRGLRECFQTNPREREREKLNDDVNVLFNSWFGMVNSXFGDSTVQPMPRYKPEYLFGTEGFVQELRTMSFLIGFGIAPLYAQIPHDRDEEKCRVKVTLNSNREDIPSVMFEAGGGSYIHACQEVARIAIGELRESYNDRLADTEYRYHPRQPQGSDHGSYLEPAGIENDATTRHLVEMLWAMDETRAEIVIAAQDREDQNRGKICKLEDKLDRLEKELAALKGEAPPQKARVRLTARKRALFVPRYQLAPKVRVVEKEVAPADPPVVNVSDDDEEESKRTHSKIEWGPTQDDGDVPNEPSILRCPEDLDNGNGPNNNNNNNNAENPTLAQVLAQQTQLMNLMMQQLQNQQNQGNNHAPPQNKLAEFLRVRPPVFSSTTNPVEASDWLHAIEKKLDLLQCRDQEKVSFASHQLHGPASEWWDHSCLNRTTAEPISWLEFTAALRKTHIPSGVVSLKKKEFRSLTQGSRTVTEYLHEFNHLARYAPEDVRTDEERQEKFLEGLNDELSYPLMTGDYHDFQKLVDKAIRQEDNYNRMEQKKHRIAHFKAQQGNSQRPRIASGPLSMPQGGSSSVVRPQRQFFNNNAGNNNRKPAPCPVATPSQQXPAKREQGSKPGVCFNCGDPGHYADKCPKPCRAKVVPAQNNSSAPAAKARVNHVAAAEAQGAPDVILGTFPVNSVPATVLFDSGATHSFLSMSFAENHGMEVEELRRPLMVSTPSNQALSSQRSPSVRIEIRGVPFLANLILLESKDLDVILGMDWLARYKGVIDCANRKVTLTSNDGQVVTVHALPSEPRRSSLNQITLEEIPIDREYPDVFPDDLPGMPPKRDIEFRIDLVPGTTPIHKRPYRMAANELAEVKRQVDDLLQKGYIRPSSSPWGAPVIFVEKKDHTQRMCVDYRALNDVTIKNKYPLPSIDDLFDQLKGATVFSKIDLRSGYHQLRIKEYGLFECTVMSFGLTNAPAFFMNLMNKVFMYGLFECTVMSFGLTNAPAFFMNLMNKVFMEYLDKFVVVFIDDILIYSXTKEEHEEHLRLALEKLREHQLYAKFSKCEFWLSEVKFLGHVISAGGVAVDPSNMESVTNSKQPKTVTEIRSFLGLAGYYRRFIENFSKIAKPMTRLLQKDVKYKRLEECEQSFQELKSHLISAPILILPDPKKGFQVYYDASKGCLMSELTHILLYQCSQLH

SEQ ID NO: 20611 - protein, 1320 aa, Oryza sativa
  Clone ID: TF_OSC5376j.C1.p5.fg
MGVAGESIASGFEGEIMIQERCTVMPPHSPRNLIKVLGFVRELRLMAFEYHPHKPHGQDYGTYTYPDGEESATLMQAVHMLSSMYAVSVERDKAAHDRENWNRGKICKLESKVYRLQKELAELKGETPPPTPKLHLTARKRTCPPPRLQLASKLRVMGDAVPDRAEPVIHVLSDEEEEEYPEERMVNTRTGSGSGAANNGGDSTLAQILAQQTQLINLLVQQAQNQQANNQNQNQPPPPQNKLADFLRLHGPAAEWWDHFRQARAEGEPITWQEFTAAFKNTHIMTGVVALKKREFRALNQGSRSVTEYLHDFNRLARYAPKYVRTDEERQEKFLEGLNDELSYALMSTDFRDFQQLVDKAIRQEDKYNRIEQKKRRAAQFKAQQGSNQRSRLVTGPQATSYPQGGSSSVARPQRQFYNNNTGNRGNDNRNVVARPAATPAKNQPVRKEQGSKPGVCFNCGDPGHYADKCPKPRRVKNAPAPNNSNTPAPKARVNHVVAAEAQNAPDVVLGMPPKRDIEFRIDLVPGTNPIHKRPYRMAANELAEIKRQVDDLLQKGYIRPSTSPWGAPVIFVEKKDHTQRVFMEYLDKFVVVFIDDILIYSKTKEEHEEHLRLALEKLREHQLYAKFSKCEFWLSEVKFLGHVISSGGVAVDPSNVESVLNWKQPKTVSEIRSFLGLAGYYRRFIENFSKIARPMTRLLQKDVKYKWTEDCEQSFQELKKRLVTAPVLILPDSRKGFHVYCDASRLGLGCVLMQEGMVVAYASKQLRPHENNYPTHDLELAAVVHALKIWRHYLFGNRTEMYTDHKSLKWLELIKDYDMEIHYHPGKANVVADALSRKSYCNMSEGRHLPWELCQEFEKLNLGIVSKGFVAALEAQPTLFDQVREAQGNDPDIQEIKKNMRRGKAIGYVEDEQGTVWLGERICVPDNKELKDTIVKEAHETLYSIHPRSTKMYQDLKQQFWWASMRREIAEYVALCDVCQRVKAEHQKPAGLLQPLKIPEWKWEEIELYMARVVCLHGVPKKIVSDRGSQFTSKFWQKLQVEMGTRLNFSTAYHPQTDGQTERVNQILEDMLRPCVLDFGRSWDKNLPYAEFSYNNSYQASLQMAPYEALYGRKCRTPLLWDQTGERQVFGTDILREAEEKVKIIQERLRVAQSRQKSYADNRRRDLTFEGDYVYLRVTPLRGVHRFQTKGKLAPRFVGPFKIVSRRGEVAYQLELPPSMAGIHDVFHVSQLKKCLRVPTEEADPEHIELQEDLTYVEKPVRILEVSERNTRNRVIRFCKVQWSNHSEEEATWEREDELKSAHPHLFAGSSESRGRDSV

SEQ ID NO: 20612 - protein, 1638 aa, Oryza sativa
  unsure (1)..(1638): unsure at all Xaa locations
  Clone ID: TF_OSC5848j.C1.p1.np
VTSWYQSHLDLRTSQMTPPHPPESLINAVGFVRELRMMAFEVGYDVAPEYRQIPYDPNEEKCRVRVTLTSDREDLLSIKFEAGGRKYSHACQEVALVAIGELRHRFDEELESSAFQYHPHKPHGQDYGVYHCPEDEDSTTLKHAVYMLSAMDAVGVEREKTADDRENWNRGRICKLESKVYRLQKELAELKGEAPPPAPKLRLTARKRTRPPPRIQLASKTRVVGDVVPDHAEPIIHVLSNDEEEEDPEEREPATPEEEDPSLRSDARRTTNPVEAGDWLHAVEKKLDLILRTEXEKVSFALHQLHGPAAEWWDHFCQNRAAGEPITWREFTATFKKTHIPSGVVALKKRDFRALNQGSCSVTEYLHDFNRLAHYVPDDVRTDEERQEKFLEGLNDELSYALMAIEYRNFQQLVDKAIRQEDKYNRMEQKKRRAAYFKAQXGNSQRPRIALGPQAAPYPXGGSSSVARPQRQFYNNNTGNHSNDNRNVVTRPVAAPTQNQPVRKEQGIKPGVCFNCGDPGHYADKCPKPRRVKNAPVQNNSNAPAPKARVNHVAAAEAXNAPDVVLGTFPVNSIPATVLFDFGATHSFLSKSFASNHGMEVISLGRPLLVNTPGNQVSSTQYCPSITTEIQEIPFPSLILLESKDLDVILGVDWLTHHRGVIDCANRKVTLTSSNGXTVSFFVSSPRSHGLTLNQVALQEIPIVQDYPDVFPEDLPGMPPKRDIEFRINLVPGTNPIHKRPYRMAAIELAEVKRQVDDLLQKGYIRPSTSPWGAPVIFVEKKDHTQRMCVDYRALNEVTIKNKYPLPRIDDLFDQLEGATVFSKKDLCSGYHQLXIREEDIPKIAFTTRYGLFESTVMSFGLTNAPAYFMNLMNNVFMEYLDKFVVVFIDDILIYSKTKEEHEEHLRLALEKLREHQLYAKFSKCEWLPEVKFLSHVISAGGVVVDPSNVEXVLNWKQPKMVSEIRSFLGAGYYRRFIENFSKIARPMSRLLQKDVKYKWTEECEQSFQELKKRLVTAPMLVLPDPRKGFQVYCDASRHGLGCVLMQDGKVVAYTSRQLRPHENNYPTHDVELAAVVHELKIWRHYLFDNRTEMYTDHKCLKYIFTQPNLNMRQRRWLELIKDYDMEIHYHPGKANVVADALSRKSYCNMSEGRHLPWELCQELEKLNLGIVNKGFVAALEAQPTLFDQVREAQVNDLDIXEIEKNMRRGKTIGYIEDEQGTVWLGERICVPDNKELKDTIMKEAHETLYSIHPGSTKMYQDLKQQFWWASMRXEIAEYVALCDVCQRVKAEHQKPACQLQPLKILEWKWEEIGMDYITGLPRTSAGQDSIWVVVDRLTKVAHFIPVKTTYSGNKLAELYMARVVCLHGVPKKIVSDRGSQFTSMFWRKLQEEMRTRLNFSTTYHPQTDGQTKRVNQILEDMLRACVLDFGGSWDKNMPYAEFGYINSYQASLQMAPYEALYGRKCRTPLLWDQTGERQVFGTDILREAEEKVKIIQERLRIAQSRXKSYADNRRRDLTFEEGDYVYLRVTLLRGVHRFQTKGKLAPRFVGPFKIVSRRGEVAYQLELPPSMAGIHDVFHVSQLKKCLRVPTEEADPEHIELQKDLTYVEKPVRILVFPTFRRRAFTLRKAIDQYXNA

SEQ ID NO: 20613 - protein, 1141 aa, Oryza sativa
  Clone ID: TF_OSC900055j.C1.p25.gm
MVNTRTGSGSGSGSGAANNGGDPTLAQILAQQTQLINLLVQQAQNQQANNQNQNPSPPPQNKLADFLRVRPPTFSSTTNPVEAGDWLHAVEKKLDLIQCTEQEKVSFASHQLHGPAAEWWDHFRQGRAEGEPITWQEFTAAFKKTHIPTGVVALKKREFRALNQGSRSVTEYLHDFNRLARYAPEDVRTDEERQEKFLEGLNDELSYALMSTDFRDFQQLVDKAIRQENKYNRMEQKKRRAAQFKAQQGSNQRPRLVTGPQAPSYPQGGSSSVVRPQRQFYNNNTGNRGNDNRDMVARPAATPAQNQPVRKEQGSKPGVCFNCGDPGHYADKCPKPRRVKNAPAPNNSNAPVPKARVNHVAAAEAQNAPDVVLDVFPEDLPANELAEVKRQVDDLLQKGYIRPSTSPWGAPVIFVEKKNHTQRMCVDYRALNEVTTKNKYPLPRIDDLFDQLEGATVFSKIDLRSGYHQLRIREEDIPKTAFTTRYGLFECTVMSFGLTNAPAFFMNLMNKVFMEYLDKFVVVFIDDILIYSKTKEEHEEHLRLALEKLREHQLYAKFSKCEFWLSEVKFLGHVISSGGVAVDPSNVESVLSWKQPKTVSEIRSFLGLAGYYRRFIKNFSKIARPMTRLLQKEVKYNKGFVATLEAQPTLFDQVREAQVNDPDIQEIKKNMRRGKAIGYVEDEQGTVWLGERICVPDNKELKDTIMKEAHETLYSIHPGSTKMYQDLKQQFWWASMRREIAEYVALCDVYQRVKAKHQKPAVKKCLRAPTEEADPDRIELQEDLTYVEKPVRILELILISSPVLLNLEDEIPFKGASPPSPPSPRRRRPSSIRRRAAASTITVACRRRHCFRQGVGKPGRTSALAAGRRSPVAAADHPISGEVANPGRPLMILRSGEKSVWVAGESMPLVVEGVIMIQIEILGVTASEPYTRKKGLSLLDVVGVHYAVCPFDLSIALRVRNRGEANLDSQSNTVILEVSADELRAVVCYDAVRQSISAEYPFDKLDGIIGLDFSCGRCLNPLGEFVDGHKQELVAALSSWEWSEYVEPQHENGQEEMFAVVGRDAFEKYSVWSLFVQIFADHTVDFGLSGYLLSFSVVFGQLITTQQLNERGPPVFRGLDIGNDVFRLCSPRNTSSKLCRE

SEQ ID NO: 20614 - protein, 1564 aa, Oryza sativa
  Clone ID: TF_OSC900186j.C1.p15.fg
MVDLVKMIPTFPESPFSQGKILKSSKASKATPGLEWYIPGLEIDLYSRMPRYKPEYLFGVEGFVQELRTMSFAIGFGTAPFYAQIPHDRHEEKCRVKVTLNSNSEDIPSVMFEAGGRNYIHTCQEVARIAIGELRDRYSDQLADTEYRYHPRQPLGSDRGSYLETKGIKNDATTRHLVKMLWAMDETRAETVLAAQDREDRNRGKICKLEDKVDRLEKELAALKGEAPPQKARIRLTARKRALFVPRYQLAPKVRVVEKEVTPALADPPVVNMVLTRNNGNDPNNNNNNSNGENPTLAQVLAQQAQLMNMMMQQLQNQQNQGNNHAPPQNKLAEFLRVRPPTFSSTTNPVEAGDWLHAIEKKLDLLQCADQEKVSFASHQLHGPASEWWDHFRLNRTTAEPITWLEFTAAFRKTHIPSGVVSLKKKEFRSLTQGSRSVTEYLHEFNRLARYAPEDVRTDEERQEKFLEGLNDELSYPLMTGDYPDFQKLVDKAIRQEDKYNHMEQKKRRIAHFKAQQGNSQRPSLTLGPQSMPQGGSSFVVRPQHQFFNNNAGNNIRNQAPRPVAASTQQQPAKKEQGSKSGVCFNCGDPGHYADKCPKPRRVKVVPAQSNSTVPASKARVNHVAAAEAQDAPDVILGTFLVNLVPTTVLFDSGATHSFLSMSFAGNHGMEVEDLRHPLMVSTPSNQALSLQRSPSVRIEIQGVPFLANLILLESKDIDVILGIDWLARYKGVIDCANRKVTLTSNDGRVVTVHALSSESLRSRLNQITLEEIPVVREYPDVFPDDLPGMPPKRDIEFRIDLVPGTTPIHKRPYRMAANELAEVKRQVDDLLQKGYIRPSSSPWGAPVIFVEKKDHTQRMCVDYRALNDVTIKNKYPLPRIDDLFDQLKGATVFSKIDLRSGYHQLRIKEEDIPKTAFTTRYGLFECTVMSFGLTNAPAFFMNLMNKVFMEYLDKFVVVFIDDILIYSRTKEEHEEHLRLALEKLREHQLYAKFSKCEFWLSEVKFLGHVISAGGVAVDPSNVESVTNWKQPKTVSEIRSFLGLAGYYRRFIENFSKIAKPMTRLLQKDVKYKWSEECEQSFQELKNRLISAPILILPDPKKGFQVYCDASKLGLGCVLMQDGKVVAYASRQLRPHEKNYPTHDLELAAVVHALKIWRHYLFGTRTEVYTDHKSLKYIFTQPDLNMRQRRWLELIKDYDMGIHYHPGKANVVADALSRKGYCNATEGRQLPLELCKEFERLNLGMVRRGFVAALEAKPTLIDQVREAQINDPDIQEIKKNMRRGKAIGFLEDEQGTVWLGERICVPDNKDLKDAILKEAHDTLYSIHPGSTKMYQDLKERFWWASMKREIAEHVAVCDVCQRVKAEHQKPAGLLQPLKIPEWKWEEIGMDFITGLPRTSSGHDSIWVIVDRLTKVAHFIPVKTTYSGSRLAELYMARITDGQTKRVNQILEDMLRACALDFGGSWDKNLPYAEFSYNNSYQASLQMAPYEVLYGRKCRTPLLWDQTGERQVFGMDILREAEEKVKIIQERLRVAQSRHKSYADNRRRDLSFDEGDYVYLRVTPL

SEQ ID NO: 20615 - protein, 773 aa, Oryza sativa
  Clone ID: TF_OSC900399j.C1.p17.gm
MVLTRSNGNGPNNNNNNNNGENPTLAQVLAQQAQLMNMMMQQLQNQQNQGNNHAPPQNKLAEFLRVRPPTFSSTTNPVEAGDWLHAIEKKLDLLQCTDQEKVSFASHQLHGPASEWWDHFRLNRTTAEPITWLEFTAAFRKTHIPSGVVSLKKKEFRSLTQGSRSVTEYLHEFNRLARYAPEDVRTDEERQEKFLEGLNDELSYPLMTGEQKKCRIAHFKAQQGNTSTPQQPAKREQGSKPGVCFNCGDPGHYADKCPKPRRVKVVPDQSNSTVPASKARVNHVVAAEAQDAPDVILEKKDHTQRMCVDYRALNDVTIKNKYPLPRIDDLFDQLKAEGRGRADRVHGSGAHAAASRSTVDRPLGAPEGGQAGAAGGRRRACAPMVAAGYHQRDGAAPERGEGKGETKRRSTAHHGSTATMETATGAEEGGGAARVDGVDGVPAVGERNGGVDEVGEDAAKPKEAASRWEVVRGDNGGGPELGSDGGERERRRELDSGGERGRRVAETVVGSSGRVYIGLGVREGGRRRGKWARETRPPLMAPASKCEFWLSEVKFLGHVISAGGVAVDPSNVESVTNWKQPKTVSEIRRFLGLAGYYRRFIENFSKIAKPMTRLLQKDVKYKCLATPSSPLLQPCSAIAPVIAVARGGRHRGRRCVAVLVRPFAVAVDRRNTAAVVKPKVAAASSLTPSPSVDLPPPFWSPVSSPRHPLRAGALRSRRRAVVRRRVCKPEPPPVVTSPLTSSSSSLVVRPWTGEDFEEFQGQQGKSHRSQTTL

SEQ ID NO: 20616 - protein, 1820 aa, Oryza sativa
  unsure (1)..(1820): unsure at all Xaa locations
  Clone ID: TF_OSC9428j.C1.p1.np
SMLGGNXLDSWFGMVNSWFGGLVCSTMPPHSPRNLFKVLGFVRELRLMVFEVGYEVAPEYRQISHDPDEEKCRVRVTLASDREDLPSIKFEAGGRSYSHACQEAALVAIGELRQRFEEELDSSAFQYHPHKPHGQDYGTYTCPDGEESATLMHAVHMLSAMDAVSVERDKAAHDRENWNRGKIYKLKSKVYRLQKELAELKGETPPPTPKLRLTARKRTCPPPRLQLALKIRVMGEAVPDRAEPVIDIISDEEEEEDPEEREATPEEEDPPVVPAYRQMVNTRTGTGSGSGSGSGATNNGGDPTLAQILAQQTQLINLLVQQAQNQQANNQNHPPPQNKLADFLRVRPPTFSSTTNPVEAGDWLHAVEKKLDLIQCTEQEKVSFASHQLHGPAAEWWDHFRQGRAEGEPITWQEFTAAFKKTHIPAGVVALKKREFRELNQGSRSVTKYLHDFNRLARYAPEDVRTDEERQEKFLEGLNDELSYALMSTDFRDFQQLVDKAIRQEDKYNRMEQKKRRAAQFKTQQGSNQRPRLVTGPQVPSYPQGGSSSVVRPQRQFYNNNSGNDNRNVVARPAATPAQNQPVRKEQGSKPGVCFNCGDPGHYADKCPKPRRVKNAPAPNNSNAPAPKARVNHVAAAEAQSAPDVILGTFPVNSIPATVLFDSGATHSFLSKSFASNHGMEVISLGRPLLVNTLGNQVFSTQYCPSATIEIEEVPFPSSLILLESKDLDVILGMDWLSRHRGVIDCASRKVTLTNSIGETVSFLASSPKSHGVILNQVALQEIPIVQDYPDVFPEDLLGMPPKRDIEFRIDLVPGTNPIHKRPYRMAANELAEVKRQVDDLLQKGYIRPSTSPWGAPVIFVEKKDHTQRMCVDYRALNEVTIKNKYPLPRIDDLFDQLEGATVFSKIDLRSGYHQLRIREYGLFECTVMSFGLTNAPAFFMYHQLRIREYGLFECTVMSFGLTNAPAFFMNLMNKVFMEYLDKFVVVFIDDILIYSKTKEEHEEHLRLALEKLREHQLYAKFSKCEFWLSEVKFLGHVISSGGVAVDPSNVESVLSWKQPKTVSEIRSFLGLAGYYRRFIENFSKIARPMTRLLQKEVKYKWTEDCERSFQELKKRLVTAPVLILPDSRKGFQVYCDASRLGLGCVLMQEGKVVAYASRQLRPHENNYPTHDLELAAVVHALKIWRHYLFGNRTEKFEKLNLGIVSNGFVAALEAKPTLFDQVREAQVNDPDIQEIKKNMRRGKAIGYVEDEQGTVWLGERICVPENKGLKDTIMKEAHETLYSIHPGSTKMYQDLKQQFWWASMRREIAEYVALCDVCQRVKAEHQKPAGLLQPLKIPEWKWEEIGMDFITGLPRTSAGHDSIWVVVDRLTKVAHFIPVKTTYTGNKLAELYMARVVCLHGVPKKIVSDRGSQFTSKFWQKLQLEMGTRLNFSTAYHPQTDGQTERINQILEDMLRACVLDFGGSWDKNLPYAEFSYNNSYQASLQMAPYEALYGRKCRTPLLWDQTGERQVFGTDILREAEEKVKIIQERLRVAQSRQKSYADNRRRDLAFEEGDYVYLRVTPLRGVHRFQTKGKLAPRFVGPFKIVSRRGEVAYQLELPPSMAGIHDVFHVSQLKKCLRVPTEEADPDRIELQEDLTYVEKPVRILEVTERNTRNCVIRFCKVQWSNHSEEEATWEREDELNALFRLPPLPWSPVPPSRRAAALVRRRRRPSSAAPRHPPPSPPLAVAAVRCARRXGSLATSSFAADRRSSPSPTDRAAAVVPLVAGHHRSSFVVVVSTVGFVSSSSTCTCPPKPRPTALAPARSPIRASHCSSMLV

SEQ ID NO: 20617 - protein, 1181 aa, Oryza sativa
  Clone ID: TF_OSC29927j.C1.p3.fg
MSDLVEKNGENGNQDGASSKGTSPPKGATIPFDYNKLTIPSHNFVSVPSGRAPRFDGTHYAAWKHKMKLHLISLHPSIWKVVCTGIDVPHDDMELTSEQEQLIHRNAQASNAILSALSPEEFNKVDGLEEAKEIWDTLQLAHEGSPAVREAKIELLEGRVGRFVMDDKETPQEMYDRMMILVNKIKGLGSEDMTNHFVVKRLLRAFGPRNPSLVSMIRERKDFKRLTPSDILGRIVSHEMQEEEARQVSQIVKNVAMIKNQEVALKAKQEEESSCEESEDEEMAFIVKRFKHFLRKRGYGKGRKDDDKGKRQSKRACFNCGEYGHFINDCPNDEESDNELDDVLKSFSKPAMQHLAKLMRALDSKEQSLERQEELFILEKKRNIALEESLAKECAKNEQLANELNLANGSLASLRDVNETLQEKFANLDKTLKKENERLGTLVKYGCMKTYHSKDAIYKTITAHPNKDGHGLGFSSGSPVSKRVMTYSSGGSSWVVDSGCTNHMTGERSMFTSLDEEGGSRENIVFGDDGKGKVMGLGKIAISKNQSLSNVLLVNSLSYNLLSVFQLYKLGFNCLFTDVDVTVFRRDDSSVAFKGVLKGDLYLVDFDIDRVNPEACLIAKSSMGWLWHRRLAHVGMRNLASLLKGEHILGLSNVSFEKDRVCSACQAGKQVGSPHPIKNIMTTTRPLELLHMDLFGPVAYISIGGNKYGFIIVDDFSRFTWVYFLHDKSEAQDVFKRFAKQAQNLYDLTIKRVRSDNGGEFKNTQVEEFLDEEGIKHEFSAPYDPPQNGIVERKNRTLIEAARAMIDEYKISDFSPKVDEGFLLGYESNAHAYRVFNKTSGIVEVTRDVTFDESNGFQGEQVVVHVVGDVDPSQAIGPEVPGSTVRNLRTSGSEDVPTVQVDGIDAASTLEHTDQAQRPKQNVIGTKWIFRNKQDEHGVIVRNKARLFQMDVKSAFLNGPISELVYVEQPPGFEDPKLPNHVYKLHKALYGLKQAPRACSIMTKRFEMSMMGELTFFLGLQVKQALEGTFISQTKYVKDILKKFGMEDAKPIKTPMPTNGHLDLDHNGKCVDQKVYRSMRGSLLYLCASRPDIMLSVCMCACFQAEPKECHLIAVKRILRYLVHTPNLCLWYPKGCGFELLGYSDSDYAKCKVDRKSTTGTCQFLGRSLVFWSSKKQNSFG

SEQ ID NO: 20618 - protein, 692 aa, Oryza sativa
  Clone ID: TF_OSC400219j.C1.p70.gm
MSNEVNHVGKAHMLNGTTTPLGKLKCFAITGTPLTEIDHHNLQLNAQAMNALFNSLSQEEFDRVSNLETAYEIWNKLAKIHEGASEYKDAKLHFLKIQYETFSILPHESVNDMYGRLNVIVNDLKGLGATYTDLEDAQKMLRALPEKYETLVTMLINSDMLRMTPASLLVKINTNDIYKLKKKEMEEASPSKKCIALQAEVEDKGKTKVNVANEDLEEEIALLARRFNDLLGKRNERGRGSNSNRRRNRRPNKTLTNLRCFECGEKGHFASKCPSKDDDGDKSSKKKSGGYKLMKKLKKEGKKIEAVIREWDSNEESSASSGSEEEGGDDASSKKKKMAVVAIKEAPSLFAPLCLMAKGSSKVTSLSDSESDDVSYHELVSMFEELHAYSEKEIVKFKALKKDHASLEDHRCLLYPPPPSPSSLAVGSALAPCDLEPPSPPSLQPCAAVAPVVVVARGGRHRGRRRVAVLVRPFAAAVDRRSTAVVVKPKTAAASSSSPPPSVAFPPWSCVSICDASLVVENNELKEQVAKLNKSLERCFKGKNTLDKILSEQRCILNKKGLGFIPKKGKKPSHRAIHFVKSNGKYCSKCRDVGHLVNDCPGGYASNSKAYHVYNKNKGIVEETADVQFDETNGSQEGHENLDNVGDEGLMRAMKNMSIGDVKPIEVEDKPSTSTQDEPYRLPLRQVKLKLK

SEQ ID NO: 20619 - protein, 644 aa, Oryza sativa
  Clone ID: TF_OSC900079j.C1.p11.gm
MNALFNSLSQEEFDRVSNLETAYEIWNKLAKIHEGASEYKDAKLHFLKIQYETFSILPHESVNDMYGRLNVIVNDLKGLGATYTDLEDAQKMLRALPEKYETLVTMLINSDMLRMTPASLLVKINTNDIYKLKKKEMEEASPSKKCIALQAEVEDKGKTKVNVANEDLEEEIALLARRFNDLLGKRNERGRGSNSNRRRNRRPNKTLTNLRCFECGEKGHFASKCPSKDDDGDKSSKKKSGGYKLMKKLKKEGKKIEAVIREWDSNEESSASSGSEEEGGDDASSKKKKMAVVAIKEAPSLFAPLCLMAKGSSKVTSLSDSESDDVSYHELVSMFEELHAYSEKEIVKFKALKKDHASLEDHRCLLYPPPPSPSSLAVGSALAPCDLEPPSPPSLQPCAAVAPVVVVARGGRHRGRRRVAVLVRPFAAAVDRRSTAVVVKPKTAAASSSSPPPSVAFPPWSCVSICDASLVVENNELKEQVAKLNKSLERCFKGKNTLDKILSEQRCILNKKGLGFIPKKGKKPSHRAIHFVKSNGKYCSKCRDVGHLVNDCPGGYASNSKAYHVYNKNKGIVEETADVQFDETNGSQEGHENLDNVGDEGLMRAMKNMSIGDVKPIEVEDKPSTSTQDEPYRLPLRQVKLKLK

SEQ ID NO: 20620 - protein, 1468 aa, Oryza sativa
  Clone ID: TF_OSC402542j.C1.p9.fg
MDGLVPLIFKVLKKKKAMRVCLLLCTAPSLVDYSIPLAGVHRRSGEQVSGTSAFDVLHREKAAIRLNHYMSIISTIQKPYYRHCDFTMAGFADALRPDKFTGVHFKRWQIRVTLWLTAMKCFWVSTGKPEGVLTAEQQKQFEEATTLFVGCILSVLGDRLVEVYMHMTDAKELWDALNTKFGATDASNDLYIMEQFHDYKMADNRSVVEQAHEIQTMAKELELLKCVLPDKFVAGCIIAKLPPSWRSFGTALKHKRQEYSVEGLIASLDVEEKAREKDAASKGDGGQSSANVVHKAQNKSKGKYKAQQTTNFKKQKKNNINPNQDERTCFVCGQVGHLARKCLQCKGMKAPAGQTSKSANVTIGNTGDGSGYGNLPTVFSVNQSTNWWVDTGANVHVCADISLFSSYQVARGSTVLMGNGSHASVHGVGTVDLKFTSGKIVQLKNVQHVPSIDRNLVSGSRLTRDGFKLVFESNKVVVSKHGYFIGKGYECGGLFRFSLSDFCNKSVNHICGSVDDEANVWHSRLCHINFGLMSRLSSMCLIPKFSIVKGSKCHSCVQSKQPRKPHKAAEERNLAPLELLHSDLCEMNGVLTKGGKRYFMTLIDDATRFCYVYLLKTKDEALDYFKIYKAEVENQLDRKIKRLRSDRGGEFFSNEFDLFCEEHGIIHERTPPYSPESNGIAERKNRTLTDLVNAMLDTAGLPKTWWGEALLTSNHVLNRVPNRNKDKTPYEIWIGRKPSLSYLRTWGCLAKVNVPITKKRKLGPKTVDCVFLGYAHHSIAYRFLIVKSEVPDMHVGTIMESRDATFFESFFPMKDTHSGSNQPSEIIPNSITPPEQTEHTHELVSEEDVSEAPRRSKRQRTAKSFGGDFTVYLVDDTPKSISEAYASPDADYWKEAVRSEMDSIIANGTWEVTERPYGCKPVGCKWVFKKKLRPDGTIEKYKARLVAKGYTQKEGEDFFDTYSPVARLTTIRVLLSLAASHGLLVHQMDVKTAFLNGELDEEIYMYQPDGFVVEGQEGKVCKLLKSLYGLKQAIKQWHEKFDKTLTSAGFAVNEADKCVYYRYGGGEGVILCLYVDDILIFGTNLEVINEVKSFLSQNFDMKDLGVADVILNIKLIRGENGITLLQSHYVEKILNRFGYIDSKPSPTPYDPSLLLRKNKRIARNQLEYSQIIGSLMYLASATRPDISFAVSKLSRFTSNPGDDHWRALERVMRYLKGTVELGLHYTGYPAVLEGYSDSNWISDVDEIKATSGYVFTLGGGAVSWRSCKQTILTRSTMEAELTVLDTATVEAEWLRDLLMDLPVVEKPVPAILMNCDNQTTCEKTIEVCQEIKKLRSYNVGLHPNSEKPGRSLHEGTITKCDRQCIEGDGFETHIKSLYVYNLNTLSSSSSFSGTGGPPRIDDIVAAATMTTPRDHKLKVVTKPGGGAQRVAAMETLPRETFSPRFRCGGGAAAAVASAIVGRSYLGGK

SEQ ID NO: 20621 - protein, 1491 aa, Oryza sativa
  Clone ID: TF_OSC101703j.C1.p1.gm
VVSFNGEKKAIAMYRNFIKKSYKATIEEGIITGFGMGSVMCVVFGSYGLAFWYGGKLIIEKGYTGGKIMTILFAVLTGASSLGNATPAVAAVVEGQSAAYNLFKTIERKPEIDSDDNNGMGYDTLVGQRGTQLSGGQKQRIAIARAILKDPKILLLDEATSALDVESERIVQEALNRMMVERTTLVVAHRLSTVRNVDCITVVRKGKIVEQGPHDALVKDPDGAYSQLIRLQETHRDERHKLPDSRSKSTSLSFRRSRTKDFLSKSNSGALGTRLSVDALNVRRLVGDNLALIVQAVATLITGFAIAFAADWRLALIITCVIPLVGAQGYAQVKFLKGFSEESKTIALVGESGSGKSTIIALLERFYDPDSGNISLDGVEIRSLKVSWLRDQMGLVGQEPVLFNDTIRANITYGKHSEVTEEEITAVAKAANAHEFVSSLPQGYDTVVGEKGVQLSGGQKQRVAIARAILKDPKILLLDEATSALDAESERVVQDALDRVMVNRTTIVVAHRLSTIKGADMIAVLKEGKIAEKGKHEALLRIKDGAYASLDAELAAAEERRRATAQTAAAAARAARLAAAELAAARAEAEAEAAEDAARAAEVEVETLRSSINGSIAGDITADRELEELARGRARERAERWAAAHLHGGGGGPRDRAPADGNPDGRRRAGGSPELARGPRRQHGSLSPDRRHGHHGVQTVVRDFGPGGGWPTLTKTNYIEWAAVMRVRLQVRHMWEAVRYGDVNYDEDRRALDALIAAVPPEMQFSLSQKRTAKEAWDAIAAARIGSDRARKSTLQALRKEWENLAFKPGEDVDDFALRLNTLLQKMVQYGDDTYDEERAVEKLFRCVPEKYRQIARSIESLLDLSTMLIEEALGRLKVVDGDEPQPFSGPITIGGKLHLTREQWEASQGDGRKGESSSPTGGRKPRKARGGVQLRWARRRAEGGARRGAQGVATGNHKPARDDACRNCGKLGHWAKDCRQPRRGQAHVARVEEEEPALLLAHASIELPPAAPAAAAFLHLDEPKVLVSLCNGSSNDKADGWYLDTGATHHMTGRREFFTEFDSSVRGSVKFGDASGVEIKGVGSVTFTAKSGEHRLLTGVYYIPALRNSIISVGQLDENGSRVLVEDGLMRIWDRRRRLLAKVTRGTNRLYILSAQVAQPVCLAARRDDEAWQWHERFGHLHFEALKQLSAKEMVRGMPCLDHVEQLCDVCVVTKQRRLPFPQQMSFRAKERLELVHGDLCGPVTPATPGGRRYFLLLVDDLSRYMWVTVLGSKGEAADAIRHAQAAAEAECGRKLRVLRTDNGGEFTAAEFASYCADEGIQRHYTTPYSPQQNGVVERRNQTVVGMARALLKQRGMPAIFWGEAVVTATATSTMASDGQGQGRMWLGADAAAWEGREECKRRRRMQPGVEVMVSDVAAQPGEPDEAGRSDAGILAMELVLAAAVVAGDDADCSGGRGGRRCGRGRRRGSRTTAEVAVSDDTDGSDGRGG

SEQ ID NO: 20622 - protein, 1475 aa, Oryza sativa
  Clone ID: TF_OSC14030j.C1.p1.fg
MSDARSRSSVASSTRRQQDAELAAAEERRRATAQTAVAVARAARLAAAELAAARAEAEAAEDAARAAEVEVETLRSSINGSIAGDITADRELEELARGRARERAERWAAAHLHGGGGGPRDRAPADGNPDGRGRASGSPEPARAPRRQRGSLSLDLRHGHHGVQTVVRDFGPGGGWPTLTKTNYIEWAAVMRVRLQVRHMWEAVRNDRARKSTLQALRKEWENLAFKPGEDIDDFALRLKTLLQKMVQYGDDTYYEERAVEKLFRCVPEKYRQIARSIESLLDLSTMSLEEALGRLKVVDGNEPQPLSGPITIGGKLHLTREQWEASQGDGRKGESSSSTGGRKPRKVREGVQLRWARKRAEGGARRGAQGVATGNHKPAQDDACRNCGKLGHWAKDCRQPRRGQAHVARVEEKKPALLLAHASIELPPAAPAAAAFLHLDEPKVLVSLCNGSSNDKADGWYLDTGATHHMTGRREFFTEFDSSVRGSVKFGNASGVEIKGVGSVTFTAKSGEHRLLTGVYYIPTLRNSIISVGQLNENGSRVLVEDGLMRIWDRRRRLLAKVTGGTNRLYILSAQVAQPVCLAARRDDEAWQWHERFGHLHFEALKQLSAKEMVRGMPCLDHVEQLCDVCVVTKQRRLPFPQQTSFRAKERLELMHGDLCGPVTPATPGGRCYFLLLVDDLSRYMWVMVLGSKGEAADAIRHAQAAAEVECGRKLRVLRTDNGGEFTAAEFTSYCADEGIQRHYTMPYSPQQNGVVERRNQTVVGMARALLKQRGMPAIFWGETVVTAAYILNRSPTKALDGRTPYEVWHGRKPAVSHLRVFSCLAFAKELGHIGKLDDRSTPRVFIGYAKGSKAFRILDPETQRVRTARDVVFDEGRGWVWDKAVDDGSTPTYDDFTVEYVYFEGAGGVGSSSSPSVSTPAPESPPTPTPTHPRATTSTTTSSSLTPPQPVTPHAPAPTATPPSTSTPTPARVERSPVEFATPLSHDGERIDAYHDGEQLRYRTMEDLLGDQPVPVPRDLEAQLHLACNDGEPRSFAEAEKHAAWRAAMQSEMDAVQENRTWELADLPRGHRAITLKWVFKLKRDEAGAIVKHKARLVARGFVQQEGIDYDDAFAPVARMESEGWGVHHMDVKSAFLNDNLKEEVYVHQPPGFVIPGKEGKDAEVAAFKEEMKATFQMSDLGPLSFYLGIEVHQDDSEITLRQTAYAKRVVELAGLTDCNPALTPMEERLKLSRDSTAEEVDATQYRCLVGSLRYLTHTRPDLAFSVGYVSRFMQRPTMEHQQAVKRIIRYIAGTLDHGLYYPRCPGKAHFVGYSDNDHAGDIDTNKSTSRILFFLGKCLVSWQSDKQQVVALSSYKAEYIAASAASTQALWLARLLSDLPGRDTGTVELRVDSKSALALAKNPVFHERSKHIRVRYHFIRSYLEEGSIKASYINTKDQLADLLTKPLGRIKFLELCSRIGMAQLAHKTTHKT

SEQ ID NO: 20623 - protein, 1600 aa, Oryza sativa
  Clone ID: TF_OSC23522j.C1.p7.fg
MSDARSRRSVASSTWRQQDAELAAAEERRRATAQTAAAAARAARLATAELAAARAEAEAEAAEDAARAAEVEVETLRSSINGSIAGDITADRELEELARGRARERAERWAAAHLHGGGGGPRDRGPANGNPDGRGRAGGSPEPARGPRRQRGSFSPDRRHGHYGVQTVVRDFGPGGGWPTLTKTNYIEWAAVTRVRLQVRHMWEAVRYGDVDYDEDRRALDALIAAVPPEMQFSLSQKRTAKEAWDAIAAARIGSDRARKSTLQALRKEWENLAFKPGEDVDDFALRLNTLLQKMVQYGDDTYDEERAVEKLFRCVPEKYRQIARSIESLLDLSTMSIEEALGRLKVVDGDEPQPLSGPITIGGKLHLTREQWEASQGDGRKGESSSPTGSRKPRKARGGVQLRWARRRAEGGARRGTQGVATGNHKPGRDDACRNCGKLGHWAKDCRQPRRGQAHVARVEEEEPALLLAHASIELPPAAPAAAAFLHLDEPKVLVSLCDGSSNDKADGWYLDTGATHHMTGRREFFTEFDSSVRGSVKFGDASGVKIKGVGSVTFTAKSGEHRLLTEVYYIPALRNSIISVGQLDENGSRVLVEDGLMRIWDRRRRLLAKVTRGTNRLYILSAQVAQPVCLAARRDDEAWQWHERFGHLHFEALKRLSAKEMVRGMPCLDHVEQLCDVCVVTKQRRLPFPQQTSFRAKERLELVHGDLCGPVTPATPGGRRYFLLLVDDLSRYMWVMVLGSKGEAADAIRRAQAAAEAECGRKLRVLRTDNGGEFTAAEFASYCADEGIQRHYTAPYSPQQNGVVERRNQTVVGMARALLKQRGMPAIFWGEAVVTAVYILNRSPTKALDGRTPYEAWHGHKPAVSHLRVFGCLAFAKELGHIGKLDDRSTPGVFIGYAEGSKAYRILDPETQRVRTARDVVFDEGRGWVWDKAVDDGSTPTYDDFTIEYVHFEGAGGVGSSSSSVSTPAPESPPTPTPTHPRATTSTTTSSSSTPPQPVTPHAPAPTATPPSTSTPTPARVERSPVEFATPLSHDGERIDAYHDGEQLRYRTMEDLLGDQPVPGLVPRDLEAQLHLACDDGEPRSFAEAEKHAAWRAAMQSEMDAVQENRTWELADLPRGHRAITLKWVFKLKRDEAGAIVKHKARLVARGFVQQEGIDYDDAFAPVAQMESVRLLLALAAQEGWGVHHMDVKSAFLNGDLKEEVYVHQPPGFVIPGKEGKVLRLHKALYGLRQAPRAWNAKLDSTLKGMGFEQSPHEAAIYRRGNGGNALLVGVYVDDLVITDTKDAEVAAFKEEMKATFQMSDLGPLSFYLGIEVHQDNSGITLRQTAYAKRVVELAGLTDCNPALTPMEERLKLSRDSTAEEVDATQYRRLVGSLRYLTHTRPDLAFSVGYVSRFMQRPTTEHQQAVKRIIRYVAGTLDHGLYYPRCPGKAHFVGYSDSDHAGDIDTSKSTSGILFFLGECLVSWQSIKQQVVALSSCEAEYMAASAASTQALWLARLLSDLLGRDTGAVELRVDSKSALALAKNPVFHERSKHIRVRYHFIRSYLEEGSIKASYINTKDQLADLLTKPLGRIKFLELCSRIGMAQLSHKTAHKT

SEQ ID NO: 20624 - protein, 1523 aa, Oryza sativa
  Clone ID: TF_OSC28294j.C1.p8.fg
MSDVRSRRSVVSSTRRQQDAELAAAEERRRATAQTAAAAARAARLAAAELAAARAEAEAEAAEDAARAAEVEVETLRSSINGSIAGDITADRELEELARGRARERAERWAAAHLHGGGGGPRDRAPADGNPDGRGRAGGSPEPARGPRRQRGSPSPDRHHGHHGVQTVVRDFGPGGGWPTLTKTNYIEWAAVMRVRLQVRHMWEAVRYGDVDYDEDRRALDALIAAVPPEMQFSLSQKRTAKEAWDAIAAARIGSDRAHKSTLQALRKEWENLAFKPGEDVDDFALRLHTLLQKMVQYGDDTYDEERAVEKLFRCVPEKYKQIARSIESLLDLSTMSIEEALGRLKVVDGDEPQPLSGPITIGGKLHLTREQWEASQSNGRKGESPPSTGGRKPRKARGGVQLRWARRRAEGGARRGAQGDAAGNHKPARDDACRNCGKLGHWAKDCRQPRRGQAHVAQVEEKPALLLAHASIELSSAAPAATAFLHLEEPKVHAFLGNSSSNDKADGWYLDTGATHHMTGRREFFTELDSSVRGSVKFGDASGVEIKGVGSVTFTTKSGEHRLLTGVYYIPALRNSIISVGQLDENGSSVLVEHGVMRIWDRRRRLLAKVTRGTNRLYILSAQVAQPVCLAARRDGEAWQWHERFGHLHFEALKRLSAKEMVRGLPCLDHVEQLCDVCVLTKQRRLPFPQQTSFRAKERLELMHGDLCGPVTPATPGGRRYFLLLVDDLSRYMWVMVLGSKGEAADTIRRAQAAAEAECGRKLRVLRTDNGGEFTAAEFASYCADEGIQRHYTAPYSPQQNGVVERRNQTVVGMARALLKQRGMPAIFWGEAVVTAVYILNRSPTKALDGRTPYEAWHGRKPGVSHLRVFGCLAFVKELGPISKLDDRSTPGVFIGYAEGSKAYRILDPETQRTVDDGSTLTYDDFTVEYVHFERAGGVGSSSSPSVSTPVPEPPSTPTPTHPRATASTATSSSPTPPQPATPRAPAPTATPPSTSTPTPARVERSPVEFATPLSHDGERIDAYHDGEQLRYRTMEDLLGDQPVPGMVPRDLEAQLHLACDDGEPRSFAEAEKHAAWRAAMQSEMDAVQENRTWELVDLPRGHRAITLKWVFKLKRDKAGAIVKHKARLVARGFVQQEGIDYDDAFAPVARMESVRLLALAAQEGWGVHHMDVKSAFLNGDLKEEAPRAWNAKLDSTLKGMGFEQSPHEAAIYRRGNGGNALLVGVYVDDLVITGTKDAEVYQDDSGITLRQTAYAKRVVELAGLTDCNPALTPMEERLKLSRDSTAEEVDATQYRRLVGSLRYLTHTRPDLAFSVGYVSRFMQRPTTEHQQAVKRIIRYVAGTLDHGLYYPRCPGKAHFVGYSDSDHAGDIDTSKSTSGILFFLGECLVSWQSIKQQVVALSSCEAEYMVASAASTQALWLARLLSDLLGRDTGAVELRVDSQSALALAKNPVFHERSKHIRVRYHFIRSYLEEGSIKASYINTKDQLADLLTKPLGRIKFLELCSRIGMAQLSHKTTHKT

SEQ ID NO: 20625 - protein, 281 aa, Oryza sativa
  Clone ID: TF_OSC30052j.C1.p1.fg
MRVRLQVRHMWEAVRYGDVDYDEDRRALDALIAAVPLEMQFSLSHKWTAKEAWDAIAVARIGSDRARKSTLQALRKEWENLAFKPGEDVDDFALRLNTLLQKMVQYGDDTYDEERAVEKLFRYVPEKYRQIARSIESLLDLSTMSIEEALGRLKVVDGDEPQPLSGPITIGGKLHLTREQWEASQGDGRKGESSPSTGGRKPCKARGGVQLRWARRRAEGGARRGAQGGAAGNHKPARDDACRNCGKLGHWAKDCRQPRRGIELSPAAPAATAFLHLDEPK

SEQ ID NO: 20626 - protein, 2168 aa, Oryza sativa
  Clone ID: TF_OSC400397j.C1.p58.fg
MALQDEVAQNLRWSMDSARDTASCPSYPSAMDGWMKTGVPKGGREKISCRGFHSSFRPTDSGLSLNVDVSTTMIVRPGPVIEFLLFNQNIKNPHEIDWGKFYLFQDSIYPSAYFSVARTTATAAAAARAARLAAAELAAARAEAEAAKDAARAAEVEVETLRSSINGSIAGDITADRELEELARARARERAERWAAAHLHGGGGGPRDRAPADGNPDGLGRAGGSPEPARGPRRQHGSLSPDRHHGHHGVQTVVRDFGPGGGWPTLTKTNYIEWAAVMRAVRYGDVDYDEDRRALDALIAAVPPEMQFSLSQKRTAKEAWDAIAAARIGSDRARKSTLQALRKEWENLAFKPGEDVDDFALRLNTLLQKMVQYGDDTYDEERAVEKLFRCVPEKYRQIARSIESLLDLSTMSIEEALSRLKVVDGDEPQPLSGPITIGGKLHLTREQWEASQGDGRKGESSSPIGGRKPRKAQGGVQLRWARRRAEGGARRGAQGVATGNHKPARDDACRNCGKLGHWAKDCRQPRRGQAHVARVEEEPALLLAHASIELPPAAPAAAAFLHLDEPKVLVSLCNGSSNDKADGWYLDTGATHHMTSRREFFTEFDSSVRGSVKFGDASGVEIKGVGSVTFTAKSGEHRLLTGVYYIPALRNSIISLGQLDENGSRVLVEDGLMRIWDRRRRLLAKVTRGTNRLYILSAQVAQPVCLAARRDDEAWQWHERFRHLHFEALKQLSAKEMVRGMPCLDHVEQLCDVCVVTKQRRLPFPQQTSFRAKERLELVHGDLCGPVTPATPGGRRYFLLLVDDLSCYMWVMVLGSKGEAADAIRHAQAAAEAECGRKLHVLRTDNGGEFTAAEFASYCADEGIQRHYTTPYSPQQNDVVERRNQTVVGMARALLKQRGMPAIFWGEAVVTAAYILNRSPTKALDGRTPYEAWHGRKPAVSHLRVFGCLAFAKELGHIGKLDDRSTPGVFIGYAEGSKAYRILDPETQRVRTARDVVFDEGRGWVWDKAVDDGSTPTYDDFTVEYVHFEGAGGVGSSSSPSVSTPAPKSPPTPTPTHPRATTSTTTSSSSTPHAPAPTATPPSTSTPTPARVERSPVEFATPLSHDGERIDVYHDGEQLWYRTMEDLLGDQPVPGLVPRDLEAQLHLACDDGEPRSFAEAEKHAAWRAAMQSEMDAVQENRTWELADLPRGHRAITLKWVFKLKRDEAGAIVKHKARLVARGFVQQEGIDYDDAFAPVARMESVRLLLALAAQEGWGVHHMDVKSAFLNGDLKEEVYVHQPPGFVIPGKEGKVLRLHKALYGLRQASRAWNAKLDSTLKGMGFEQSPHEAAIYRRGNGGNALLVGVYVDDLVITGTKDAEVAAFKEEMKATFQMSDLGPLSFYLGIEVHQDNSGITLRQTAYAKRVVELAGLTDCNPALTPMEERLKLSRDSTAEEVDATQYRRLVGSLRYLTHTRPDLAFSVGYVSRFMQRPTTEHQQAVKRIIRYVAGTLDHGLYYPKCPGKAHFVGYSDSDHAGDIDTSKSTSGILFFLGKCLVSWQSVKQQVVALSSCEAEYMAASAASTQALWLARLLSDLLGRDTGKVELRVDSKSALALAKNPVFHERTKHIRVRYHFIRSYLEEWSINASYINTKDQLADLLTKPLGRIKLGGCSNRLAASYGYIYMYPTSLGQAKCALKNLRIKTTHTGSEFRIIGLSEDTCYSQTFQIKRKNGNGGSDTVEEVTVFEYYRKNWKIDLKGSAHFPCLNVGKPKRPTYIPLELCHLVPLQRYKKALSTLQRSTLVERSRQNPQERMFVLSGVLRDSDYNSVPMLRECGISIAQEFTQVAARVLPAPKLKSGDGEDIFARNGRWNFNKNCNAHHLAQRLIHCGNLKGLINDQYLTNVLLKINAKLGGLNSLLQIERNQAIPLLSKTPTIILGMDVSHGSPGRDDVPSVAAVVSSLEWPLISKYKASVCTQSPRLEMIDSLFKLVGNEDHVIIRDGVSEGQFNQVLNIELAQIIKACEFLANEKNDSEWSPKFTVIVAQKNHHTKFFQTDRSNKVVNVPPGTVVDKGICHPRNCDFYMCAHAGMIGTTRPTHYHVLHDENNFTPDDLQELVHNLSYVYQRSTTAISGVAPICYAHLAAAQVSQFVRLDDAASEGSGDGGAPPRPVPELPRLHPDVRQSMFFC

SEQ ID NO: 20627 - protein, 466 aa, Oryza sativa
  Clone ID: TF_OSC400397j.C1.p76.gp
LQKMVQYGDDTYDEERAVEKLFRCVPEKYRQIARSIESLLDLSTMSIEEALSRLKVVDGDEPQPLSGPITIGGKLHLTREQWEASQGDGRKGESSSPIGGRKPRKAQGGVQLRWARRRAEGGARRGAQGVATGNHKPARDDACRNCGKLGHWAKDCRQPRRGQAHVARVEEEPALLLAHASIELPPAAPAAAAFLHLDEPKVLVSLCNGSSNDKADGWYLDTGATHHMTSRREFFTEFDSSVRGSVKFGDASGVEIKGVGSVTFTAKSGEHRLLTGVYYIPALRNSIISLGQLDENGSRVLVEDGLMRIWDRRRRLLAKVTRGTNRLYILSAQVAQPVCLAARRDDEAWQWHERFRHLHFEALKQLSAKEMVRGMPCLDHVEQLCDVCVVTKQRRLPFPQQTSFRAKERLELVHGDLCGPVTPATPGGRRYFLLLVDDLSCYMWVMVLGSKGEAADAIRHAQAAAE

SEQ ID NO: 20628 - protein, 1708 aa, Oryza sativa
  Clone ID: TF_OSC401340j.C1.p28.fg
MAIAVRSAAAVARHSLRPPLAAPGSIRGASLLPPQRARGVGPCRARARAASSSATGGGGHLPPLFSVAPMMDWTDNHYRTLARLISKHAWLYTEMVVAETIVHQKDNLDRFLAFPAEQHPIVLQIGGSNLDNLAKATELANAYSYDEINLNCGCPSGKVAGHGCFGARLMFDPEFVGDAMSAIAANCNVPVSVKCRIGVDDRDSYEELCEFVDKVVSKSPTRHFIIHARKALLSGLSPAENRNVPPLKKPENCPISSAILFSMRVTIEVLTSGSLRSWQEEGHGNGQSGGGGPRDRAPADGNPDGRGRAGGSPEPARGPRRQRGSPSPDRCHGHHGVQTVVRDFGLGGGWPTLTKTNYIERAAVMRVRLQVRHMWEAVRYGDVDYDEDRRALDALIAAVPLEMQFSLSHKWTAKEAWDAIAVARIGSDRARKSTLQALRKEWENLAFKPGEDVDDFALRLNTLLQKMVQYGDDTYDEERAVEKLFRCVPEKYRQIARSIESLLDLSTMSIEEALGRLKVVDGDEPQPLSGPITIGGKLHLTREQWEASQGDGRKGESSPSTGGRKPCKARGGVQLRWARRRAEGGARRGAQGGAAGNHKPARDDACRNCGKLGHWAKDCRQPRRGIELSPAAPAATAFLHLDEPKVHAFLGNSSSNDKADGWYLDTGATHHMTGRREFFTELDSSVRGSIKFGDASGMEIKGVGSVTFTAKSGEHRLLTGVYYIPVLRNSIISVGQLDENGSRVLVEHGVMTIWDRRRRLLAKVTRGTNRLYILSAQVAQPVCLAARRDDEAWQWHERFGHLHFEALKWLSAKEMVRGLPCLDHVEQLCDVCVLTKQRRLPFPQQTSFRAKEQLELVHGDLCGPVTPATPGGRRYFLLLVDDLSRYMWVMVLGSKAEAADAIRRAQAAAEVECGRKLRVLRTDNGGEFTAAEFASYCADEGIQRQYTAPYSPQQNGVKRRNQTVVGMARALLKQRGMPAIFWGEVVVTAVYILNRSPTKALDGRTPYEAWHERKPGVSHLRVFGCLAFVKELGHIGKLDDRSTPGVFIGYAEGSKAYRILNSETQRVRTARDVVFDEGRGWVWDKAVDDGSTPKYDDFTVEYVHFEGAGGVGNSSSPSVSTPVPEPPPTPTPTHSRATTSTTTSSSPTPPQPVTPRAPAPTATPPSTSTPTPASVERNPVEFATPLSHDGERIDAYHDGEQLRYRTMEDLLGDQPVPGLVPPDLEAQLHLACDDGEPRSFAEAEKHVAWRAAMQSEMDAVQENRTWELADLPRGHRAITLKWVFKLKRDEAGAIVKHKARLVARGRLGVHHMDVKSAFLNGDLKEEVYVHQPPGFVIPGKEGKVLRLHKALYGLRQAPRAWNAKLDSTLKGMGFEQSPHEAAIYRRGNGGNALLVGVYVDDLVITGTKDAEVAAFREEMKATFHMSDQGPLSFYLGIEVHQDDSGITLRQTAYAKRVVELARLTDCNPALTPMEERLKLSRDSTTEEVDATQYRRLVGSLRYLTHTAGLGLLRRLRQSAVKRIIRYVAGTLDHGLYYPRCPGKAHFVEYSNSNHAGDIDTSKSTSGILFFLGECLVSWQSVKQQVVALSSCEAEYMAASAASTQALWLARLLSDLLGRDTGAVELRVDSKSALALAKNPVFHEWSKHIWVRYHFIRSYLEEGSIKASYINTKDQLADLLTKPLGRIKFLELCFRIGMAQLPHKTTHKT

SEQ ID NO: 20629 - protein, 2534 aa, Oryza sativa
  Clone ID: TF_OSC401545j.C1.p1.fg
MALERRLAYAALIPFLLLALPILPSDSPSGGGGGGAGGGGGGGETLDPPAAKYVVRFVEYRPADEHREYLEDGLRGAARPPPAASWRWVERRNPAAAFPTDFAVLEIRDACRAAVVDAVSALGRVRDVHADASYSRGVLSADRPRQQGKLFTAMSFEGEEGGGDREVGCSTDSNNSSSAGWRRKLLVQRSQVTSLFGAERLWGRGFTGRKVKMAIFDTGIRADHPHFRNIKERTNWTNEDTLNDNLGHGTFVAGVIAGQDAECPGFAPDTEIYAFRVFTDAQISYTSWFLDAFNYAIATGMDVLNLSIGGPDYLDLPFVEKDAELAAAEERRRATAQTAAAAARAARLAAAELAAARAEAEAEAAKDAARAAEVEVETLRSSINGSIAGDITADRELEELARGRARERAERWAAAHLHGGGGGPRDRGPANGNPDGRGRAGGSPEPARGPRRQRGSFSPDRRHGHHGVQTVVRDFGPGGGWPTLTKTNYIEWAAVMRVRLQVRQMWEAVRYGDVDYDEDRRALDALIAAVPPEMQFSLSQKRTAKEAWDAIAAARIGSDRARKSTLQALRKEWENLAFKPGEDVDDFALRLNTLLQKMVQYGDDTYDEERAVEKLFRCVPEKYRQIARSIESLLDLSTMSIEEALGRLKVVDGDEPQPLSGPITIGGKLHLTREQWEASQGDGRKGESSSPTGGRKPRKARGGVQLRWARRRAEGGARRGAQGIATGNHKPARDDACRNCGKLGHWAKDCRQPRRGQAHVARVEEEEPALLLAHASIELPPAAPAAAAFLHLDEPKVLVSLCDGSSNDKADGWYLDTGATHHMTCRREFFTEFDSSVRGSVKFGDASGVEIKGVGSVTFTAKSGEHRLLTGVYYIPALRNSIISVGQLDENGSRVLVEDGLMRIWDRRRRLLAKVTRGTNRLYILSAQVAQPVCLAARRDDEAWQWHERFGHLHFEALKRLSAKEMVRGMPCLDHVEQLCDVCVVTKQRRLPFPQQTSFRAKERLKLVHGDLCGPVTPATPGGRRYFLLLVDDLSRYMWVMVLGSKGEAADAIRRAQAAAEAECGRKLRVLRTDNGGEFTAAEFASYCADEGIQRHYTAPYSPQQNGVVERRNQTVVGMARALLKQRGMPAIFWGEAVVTAVYILNRSPTKALDGRTPYEAWHGHKPAVSHLRVFGCLAFAKELGHIGKLDDRSTPGVFIGYAEGSKAYRILDPETQRVRTARDVVFDEGRGWVWDKAVDDGSTPTYDDFTIEYVHFEGAGGVGSSSSSVSTPAPESPPTPTPTHPRATTSTTTSSSSTPPQPVTPHAPAPTATPPSTSTPTPARVERSPVEFATPLSHDGERIDAYHDGEQLRYRTMEDLLGDQLVPGLVPRDLEAQLHLACDDGEPRSFAEAEKHAAWRAAMQSEMDAVQENRTWELADLPRGHRAITLKWVFKLKRDEAGAIVKHKARLVARGFVQQEGIDYDDAFAPVARMESVRLLFALAAQEGWGVHHMDVKSAFLNGDLKEEVYVHQPPGFVIPGKEGKVLRLHKALYGLRQAPRAWNAKLDSTLKGMGFEQSPHEAAIYRRGIGGNALLVGVYVDDLVITGTKDAEVAAFKEEMKATFQMSDLGPLSFYLGIEVHQDNSGITLRQTAYAKRVVELAGLTDCNPALTPMEERLKLSRDSTAEEVDATQYRRLVGSLRYLTHTRPDLAFSVGYVSRFMQRPTTEHQQAVKRIIRYVAGTLDHGLYYPRCPGKAHFVGYSDSDHAGDIDTSKSTSGILFFLGECLVSWQSIKQQVVALSSCEAEYMAASAASTQALWLARLLSDLLGRDTGAVELRVDSKSALALAKNPVFHERSKHIRVWELTANNIIMVSAIGNDGPLYGTLNNPADQSDVIGVGGIDYNNHIASFSSRGMTTWELPHGYGRVKPDVVAYSRDIMGSKISTGCKTLSGTSVASPVVAGVVCLLVSVIPEEHRKSILNPATMKQALVEGASRLSGPNMYEQGAGKIDLWQSYEILKSYQPRASIFPNTLDFTDCPYFWPFCRQPLYAGAMPVVFNATILNGMGVIGYVKDPPVWQPSEDVGNILSVHFTYSDVIWPWTGYLALHLQVKDEGSQFSGIISGKVTLSIYSPAAHGESSPRSSSCVLYLKVKVVPTPVRSRRILWDQFHNIKYPSGFVPRDSLNVHNDILDWHGDHLHTNFHILFNMLRDAGYYIETLGSPLTCFDASNYGTLLMVDLEDEYFSEEIQKLKDDVVHKGLGVVVFAEWYHVDTMVKMTFFDENTRSWWTPITGGANVPALNELLAPFGIAFGDKVLSGDFSINGEQTHYASGTDIVQFPAGGFLHSFQLQDNSKISQDNSRSADTQNTPDKSKCLLVCGSVHMLSSILGMMEAGKGRVAVYGDSNCLDSSHMVTNCYWLLRKLVEFTGNRIKDPVLFSESAQLKFPVFESIHQLSRRPDVNFSTYSTVVGNELICHQDSRFEVWGTKGYGTQQTGTTRKLPEYQKSEAYNISTPIASDSTPDEAGLQRNISTPIASKFDKRMDYFGFLGHEE

SEQ ID NO: 20630 - protein, 469 aa, Oryza sativa
  unsure (1)..(469): unsure at all Xaa locations
  Clone ID: TF_OSC401606j.C1.p6.gp
LQKMVQYGDDTYDEERAVEKLFRCVPEKYRQIARSIESLLDLSTMSIEEALGRLKVVDGDELQPLSGPITIGGKLHLTRKQWEASQGDGRKGESSSPTGGRKPRKARGGVQLRWVRRRAEGGACKGAQGVATGNHKPARDDACRNCGKLGHWAKDCRQPRRGQAHVARVEEEEPALLLAHASIELPPAAPAAAAFLHLDEPKVLVSLCNGSSNDKADGWYLDTGATHHMTGRREFFTEFNSSVRGSVKFGDASGVEIKGVGSVTFTAKSGEHRLLTGVYYIPALRNSIISVGQLDENGSRVLVEDGLMRIWDRRRRLLAKVTRGTNRLXILSAQVAQPVCLAARRDDEAWQWHERFGHLHFEALKQLSAKEMVRGMPCLDHVEQLCDVCVVTKQRRLPFPQQTSFRAKERLELVHGDLCGPMTPATPGGRRYFLLLVDDLSRYMWVMVLGSKGEAADAIRHAQAAVEAE

SEQ ID NO: 20631 - protein, 1459 aa, Oryza sativa
  Clone ID: TF_OSC401606j.C1.p8.fg
MSDARSRRSVASSTRRQQDAELAAAEERRRATGQTAAAAARAARLAAAELAAARAEAEAEAAEDAARAAEVEVETLRSSINGSIAGDITADRELEELARGRARERAERWAVAHLHGGGGGPRDRAPADGNPDGRGRAGGSPEPARGPRRQRGSLSPDRRHGHHGVQTVVRDFGPGGGWPTLNKTNYIEWAAVMRVRLQVRHMWEAVRSGLPRRPGTPSLRHASAATAPASPHCRHSARSRRTWPSSQKMVQYGDDTYDEERAVEKLFRCVPEKYRQIARSIESLLDLSTMSIEEALGRLKVVDGDELQPLSGPITIGGKLHLTRKQWEASQGDGRKGESSSPTGGRKPRKARGGVQLRWVRRRAEGGACKGAQGVATGNHKPARDDACRNCGKLGHWAKDCRQPRRGQAHVARVEEEEPALLLAHASIELPPAAPAAAAFLHLDEPKVLVSLCNGSSNDKADGWYLDTGATHHMTGRREFFTEFNSSVRGSVKFGDASGVEIKGVGSVTFTAKSGEHRLLTGVYYIPALRNSIISVGQLDENGSRVLVEDGLMRIWDRRRRLLAKVAQPVCLAARRDDEAWQWHERFGHLHFEALKQLSAKEMVRGMPCLDHVEQLCDVCVVTKQRRLPFPQQTSFRAKERLELVHGDLCGPMTPATPGGRRYFLLLVDDLSRYMWVMVLGSKGEAADAIRHAQAAVEAECGRKLRVLRTNNGGEFTAAEFASYCADEGIQRHYTPYSPQQNDVVEWRNQTVVGMAQALLKQRGMPAIFWGEAVVTAAYILNRSPTKALDGRTPYEAWHGRKPAVSHLRVFGCLAFAKELGHIGKLDDRSTPGVFIGYAEGSKAYRILDPETQRVRTARDVVFDEGRGWVWDKAVDDGSTPTYDDFTVEYVHFEGAGGVGSSSSPSVSTAAPESPPTLTPTHPWATTSTTTSSSSTTPQPVTPHAPAPTATPPSTSTPTPARVERSPVEFATPLSHDGERIDAYHDGEQLQYQAEKHAAWRAAMQSEMDAVQENRTWELADLPRGHRAITLKWVFKLKRDEAGAIVKHKTHLVARGFVQQEGIDYDDAFAPVARMESVRLLALAAQEGWGVHHMDVKLAFLNGDLKEEVYVHQPPGFVIPGKEGKVLRLHKALYGLRQALRAWNAKLDSTLKGMGFEQSPHEAAIYRRGNGGNALLVGVYVDDLVITGTKDAEVAAFKEEMKATFQMSDLGPLSFYLGIKVHQDDSGITLRQTAYAKRVVELAGLTDCNPTLTPMEERLKLSRDSMAEEAVKRIIRYVAGTLDHGLYYPRCPGKAHFIGYSDSDHAGDIDTSKSTSGILFFLGKCLVSWQSVKQQVVALSSCEAEYMAASAASTQALWLARLLSDLLGRDTGTVELRVDSKSALALAKNPVFHERSKHIWVRYHFIRSYLEEGSIKASYINTKDQLADLLTKPLGRIKFLELCSRIGMAQLPHKTTHKT

SEQ ID NO: 20632 - protein, 1168 aa, Oryza sativa
  Clone ID: TF_OSC401785j.C1.p5.fg
MSIEEALGRLKVVDGDEPQPLSGPITIGGKLHLTREQWEASQGDGRKGESSSPTGGRKPRKARGGVQLRWARRRAEGGARRGAQGVATGNHKPARDDACRNCGKLGHWAKDCRQPRRGQAHVARVEEEPALLLAHASIELPPAAPAAAAFLHLDEPKVLVSLCNGSSNDKADGWYLDTGATHHMTGRREFFTEFDSSVRGSVKFGDASGVEIKGVGSVTFTAKSGEHRLLTGVYYIPALRNSIISVGQLDENGSRVLVEDGLMRIWDRRRRLLAKVTRGTNRLDILNVQVAQPVCLAAHRDDEAWQWHERFGHLHFEALKQLSAKEMVRGMPCLDHVEQLCDVCVVTKQRRLPFPQQTSFRAKERLELVHGDLCGPVTPATPGGRRYFLLLVDDLSRYMWVMVLGSKGEAADAIRHAQAAAKAECGRKLRVLRTDNGGEFTAAEFASYCADEGIQRHYTTPYSPQQNGVVERRNQTVVGMARALLKQRGMPAIFWGQAVVTAAYILNRSPTKALDGRTPYEAWHGRKPAVSHLRVFGCLAFAKELGHIGKLDDRSTPGVFIGYAEGSKAYRILDPETQRVRTARDVVFDEGRGWVWDKAVDDGSTPTYDDFTVEYVHFEGAGGVGSSSSPSVSTPAPESPPTPTPTHPRATTSTTTSSSSTQPQPVTPHAPAPTATPPSTSTPTPARVERSPVEFATPLSHDGERIDAYHDGEQLRYRTMEDLLGDQPVPGLVPRDLEAQLHLACDDGEPRSFVEAEKHAAWRAAMQSEMDAVQENRTWELADLPRGHRAITLKWVFKLKRDEAGAIIKHKARLVARGFVQQEGIDYDDAFAPVARMESVRLLALAAREGWGVHHMDVKSAFLNGDLKEEVYVHQPPGFVIPGKEGKVLRLHKALYGLRQAPRAWNAKLDSTLKGMGFEQSPHEAAIYRRGNGGNALLVGVYVDDLVITGTKDAEDNSGITLRQTAYAKRVVELAGLTDCNPALTPMEERLKLSRDSTAEEVDATQYRRLVGSLRYLTHTRPDLAFSVGYVSRFMQRPTTEHQQAVKRIIRYVAGTLDHGLYYPRCPGKAHFVGYSDSDHAGDIDTSKSTSGILFFLGKCLVSWQSVKQQVVALSSCEAEYMAASAASTQALWLARLLSDLLGRDTRTVELRVDSKSALALAKNPVFH

SEQ ID NO: 20633 - protein, 469 aa, Oryza sativa
  unsure (1)..(469): unsure at all Xaa locations
  Clone ID: TF_OSC401841j.C1.p11.gp
LQKMVQYGDDTYDEERAVEKLFRCVPEKYRQIARSIESLLDLSTMSIEEALDRFKVVDGDEPQPLSGPITIGGKLHLTREQWEASQGDGRKGESSSPTGGRKPRKARGGVQLRWARRRAEGGARRGAQGVATGNHKPARDDACRNCGKLGHWAKDCRQPRRDQAHVARVEEEEPALLLAHASIELPPAAPAAAAFLHLDEPKVLVSLCNGSSNDKADGWYLDTGATHHMTGRREFFTEFDSSVRGSVKFGDASGVEIKGVGSVTFTAKSGEHRLLTGVYYIPALRNSIISVGQLDENGSRVLVEDGFMRIWDRRRRLLAKVTRGTNRLYILSAQVAQPVCLAARRDDEAWQWHERFGHLHFEALKQLSAKEMVRGMPCLDHVEQLCDVCVVTKQRRLPFPXQTSFRAKERLELVHGDLCGPVTPATPGGRRYFLLLVDDLSCYMWVMVLGSKGEAADAIRHAQAAAEAE

SEQ ID NO: 20634 - protein, 1292 aa, Oryza sativa
  Clone ID: TF_OSC401841j.C1.p8.fg
MSDARSRRSVASSTRRQQDAELAAAEERRRATAQTAAAAARAARLAAAELAAARAEAEASEDAARVTEVEVETLRSSINGSIAGDITADRELEELARGRARERAERWAAAHLHGGGGGPRDHAPADGNPDGRGRAGGSPEPARGPRRQRGSLSPDRRHGHHGVQTVVRDFGPGGGWPTLTKTNYIEWAAVMRVRLQVRHMWEAVRDRARKSTLQALRKEWENLAFKPGEDVDDFALRLNTLLQKMVQYGDDTYDEERAVEKLFRCVPEKYRQIARSIESLLDLSTMSIEEALDRFKVVDGDEPQPLSGPITIGGKLHLTREQWEASQGDGRKGESSSPTGGRKPRKARGGVQLRWARRRAEGGARRGAQGVATGNHKPARDDACRNCGKLGHWAKDCRQPRRDQAHVARVEEEEPALLLAHASIELPPAAPAAAAFLHLDEPKVLVSLCNGSSNDKADGWYLDTGATHHMTGRREFFTEFDSSVRGSVKFGDASGVEIKGVGSVTFTAKSGEHRLLTGVYYIPALRNSIISVGQLDENGSRVLVEDGFMRIWDRRRRLLAKVTRGTNRLYILSAQVAQPVCLAARRDDEAWQWHERFGHLHFEALKQLSAKEMVRGMPCLDHVEQLCDVCVGSKAYRILHLETQRVRIVRDVVFDEGRGWVWDKAVDDGSTPTYDDFTVEYVHFEGAGGVGSSSSPSVSTLAPESPPTPTPTHPRATTSTTTSSSSTPPQPVTPHAPAPTATPPSTSTPTPARVERSPVEFATPLSHDGERIDAYHDGEQLRYQAEKHAAWRAAMQSEMDAVQENRTWELADLPRGHRAITLKWVFKLKRDEAGAIVKHKARLVARGFVQQEGIDYDDAFAPVARMESVRLLALAAQEGWGVDHMDVKSAFLNSDLKEEVYVHQPPRFVIPGKEGKVLRLHKALYGLRQAPRAWNAKLDSTLKGMGFEQSPHEAAIYRRGNGGNALLVGVYVDDLVITGTKDAEVAAFKEMKATFQMSDLGPLSFYLGIEVHQDDSGITLRQTAYAKRVVELAGLTDCNPALTPMEERLKLSRDSTAEEVDATQYRRLVGSLRYLTHTRPDLAFSVGYVSRFMQRPTTEHQQAVKRIIRYVAGTLDHGLYYPRCPGKAHFVGYSDSDHAGDIDTSKSTSGILFFLGKCLVSWQSVKQQVVALSSCEAEYMAASAASTQALWLARLLSDLLGRDTGTVELRVDSKSTLALAKNPVFLERSKHIRVRYHFIRSYLEEGSIKASYINTKDQLAYLLTKPLGRIKFLELCSRIGMAQLPHKTTHKT

SEQ ID NO: 20635 - protein, 1815 aa, Oryza sativa
  Clone ID: TF_OSC401948j.C1.p6.gm
MDESGRGTGDDHGRETKDAAAAASSSSGKKVPLFSLFRYADRLDVLLMVVGTVGALGNGISQPLMTVLFGNVINSFGANTSGSVLRSVTKVVLNFIYLGIGTSVASFLQVSCWTMAGERQSARIRSLYLKAVLRQDITFFDTEMTTGEAVSRMSSDTLLIQGALGEKVVSFNGEKKAIAMYRNFIKKSYKATIEEGIITGFGMGSVMCVVFGSYGLAFWYGGKLIIEKGYTGGKIMTILFAVLTGASSLGNATPAVAAVVEGQSAAYNLFKTIERKPEIDSDDNNGMVLEDMNGDIELKDVYFRYPARPEQLILDGLSLQVASGTTMAIVGESGSGKSTVISLVERFYDPQSGEVLIDGISIKKLRLDWIRGKIGLVSQEPLLFMASIKDNIIYGKKDATLEEIKRAAELANAANFIDKLPNGYDTLVGQRGTQLSGGQKQRIAIARAILKDPKILLLDEATSALDVESERIVQEALNRMMVERTTLVVAHRLSTVRNVDCITVVRKGKIVEQGPHDALVKDPDGAYSQLIRLQETHRDERHKLPDSRSKSTSLSFRRSRTKDFLSKSNSGALGTRLSVDALNVRRLVGDNLALIVQAVATLITGFAIAFAADWRLALIITCVIPLVGAQGYAQVKFLKGFSEESKTIALVGESGSGKSTIIALLERFYDPDSGNISLDGVEIRSLKVSWLRDQMGLVGQEPVLFNDTIRANITYGKHSEVTEEEITAVAKAANAHEFVSSLPQGYDTVVGEKGVQLSGGQKQRVAIARAILKDPKILLLDEATSALDAESERVVQDALDRVMVNRTTIVVAHRLSTIKGADMIAVLKEGKIAEKGKHEALLRIKDGAYASLDAELAAAEERRRATAQTAAAAARAARLAAAELAAARAEAEAEAAEDAARAAEVEVETLRSSINGSIAGDITADRELEELARGRARERAERWAAAHLHGGGGGPRDRAPADGNPDGRRRAGGSPELARGPRRQHGSLSPDRRHGHHGVQTVVRDFGPGGGWPTLTKTNYIEWAAVMRVRLQVRHMWEAVRYGDVNYDEDRRALDALIAAVPPEMQFSLSQKRTAKEAWDAIAAARIGSDRARKSTLQALRKEWENLAFKPGEDVDDFALRLNTLLQKMVQYGDDTYDEERAVEKLFRCVPEKYRQIARSIESLLDLSTMLIEEALGRLKVVDGDEPQPFSGPITIGGKLHLTREQWEASQGDGRKGESSSPTGGRKPRKARGGVQLRWARRRAEGGARRGAQGVATGNHKPARDDACRNCGKLGHWAKDCRQPRRGQAHVARVEEEEPALLLAHASIELPPAAPAAAAFLHLDEPKVLVSLCNGSSNDKADGWYLDTGATHHMTGRREFFTEFDSSVRGSVKFGDASGVEIKGVGSVTFTAKSGEHRLLTGVYYIPALRNSIISVGQLDENGSRVLVEDGLMRIWDRRRRLLAKWHERFGHLHFEALKQLSAKEMVRGMPCLDHVEQLCDVCVVTKQRRLPFPQQMSFRAKERLELVHGDLCGPVTPATPGGRRYFLLLVDDLSRYMWVTVLGSKGEAADAIRHAQAAAEAECGRKLRVLRTDNGGEFTAAEFASYCADEGIQRHYTTPYSPQQNGVVERRNQTVVGMARALLKQRGMPAIFWGEAVVTATATSTMASDGQGQGRMWLGADAAAWEGREECKRRRRMQPGVEVMVSDVAAQPGEPDEAGRSDAGILAMGFGQRDSLVSPLERLLEDIFFHVVAIIWFGDALTIGLYHGRYYKFLALNIELKELVLAAAVVAGDDADCSGGRGGRRCGRGRRRGSRTTAEVAVSDDTDGSDGRGG

SEQ ID NO: 20636 - protein, 1555 aa, Oryza sativa
  Clone ID: TF_OSC410155j.C1.p3.fg
MSDARSRRSVASSTRRQQDAELAAAEERKRATAQTAAAAARAARLAAAELAAAREEAEAEAAEDAAHAAEVEVETLRSSINGSIAGDITADRELEELARGRARERAERWAAAHLHGGGGGPRDRAPANGNPDGRGRAGGSPEPARGPCRQRGSLSPDRRHGHHGVQTVVRDFGPGGGWPTLTKTNYIEWAAVMRVRLQVRHMWEAVRYGDVDYDEDRRALDALIAAVPPEMQFSLSQKRTAKEAWDAIAAARIGSDRARKSTLQALRKEWENLAFKPGEDVDDFALRLNTLLQKMVQYGNDTYDEERAVEKLFRCVPEKYRQIARSIESLLDLSTMSIEEALGRLKVVDGDEPQPLSGPITIGGKLHLTREQWEASQGDGRKGESSSPTGGRKPRKARGGVQLRWARRRAKGGARRGAQGVATGNHKPARDDACRNCGKLGHWAKDCRQPRRGQAHVARVEEEEPALLLAHASIELPPAAPAAAAFLHLDEPKVLVSLCNGSSNDKADGWYLDTGATHHMTGRREFFTEFDSSVRGSVKFGDASGVEIKGVGSVTFTAKSGEHRLLTGVYYIPALRNSIISVRQLDENGSRVLVEDGLMRIWDRRRRLLAKVTRGTNRLYILSAQVAQPVCLAARRDDEAWQWHERFGHLHFEALKRLSAKEMVRGMPCLDHMEQLCDVCVVTKQRRLPFPPQMSFRAKERLELMHGDLCGPVTPATPGGRRYFLLLVDDLSRYMWVMVLGSKGEAADAIRRAQAAAEAECGRKLRVLRTDNGGDEGIQRHYTASYSPQQNGVVERRNQTGEAVVTAVYILNRSPTKALDGRTPYEAWHGHKPAVSHLRVFGCLAFAKELGHIGKLDDRSTPGVFIGYAEGSKAYRILDPETQRVRTVRDVVFDEGRGWVWDKAVDDGSTPTYDDFTIEYVHFEGAGGVGSSSSPSVSTPVPEPPPTPTPTHPRATTSTTTSSSSTPPQPVSPRAPAPTATPPGTSTPTPARVERSPVEFVTPLSHDGERIDAYHDGEQLRYRTMDDLLGDQPVPGLVPRNLEAQLHLACDDGEPRSFAEAEKHAAWRAAMQLEMDAVQENRTWELADLPRGHRAITLKWVFKLKRDEAGAIVKHKARLVARDFVQQEGIDYDDAFAPVARMESVRLLALAAQEGWGVHHMDVKSAFLNGDLKEEVYVHQPPGFVLPGKEGKVLRLHKALYGLRQAPRAWNAKLDSTLKGMGFEQSPHEAAIYRRGNGGKCLADAEVATFKKEMKATFQMSDLGPLSFYLGIEVHQDDSGITLRQTAYAKRVVELAGLTDCNPALTPMEERLKLSRDSTAEEVDATQYRRLVGSLRYLTHTRSDLAFSVGYVSRFMQQPTTEHQQAVKRIIRYVAGTLDHGLYYPRCPGKAHFVGYSDSDHAGDIDTSKSTSGILFFLGECLVSWQSVKQQVVALSSCEAEYMAASAASTQALWLARLLGDLLGRDTGAVELRVDSKSALALAKNPVFHERSKHIRVRYHFIRNYLEEGSIKASYINTKDQLADLLTKPLGRIKFLELCSRIGMAQLSHKTTHKT

SEQ ID NO: 20637 - protein, 1351 aa, Oryza sativa
  Clone ID: TF_OSC420547j.C1.p5.fg
MRVRLQVRHMWEAVRYGDVDYDEDRRALDALIAAIPPEMQFSLSQKRTAKEAWDAIAAARIGSDRARKSTLQALRKEWENLAFKPGEDVDDFALRLNTLLQKMVQYGDDTYDEERAVEKLFRCVPEKYRQIARSIESLLDLSTMTIEEALGRLKVVDSDEPQPLSGPITIGGKLHLTREQWEASQGDGRKGESSSPTGGCKPRKARGGVQLRWVRRRAEGGARRGAQGVATGNHKPARDDACRNCGKLGHWAKDCRQPRRGQAHVARVEEEPALLLAHASIELPPAAPAATAFLHLDEPKVLVSLCNGSSNDKADGWYLDTGATHHMTGRREFFIEFDSSVRGSVKFGDASGVEIKGVGSVTFTAKSAWDSWMRTAHACWSRTDTNRLYILSAQVAQPVCLTARRDDEAWQWHERFGHLHFEALKQLGAKEMVRGMPCLDHMEQLCDVCVVTKQWRLPFPQQTSFRAKERLELVHGDLCGPVTPATPGGRRYFLLLVDDLSRYMWVMVLGSKGEAADAIRHAQAAAEAECGRKLHVLRTDNSGEFTAAEFASYCADEGIQRHYTTPYSPQQNGVVERRNQTVVGMARALLKQRGMPAIFWGEAVVTAAYILNRSPTKALDGRTPYEAWHGRKPAVSHLRVFGCLAFAKELGHIGKLDDRSTPGVFIGYAEGSKAYRILDPETQRAVDDGSTPTYDDFTVEYVHFEGAGGVGSSSSPSVSTPAPESPPTPTPTHPRATTSTTTSSSSTPPQPVTPHAPAPTATPPSTSTPMPARVERSPVEFATPLSHDGERIDAYHDGEQLRYRTMEDLLGDQPVPGLVPRDLEAQLHLACDDGEPRSFVEAEKHAAWRAAMQSEMDAVQENRTWELADLPHGHRAITLKWVFKLKRDEAEAIVKHKARLVARGFVQQEGIDYDDAFAPVARMESVRLLLALAAQEGWGVHHIDVKSAFLNGDLKEEVYVHQPPGFVIPGKEGKVLRLHKALYGLRQAPRAWNAKLDSTLKGMGFEQSPHEAAIYRRGNGGNALLVGVYVDDLVITGTKDAEVAAFKEEMKATFQMSDLGPLSFYLGIEVHQDNSGIMLQQTAYAKRVVELAGLTDCNPALTPMEERLKLSRDSTAEEVDATQYRRLVGSLRYLTHTRPDLAFSVGYVSRFMQRPTTEHQQAVKRIIRYVAGTLDHGLYYPRCPGKAHFVGYSDSDHAGDIDTSKSTSGILFFLGKCLVSWQSVKQQVVALSSCEAEYMAASAASTQALWLARLLSDLLGRDTGTVELRVDSKSALALAMNPVFHERSKHIRVRYHFIRSYLEEGSIKASYINTKDQLADLLTKPLGRIKFLELCSRIGMAQLPHKTTHKT

SEQ ID NO: 20638 - protein, 1168 aa, Oryza sativa
  Clone ID: TF_OSC422293j.C1.p3.fg
MSIEEALGRLKVVDGDEPQPLSGPITIGGKLHLTREQWEASQGDGRKGESSSPTAGRKPRKARGGVQLRWARRRAEGGARRGAQGVATGNHKPARDDACRNCGKLGHWAKDCRQPRRGQAHVARVEEEPALLLAHASIELPPAAPAAAAFLHLDEPKVLVSLCNGSSNDKADGWYLDTGATHHMTGRREFFTEFDSSVRGSVKFGDASGVEIKGVGSVTFTAKSGEHRLLTGVYYIPALRNSIISVGQLDENGSRVLVEDGLMRIWDRRRRLLAKVTRGTNRLDILNVQVAQPVCLAAHRDDEAWQWHERFGHLHFEALKQLSAKEMVRGMPCLDHVEQLCDVCVVTKQRRLPFPQQTSFRAKERLELVHGDLCGPVTPATPGGRRYFLLLVDDLSRYMWVMVLGSKGEAADAIRHAQAAAKAECGRKLRVLRTDNGGEFTAAEFASYCADEGIQRHYTTPYSPQQNGVVERRNPTVVGMARALLKQRGMPAIFWGQAVVTAAYILNRSPTKALDGRTPYEAWHGRKPAVSHLRVFGCLAFAKELGHIGKLDDRSTPGVFIGYAEGSKAYRILDPETQRVRTARDVVFDEGRGWVWDKAVDDGSTPTYDDFTVEYVHFEGAGGVGSSSSPSVSTPAPESPPTPTPTHPRATTSTTTSSSSTQPQPVTPHAPAPTATPPSTSTPTPARVERSPVEFATPLSHDGERIDAYHDGEQLRYRTMEDLLGDQPVPGLVPRDLEAQLHLACDDGEPRSFVEAEKHAAWRAAMQSEMDAVQENRTWELADLPRGHRAITLKWVFKLKRDEAGAIIKHKARLVARGFVQQEGIDYDDAFAPVARMESVRLLALAAREGWGVHHMDVKSAFLNCDLKEEVYVHQPPGFVIPGKEAKVLRLHKALYGLRQAPRAWNAKLDSTLKGMGFEQSPHEAAIYRRGNGGNALLVGVYVDDLVITGTKDAEDNSGITLRQTAYAKRVVELAGLTDCNPALTPMEERLKLSRDSTAEEVDATQYRRLVGSLRYLTHTRPDLAFSVGYVSRFMQRPTTEHQQAVKRIIRYVAGTLDHGLYYPRCPGKAHFVGYSDSDHAGDIDTSKSTSGILFFLGKCLVSWQSVKQQVVALSSCEAEYMAASAASTQALWLARLLSDLLGRDTRTVELRVDSKSALALAKNPVFH

SEQ ID NO: 20639 - protein, 1253 aa, Oryza sativa
  Clone ID: TF_OSC900377j.C1.p6.fg
MVQYGDDTYDEERAVEKLFRCVPEKYRQIARSIESLLDLSTMSIEEALGRLKVVDGDEPQPLSGPITIGGKLHLTREQWEASQGDGRKGESSSSTGGRKPRKVRGGVQLRWARRRAEGGARRGAQGVATGNHKPARDDACRNCGKLGHWAKDCRQPRRGQAHVARVEEEEPALLLAHASIELPPAAPAAAAFLHLDEPKVLVSLCNGSSNDKADGWYLDTGATHHMTGRREFFTEFDSSVRGSVKFGDASGVEIKGVGSVTFTAKSGEHRLLTGVYYIPTLRNSIISVGQLDENGSRVLVEDGLMRIWDRRRQKNAKVTGGTNRLYILSAQVAQPVCLAARRDDEAWQWHERFGHLHFEALKQLSAKEMVRGMPCLDHVEQLCDVCVVTKQRRLPFPQQTSFRAKERLELMHGDLCGPVTPATPGGRCYFLLLVDDLSRYMWVMVLGSKGEAADAIRHAQAAAEVECGRKLRVLRTDNGGEFTAAEFTSYCADEGIQRHYTMPYSPQQNGVVERRNQTVVGMARALLKQRGMPAIFWGETVVTAAYILNRSPTKALDGRTPYEVWHGRKPAVSHLRVFSCLAFAKELGHIGKLDDRSTPRVFIGYAKGSKAFRILDPETQRVRTARDVVFDEGRGWVWDKAVDDGSTPTYDDFTVEYVYFEGAGGVGSSSSPSVSTPAPESPPTPTPTHPRATTSTTTSSSLTPPQPVTPHAPAPTATPPSTSTPTPARVERSPVEFATPLSHDGERIDAYHDGEQLRYRTMEDLLGDQPVPVPRDLEAQLHLACNDGEPRSFAEAEKHAAWRAAMQSEMDAVQENRTWELADLPRGHRAITLKWVFKLKRDEAGAIVKHKARLVARGFVQQEGIDYDDAFAPVARMESEGWGVHHMDVKSAFLNDNLKEEVYVHQPPGFVIPGKEGKRGNGGNALLVGVYVDDLVIAGTKDAEVAAFKEEMKATFQMSDLGPLSFYLGIEVHQDDSEITLRQTAYAKRVVELAGLTDCNPALTPMEERLKLSRDSTAEEVDATQYRCLVGSLRYLTHTRPDLAFSVGYVSRFMQRPTMEHQQAVKRIIRYIAGTLDHGLYYPRCPGKAHFVGYSDNDHAGDIDTNKSTSRILFFLGKCLVSWQSDKQQVVALSSYEAEYIAASAASTQALWLARLLSDLLGRDTGTVELRVDSKSALALAKNPVFHERSKHIRVRYHFIRSYLEEGSIKASYINTKDQLADLLTKPLGRIKFLELCSRIGMAQLAHKTTHKT

SEQ ID NO: 20640 - protein, 2020 aa, Oryza sativa
  unsure (1)..(2020): unsure at all Xaa locations
  Clone ID: TF_OSC34299j.C1.p1.np
AXIGNNLISSWFGMVYSWFGDRTVQPMPRYKPEYLFGVEGFVQELRTMSFVIGFGTAPFYAXIRHDRHEEKCRVKVTLNSNSEDIPSVMFEAGGRNYIHACQEVARIAIGELRDRYSDQLADTEYRYHPRQPQGSDRGSYLETEGIENDATTRHLVEMLWAMDESRAETVLAAQDREDRNRGKICELEDKVDRLEKELAALKGEAPPQKARIRLTARKRALFVPRYQLAPKVRVVEKEVAPADPPIIIISSDEEEESKRNHSKIEWVATQDDEDEPNEPSIDLRCSEEQDNRNGPNLNNPNNNNNGENPTLAQVLAQQTQLMNMMMQQLQNQQNQGNNHAPPQNKLAEFLRVRPPVFSSTTNPVEAGDWLHAIEKKLDLLQCTDQEKVSFASHQLHGPASEWWDHFRLNRTTAEPITWLEFTAAFRKTHIPSGVVSLKKKEFRSLTQGSRSVTEYLHEFNRLARYAPEDVRNDEERQEKFLEGLNDELSYPLMTGDYHDFQKLVDKAIRQEDKYNRMEQKKRRIAHFKAQQGSLGPQSMPQGGSSSVVRPQRXFFNNNAGNNIRNQAPRPVAASTQQQPAKREQGSKPMVCFNCGDPGHYADKCPKPRRVKVVPAQSNSAVPASKARVNHVAAAEAQDAPDVILGTFLVNSVPATVLFDSGATHSFLSMSFAGNHGMEVEDLRRPLMVSTPSNQALSLQRSPYVRIEIQGVPFLANLILLESKDLDVILGMDWLARHKGVIDCANRKVTLTSNDGRVVTVHALSSEFLRSRLNQITLEEIPIVREYPDVFPDDLPGMPPKRDIEFRIDLVPGTTPIHKRPYRMVANELAEVKRQVDDLLQKGYIRPSSSPWGAPVIFVEKKDHTQRMCVDYRALNDVTIKNKYPLPRIDDLFDQLKGATVFSKIDLRSGYHQLRIKEYRLFECTVMSFGLTNAPAFFMNHQLRIKEYRLFECTVMSFGLTNAPAFFMNLMNKVFMEYLDKFVVVFIDDILIYSKTKEEHEEHLRLALEKLXEHQLYAKFSKCEFWLSEVKFLGHVISAGGVAVDPSNVESVTNWKQPKTVSEIRSFLGLAGYYRRFIENFSKIAKPMTRLLQKDVKYKWSEECEQSFQELKSRLISAPILILPDPNEGGQLYCDASKLGLRCVLMQDGKVVAYASRQLRPHEKNYPTHDLELAAVVHALKIWRHYLFGTRTEEFERLNLGIVSIGFVAALEAKPTLIDQVREAQTNDPDIQEIKKNMRRGKAIGFLEDEHGTVWLGERICVPDNKDLKDAILKEAHDTLYSIHPGSTKMYXDLKERFWWASMKREIAEYVAVCDVCQRVKAEHQKPAGLLQPSKIPEWKWEEIGMDFITGLPRTSLGQDSIWVIVDRLTKVAHFIPVKTTYSGSRLAELYMARIVCLHGVPKKIVSDRGSQFTSNFWKKLQEEMGSKLNFSTAYHPQTDGQTERVNQILEDMLRACALDFGGSWDKNLPYAEFSYNNSYQASLQMAPYEALYGRKCRTPLLWDQTGERQVFGTDIVREAEEKVKIIQERLRVAQSRHKSYADNRRRDLSFEEGDYVYLRVTPLRGVHRFHTKGKLALRFVGPYKIVSRRGEVAYQLELPQSLAGVHNVFHVSQLKKCLRVPTEEANLEQIEVQEDLTYVEKPIRILETNERKTRNRVIRFCKVQWSNHSEEESTWEREDELNRGIEFDSDRPLSFKPSFPSSSPAAMGLRLRLRAPLKASPVSPPPAATLAFASRRQSRSSAPCAAVDSAVAVPCAAVDSAVAVAREGRHRGRQVVAVLVRRFAIVGDRRSIVAVVKPKNSAVSSSSPAPSVASPPSFWSSRRRSPRRRSPASVRRPSRPLRRAAAAVGDVIADVIKVVRHSVVSGESVFAGEEFEEFQGQQGKSHRSQTTRDVCQRVKAEHQRPAGLLQPLQVPEWKWDEIGMDFITGLPKTQGGYDSIWVVVDRLTKVARFIPVKTTYGGNKLAELYFARITDGQTECLNQILEDMLRACVLDFGKTWDKSLPYAEFSYNNCRVPKRL

SEQ ID NO: 20641 - protein, 799 aa, Oryza sativa
  Clone ID: TF_OSC400724j.C1.p1.gm
MVNTRSNRNGPNLNNPNNNNNGENPTLAQVLAQQTQLMNMMMQQLQNQQNQGNNHAPPQNKLAEFLRVRPPVFSSTTNPVEAGDWLHAIEKKLDLLQCTDQEKVSFASHQLHGPASEWWDHFRLNRTTAEPITWLEFTAAFRKTHIPSGVVSLKKKEFRSLTQGSRSVTEYLHEFNRLARYAPEDVRNDEERQEKFLEGLNDELSYPLMTGDYHDFQKLVDKAIRQEDKYNRMEQKKRRIAHFKAQQGSSQKPRLTLGPQSMPQGASTQQQPAKREQGSKPMVCFNCGDPGHYADKCPKPRRVKVVPAQSNSAVPASKARVNHVAAAEAQDAPDVILVREYPDVFPDDLPERIHQTEFISMGSSVKFLGHVISAGGVAVDPSNVESVTNWKQPKTVSEIRSFLGLAGYYRRFIENFSKIAKPMTRLLQKDVKYKWSEESVAVAREGRHRGRQVVAVLVRRFAIVGDRRSIVAVVKPKNSAVSSSSPAPSVASPPSFWSSRRRSPASVRRPSRPLRQAAAAVGDVIADVIKMAGSVSRRGLDMTGFVLELRGMCVVLGYPPGVDYQARPLPEQEGDDAEPHAAWEVTAVILTGSPERTSLAVTAGGDSFPAACQNAALLAIGTLHQRYPDELQHSPYRYHPRCGGARDFATFRDASSEDDATIVHLARMVEAYDAARIDFQQMVRRGMVENNMKILELRQENLQLKKDLHALEAQLCQLKVAQGEVCRPKRRRVCRSQKITARKSTSRPELVRQSLAWTCFVETPRAEPAPVVPQEGEASGVGSTEDALLLTFRPGPSQR

SEQ ID NO: 20642 - protein, 1594 aa, Oryza sativa
  Clone ID: TF_OSC401061j.C1.p17.fg
MVRCGGLCCARGTVTAPFRAPGLEWYIPGLEIDLYSRMPRYKPEYLFGVEGFVQELRTMSFVKGFGTAPFYAQIPHDRHEEKCRVKVTLNSNSEDIPSVMFEAGGRSYIHTCQEVARIAIGELHDRYSDQLADTEYRYHPRQPQGSDRGSYLETEGIEIDATTRHLVEMLWAMDETRAETVLAAQDREDRNRGKICKLEDKVDRLEKELAALKGEAPPQKARIRLTARKRALFVPRYQLAPKVRVVEKEVTPAPADPPVVNMVLTHSNGNGPNNNNNNNNNGENPTLAQVLAQQAQLMNMMMQQLQNQQNQGNNHAPPQNKLAEFLRVRPPTFSSTTNPVEAGDWLHAIEKKLDLLQCTDQEKVSFASHQLHGPASEWWDHFRLNRTTAEPITWLEFTAAFRKTHIPSGVVSLKKKEFRSLTQRSRSVTEYLHEFNRLARYAPEDVRTDEERQEKFLEGLNDELSYSLMTGDYHDFQKLVDKAIRQEDKYNRMEQKKRRIAQFKAQQGNSQRPRLTLGPQSMPQGGSSSVVRPQRQFFNNNAGNNIRNQAPRHVAASTQQQPAKKEQGSKPMVCFNCGDPGHYADKCPKPRRVKVVPTQSNSTVPASKAHVNHVAAAEAQGAPDVILGTFLVNSVPATVLFDSGATHSFLSMSFAGNHGMEVEDLRRPLMVSTPSNQVLSLRRSPSVRIEIQGVPFLANLILLESKDLDVILGMDWLARYKGVINCANRKVTLTSNDGRVVTVHASSSESLRSRLNQITLEEIPVVREYRDVFPDDLPGMPPKRDIEFRIDLVPGITPIHKRPYRMAANELAEVKRQVDDLLQKGYIRPSSSPWGAPVIFVEKKDHIQRMCVDYRALNDVTIKNKYPLPRIDDLFDQLKSATVFSKIDLRSGYHQLRIKEEDIPKTAFTTRYGLFECTVMSFGLTNAPAFFMNLMNKVFMEYLDKFVVVFIDDILIYSRTKEEHEEHLRLALEKLREHQLYTKFSKCEFWLSEVKFLGHVISAGGVAVDPSNVESVTNWKQPKTVSEIRSFLGLTGYYRRFIENFSKIAKPMTRLLQKDVKYKWSEECEQSFQELKSRLISAPILILPDPKKGFQVYCDASKLGLGCVLMQDGKVVAYASHQLRPHEKNYPTHDLELAAVVHALKIWRHYLFGTRTEVYTDHKSLKYIFTQPDLNMRQRRWLELIKDYDMGIHYHPGKANVVADALSRKGYCNATEGRQLPLELCKEFERLNLGIVSRGFVAALEAKPTLIDQVREAQINDPDIQEIKKNIRRGKAIGFLEDEQGTVWLGERICVPDNKDLKDAILKEAHDTLYSIHPGSTKMYQDLKERFWWASMKREIAEYVAVCDVCQRVKAEHQKPVGLLQPLKIPEWKWEEIGMDFITGLPRTSSGHDSIWVIVDRLTKVAHFIPVKTTYSGSRLAELYMARIVCLHGVPKKIVSDRGSQFTSNFWKKLQEEMGSKLNFSTAYHLQTDGQTERVNQILEDMLRACALDFGGSWDKNLPYAEFSYNNSYQASLQMASYEALYGRKCRTPLLWDQTGERQVFGTDILREAEEKIPTFSESPFSQEKNLKSSKASKASHTDPKQPFKHVDPI

SEQ ID NO: 20643 - protein, 1598 aa, Oryza sativa
  Clone ID: TF_OSC4272j.C1.p3.fg
KFHDKLSNMRLVDGAGRPQGVRVGRFINAAGTTGFPTGKRAMPRYKPEYLFGVEGFVQELRTMSFVKGFGTAPFYAQIPHDRHEEKCRVKVTLNSNSEDIPSVMFEAGGRSYIHTCQEVARIAIGELHDRYSDQLADTEYRYHPRQPQGSDRGSYLETEGIEIDATTRHLVEMLWAMDETRAETVLAAQDREDRNRGKICKLEDKVDRLEKELAALKGEAPPQKARIRLTARKRALFVPRYQLAPKVRVVEKEVTPAPADPPVVNMVLTHSNGNGPNNNNNNNNNGENPTLAQVLAQQAQLMNMMMQQLQNQQNQGNNHAPPQNKLAEFLRVRPPTFSSTTNPVEAGDWLHAIEKKLDLLQCTDQEKVSFASHQLHGPASEWWDHFRLNRTTAEPITWLEFTAAFRKTHIPSGVVSLKKKEFRSLTQRSRSVTEYLHEFNRLARYAPEDVRTDEERQEKFLEGLNDELSYSLMTGDYHDFQKLVDKAIRQEDKYNRMEQKKRRIAQFKAQQGNSQRPRLTLGPQSMPQGGSSSVVRPQRQFFNNNAGNNIRNQAPRHVAASTQQQPAKKEQGSKPMVCFNCGDPGHYADKCPKPRRVKVVPTQSNSTVPASKAHVNHVAAAEAQGAPDVILGTFLVNSVPATVLFDSGATHSFLSMSFAGNHGMEVEDLRRPLMVSTPSNQVLSLRRSPSVRIEIQGVPFLANLILLESKDLDVILGMDWLARYKGVINCANRKVTLTSNDGRVVTVHASSSESLRSRLNQITLEEIPVVREYRDVFPDDLPGMPPKRDIEFRIDLVPGITPIHKRPYRMAANELAEVKRQVDDLLQKGYIRPSSSPWGAPVIFVEKKDHIQRMCVDYRALNDVTIKNKYPLPRIDDLFDQLKSATVFSKIDLRSGYHQLRIKEEDIPKTAFTTRYGLFECTVMSFGLTNAPAFFMNLMNKVFMEYLDKFVVVFIDDILIYSRTKEEHEEHLRLALEKLREHQLYTKFSKCEFWLSEVKFLGHVISAGGVAVDPSNVESVTNWKQPKTVSEIRSFLGLTGYYRRFIENFSKIAKPMTRLLQKDVKYKWSEECEQSFQELKSRLISAPILILPDPKKGFQVYCDASKLGLGCVLMQDGKVVAYASHQLRPHEKNYPTHDLELAAVVHALKIWRHYLFGTRTEVYTDHKSLKYIFTQPDLNMRQRRWLELIKDYDMGIHYHPGKANVVADALSRKGYCNATEGRQLPLELCKEFERLNLGIVSRGFVAALEAKPTLIDQVREAQINDPDIQEIKKNIRRGKAIGFLEDEQGTVWLGERICVPDNKDLKDAILKEAHDTLYSIHPGSTKMYQDLKERFWWASMKREIAEYVAVCDVCQRVKAEHQKPVGLLQPLKIPEWKWEEIGMDFITGLPRTSSGHDSIWVIVDRLTKVAHFIPVKTTYSGSRLAELYMARIVCLHGVPKKIVSDRGSQFTSNFWKKLQEEMGSKLNFSTAYHLQTDGQTERVNQILEDMLRACALDFGGSWDKNLPYAEFSYNNSYQASLQMASYEALYGRKCRTPLLWDQTGERQVFGTDILREAEEKIPTFSESPFSQEKNLKSSKASKASHTDPKQPFKHVDPI

SEQ ID NO: 20644 - protein, 1729 aa, Oryza sativa
  Clone ID: TF_OSC900176j.C1.p15.fg
MGLRLRLRAPLKASPVSPPPAATLAFASRRQSRSSAVQPCAAAAAAAPAVCRRRFSRRRRSGRTSSWSPSRRRPRPPLRHRRRPPEHRRRRQAEELRRFLFVAGAVRCFSAVVLVVAPGLEWYIPGLEIELCSRDGCSEWLGLCNRIRHDRHEEKCRVKVTLNSNSEDIPSVMFEAGGRNYIHACQEVARIAIGELRDRYSDQLADTEYRYHPRQPQGSDRGSYLETEGIENDATTRHLVEMLWAMDESRAETVLAAQDREDRNRGKICELEDKVDRLEKELAALKGEAPPQKARIRLTARKRALFVPRYQLAPKVRVVEKEVAPADPPIIIISSDEEEESKRNHSKIEWVATQDDEDEPNEPSIDLRCSEEQDFPPVSLLVPYPCQMVNTRSNRNGPNLNNPNNNNNGENPTLAQVLAQQTQLMNMMMQQLQNQQNQGNNHAPPQNKLAEFLRVRPPVFSSTTNPVEAGDWLHAIEKKLDLLQCTDQEKVSFASHQLHGPASEWWDHFRLNRTTAEPITWLEFTAAFRKTHIPSGVVSLKKKEFRSLTQGSRSVTEYLHEFNRLARYAPEDVRNDEERQEKFLEGLNDELSYPLMTGDYHDFQKLVDKAIRQEDKYNRMEQKKRRIAHFKAQQGSSQKPRLTLGPQSMPQGASTQQQPAKREQGSKPMVCFNCGDPGHYADKCPKPRRVKVVPAQSNSAVPASKARVNHVAAAEAQDAPDVILGTFLVNSVPATVLFDSGATHSFLSMSFAGNHGMEVEDLRRPLMVSTPSNQALSLQRSPYVRIEIQGVPFLANLILLESKDLDVILGMDWLARHKGVIDCANRKVTLTSNDGRVVTVHALSSEFLRSRLNQITLEEIPIVREYPDVFPDDLPGMPPKRDIEFRIDLVPGTTPIHKRPYRMVANELAEVKRQVDDLLQKGYIRPSSSPWGAPVIFCGKERSYPEDLKGATVFSKIDLRSGYHQLRIKEEDIPKTAFTTRYRLFECTVMSFGLTNAPAFFMNLMNKVFMEYLDKFVVVFIDDILIYSKTKEEHEEHLRLALENKCEFWLSEVKFLGHVISAGGVAVDPSNVESVTNWKQPKTVSEIRSFLGLAGYYRRFIENFSKIAKPMTRLLQKDVKYKWSEECEQSFQELKSRLISAPILILPDPKKGFQVYCDASKLGLGCVLMQDGKVVAYASRQLRPHEKNYPTHDLELAAVVHALKIWRHYLFGTRTEVYIDHKSLKYIFTQSDLNMRQRRWLELIKDYDMGIHYHPGKANVVADALSRKGYCNATEGRQLPLELCKEFERLNLGIVSIGFVAALEAKPTLIDQVREAQTNDPDIQEIKKNMRRGKAIGFLEDEHGTRVKAEHQKPAGLLQPSKIPEWKWEEIGMDFITGLPRTSLGQDSIWVIVDRLTKVAHFIPVKTTYSGSRLAELYMARIVCLHGVPKKIVSDRGSQFTSNFWKKLQEEMGSKLNFSTAYHPQTDGQTERVNQILEDMLRACALDFGGSWDKNLPYAEFSYNNSYQASLQMAPYEALYGRKCRTPLLWDQTGERQVFGTDIVREAEEKVKIIQERLRVAQSRHKSYADNRRRDLSFEEGDYVYLRVTPLRGVHRFHTKGKLALRFVGPYKIVSRRGEVAYQLELPQSLAGVHNVFHVSQLKKCLRVPTEEANLEQIEVQEDLTYVEKPIRILETNERKTRNRVIRFCKVQWSNHSEEESTWEREDELKSAHPYLFASSSESRGRDSV

SEQ ID NO: 20645 - protein, 840 aa, Oryza sativa
  unsure (1)..(840): unsure at all Xaa locations
  Clone ID: TF_OSC400155j.C1.p1.np
GSVYAGALIGDRLVEVYMHMTDAKELWDVLNTKFGATDASNDLYIMEQFHDYKMTDNRSVVEQAHEIXTMAKELELLKCVLPDKFVAGYIIAKLPPSWRSFGTALKHKRQEYSVKGLIASLDVEEKAREKDVVSKGDGGQSNANVVHKAQNKSKGKYKAQQTTNFKKQKKKNNNPNQDERTCFVYGQPGHLARKCPQRKGMKAPSGQTSKSANVTIGNTGDGSGYGNLPTVFFVNQSTNWWVDTGANVHVCAGISLFSSYQVARGSTILMGNGVGTVDLKFTSGKIVQLKNVQHVPSIDRNLVSGSRLTRDGFKLVFESNKIVVSKHGYFIGKGYECGDLFRFSVSDFCNKSVNHICASVDDEANVXHSRLCHINFGLMSWLSSMCLIPKFSIVKGSKCHSCVQSKQPRKPHKVAEEINLAPVELLHSDLCEMNGVLTKGGKRYFMTLIDDATRFCYVYLLKMKDETLDYFKIYKAEVENQLDRKIKRLRSNRGGEFFSNEFDLFCEEHGIIHERTPPYSPESNGIVERKNRTLTDLVNAMLDTAGLPKAWWGEGLLISNHMLNRVPNRNRDQTPYEIWIGRKPSLSYLRTWGCLAKVNVPITKKRKLGPKTVDCVFLKYAHHNIAYRFLIVKSEVPDMHVGTIMESRDATFFESFFPMKDTHSGSSQPSEIIPSSITPPEQIEHTHEHVSEEDVSEAPRRSKRQRTAKSFGDDFTVYLVDNTPKSISEAYASPDADYWNEAVRSNGTWEVTERPYGCKPVGCKWVFKKKFRPDGTTKKYKARLVAKGYTQKEGEYFFDTYSPVARLTTIRVLLSLAASYCLLVHQMDVKTAFLNGELDE

SEQ ID NO: 20646 - protein, 287 aa, Oryza sativa
  Clone ID: TF_OSC12955j.C1.p6.fg
MAGFADALRPDKFTGVHFKRWQIWVILWLTAMKCFWVSTGKSMGVLNADQQKKFDEATTLFMGCILSVLGDRLVEVYMHMTDAKELWDALNTKFGATDASNDLYIMEQFHDYKMANNRSVVEQAHEIQTIAKELELLKRKHWEKDAASKGDGGQSTANVVHKAQNKSKGKYKAQQTTNFKKNKNNNNPNQDKRTCFVCGQPGHLARKCPQRKGMKAPAGQTSNSANVTIGNTRDGSGYGRTGFHRPTGEWVTCFCSWCWYGRYEVYFGKDRAAEERAACPFYRQESC

SEQ ID NO: 20647 - protein, 1355 aa, Oryza sativa
  Clone ID: TF_OSC24526j.C1.p2.fg
MAGFADTLRPDKFTGVHFKRWQIRVSTGKPEGVLTAEQQKQFEEATTLFVGCILSVLGDRLVEVYMHMTDAKELWDALNTKFGATDASNDLYIMEQFHDYKMADNRSVVEQAHEIQTIAKELELLKCVLPDKFVAGCIIAKFPPSWRSFNTALKHKRQEYSVEELIASLDVEEKAREKDAASKGDDGQSSANVVHKAQNKSKGKYKAQQTTNFKKQKNNNNNPNQDERTCFVCGQPGHLARKCPQRKGMKAPAGQTSKSANVTIGNTGDGNGYSNLPTVFSVNQSNNWWVDTGANVARGSTVLMGNGSHASVHGVGTFSIVKGSKCHSCVQSKQPRKPHKAAEERNLAHLELLHSDLCEMNGVLTKGGKRYFMTLIDDATRFCYVYLLKTKDEALDYFKIYKAEVENQLDRNIKRLRSDRGGEFFLYEFDLFCEEYGIIHERTPPYSPESNGIAERKNRTLTDLVNAMLDTAGLPKAWWGESISEAYASPDADYWKEAVRSEMDSIIANGTWEVTERPYGCKPVGCKWVFKKKLRPDSTIEKYKARLVAKGYTQKEGEDFFDTYSPVARLTTICVLLSLAASHGILVHQMDVKTAFLNGELDEEIYMDQPDGFVVEGQEAKVCKLLKSLYSLKQAPKQWHEKFDRTLTSACFAVNETDKCVYYRHGGGEGVILCLYVDDILIFRTNLEVINEVKSFLSQKFDMKDLGVADVILNIKLIRGKNGITLLQSHYVEKILNHFGYIDSKPSPTPYDPNLLLRKNKRIARNQLEYSQIIGSLMYLASATRPDISFAVSKLSRFTSNPGDDHWRALERVMRYLKGTMELGLHYSGYPAVLEGYSDSNWISDVDEIKATSGYVFTLGGSAVSWRSCKQTILTRSTMEAELTALDTATVEAEWLRDLLMDLPIVEKPVPAILMNCDNQTVIVKVNSSKDNMKSSRHVKRRLKSVRKLRNSGVITLDYIQTTRNLADPFTKGLSRNVIDNASKEMGLRPMTAVTAGGRWRHTRQIIPKEFVQRLKGDIPGEIQLETRNRNSHTVRVDKTQEKVIFTEGWAQFVKTFDLQMGDSMMFRFNGNSQFDVIIVDQIGREKACSAVVDDSQNPNVQERRVDATETLNSSRAHSQPMPMQSTTETVNHSHARPCPMHTAVDCMPLSHAHPQPMPMQFPTETVNHCHAPTGPMEMPLENVALSHAHARPLQMQSQPTDRLTQVQRGYSLSSKDQDCRVGVIPDPIIGQKTILSRVQVNVVKRKIQNIGSQIPIFVSVIGKNNASGRISSLSIANRYVDNYLQDEKTIRLSRLGDKWNIRLSDSSGNRRMVGGCRKFAEDNDVGVGDICLFELLKNHKCTMKVHIIRAKDIC

SEQ ID NO: 20648 - protein, 99 aa, Oryza sativa
  Clone ID: TF_OSC32480j.C1.p1.hg
KNNNNPNQDERTCFVCGQPGHLARKCPQRKGMKAPVGQTSKSANVTIGNTGDGSGYGRTGFHRPNGLGHMLLFMLKNVQHVPSIDRNLVSGSRLTRDGF

SEQ ID NO: 20649 - protein, 2737 aa, Oryza sativa
  Clone ID: TF_OSC400022j.C1.p2.fg
MAGFADALRPDKFTGVHFKRWQIKITLWLIAMKCFWVSTGKPMGVLNADQQKEFDEATTLFVGCILSVLGDRLVEVYMHITDAKELWDALNTKFGATDASNDLYIMEQFHDYKMADNRSVVEHAHEIQTMAKELELLKFRYCTQTQETGIRSVEGLIASLDVEEKAREKDVASKGDGGQSTANVVHKAQNKSKGKYKAQQTTNFKKKNNNNNSNQDERTCFVCGQPGHLARKCPQRKGMKAPAGQTSKSANVTIGNTGDGSGYGNLPTVFSVNQSTNWWVNTGANVARGSTVLMGNGSHASVHGVGTVDLKFTSGKIVQLKNVQHVPSIDRNLVSGSRLTRDGFKLVFESNKVVVSKHGYFICQGHEYRGLFRFSLSDFCNKSVNHIFGSVDDEANAEVENQLHRKIKRLRSNRGGEFFSNEFDLFCEEHGIIHERTPPYSPESNGIAERKNRTLIDLVNAMLDTAGLPKAWWGEALLTSNHVLNRVPNRNKDKTPYEIWIGRKPSLSYLRTWGCLAKVNVPITKKCKLGPKTVDCVFLGYAHHSIAYRFLIVNLSSITPPEQTEHTHEHVTEEDDSEAPRRSKRQRTAKSFGDDFTVYLVDDTPKSISEAYASPDADYWKEAVRSEMDSIIANGTWEVKTCGVQVASHGLLVYQMDVKIAFLNGELDEEIYMDQPDWFVVEGQEGKVCKLLKSLYGLKQAPKQWHEKFDKTLTFAGFAVNETNKCVYYRHGGGEGVILCLYVDDILIFGTNLEVINEVKSLLSQNFDMKDLGVANVILNIKLIRGENGITLLQSHYVEKILNRFGYIDSKPSPTPYDPNLLLRKNKRITRNQLEYSQIIGSLIYLASATRPDISFAGYSDSNWISDVDEIKATSGYVFTLGGGAVSWRSCKQTILTRSTMEAELTALDTATVEAEWLRDLLMDLPIVEKPVPAILMNCDNQTENSDLFSFGNIPKNPMDRQWMYADRRSKEFIDGVHYFLRVAEANRQRGFICCPCNKCKNQKEYSASRTIYFHLFESGFMPSYNCWTSHGEQGVEMEEDEVEDDNIPDFAQYDGFEENQTGEEEIAADGNDIADDLGQMLQDAREDCESEKEAHKLDKMLEDHRTSLYPGCEQGHKKLDTTLEFLQWKAKNGVSAKAFGDLLKLVKNILPGGNKLPETTYEAKIVCPLGLEVHKIHACPNDCILYRGEEYENLEACPVCKALRYKIRRDDPGEVDGQLTKKRIPAKWRNIDRKFKEFGKDARNIRFGLSTDGMNPFGEMSSGHSTWPVTMCIYNLSPWLCMKRKYIMMPIIIQGPKQPGNDIDVYLRPLVEDLKQLWKKEGVPVWDEDKQEEFNLRALLFVTINDWPALSNLSGQSNKGYKACTHCMDETESTYLKHCRKVVYMGHRRFLAANHPVRKKGKHFKHKADHRMKPKHHSGKTVFAMIKDLKVVFGKGPGSQPIESEDSHAAMWKKNSIFWELPYREFLDVRHAIDVMHLTKNLCVNLLGFLGVYGKSKDTLEARNDLKHMEQRGDLHPEPKEKGSHYLSPASYTLSKAEKESIFEYLESIKVPSGYSTNIKRIISMKEKKFTNLKSHDCHVLMTQLLPVVIRGILPENVRATITKLCAFMNAISQKVIDPDRLEALQNEVVQCLVSFELIFLPSFFNIMTHLLCHLVKEIRILRPVYLHNMFPFERYMGVLKKYVRNRARPEASIAKGYGTEEVIEFCAEFIEDLRPIGVPESRHEGRLRGKGTLGRKSNNDAPYIEEHLALVRARNIGKSDAWITWHHIDTFPTWLRQHLMGNESINQQLAFLARGPSGSIATFQGYEINGYTFYTRAQDMKSTNQNSAVRVDAMGHDATTATYYGAIEDIWELDYGPLKVPLFWCQRVRLTGGGIMIDDSGMTTVDLNKVGYSDEPFVLANDVTQVFFVKDMSSKGKKGRGPNEPKRQVVLPGKRKIVGAEDKTDEDYDQLDRQPPFTVTIDPSILLSNEDTPYSRSDHKEGTIMADRDEEQILYDTIAEGSSQYWNEEEGNEDPNQYLNEKGNVERDAEGNQQGHVERDVEGNQEEEASGSQPSVGQKRARGQRGAAKKLEGRHIIMEVEEDGRPSAPAVAAKNYVRHSGWVVRDNVPVSTVYWRRTRTRGDHESFVLDSEKEMLWTIMLETFTLPAGTEDKVKRWTLKKMAEQFQSFKGELYKKYILKGQTPNFDTFPKLRDHWDEFVAYKTGEQGQAMMERNKENAAKKKYHHYLGSGGYSVTMPKWEEMEAILIERGIEPATANWPERSKFWYYAHGGTLNPADGSLVFGDQIREAARRLTDAVEASSQGTFRSDRYRDELTLALSRMRSKRDTEAKIADLEFRVSSYELSMQEEVTRKVDERIAAHRSHDPQPTIPPAMMSPSGNRSSCALTGQVGLQSMDAIQTQDESTCPVDDITQQTPSELHIPYKNLSIKVASGMAIPTDPSGTYHCRPIPAGYSKVEVELVEGAYEDLELDYPGGDGSSTDSSSGSCTDSSSGSYTYSSASSSSGTFKVKGPPPAPPPAHTRATKKAKVDAAKNKDPGYDCTQEELDAYVASEVKRQFKPRSPEKKIPIDPSVRNFFRGMSASVKEAIKLSDYERTLKKASSGKSKPVPQLGERPNQEIEPLVTGKEMMIEQFITDTGLTTDQLLGVAPIEKTEVKYMYELGKPLVKPELLQSLPTQMYKFHQLYMEMSATGREMIGARIRDTDFLQGDDILWINFRGINELYQLDALDISIMSC

SEQ ID NO: 20650 - protein, 1132 aa, Oryza sativa
  Clone ID: TF_OSC400667j.C1.p2.fg
MARLPLRSRATLLRRRPQLRVVPAEQPVFPAPRCCDFTMAGFADALRPDKFTGVHFKRWHIRVTLWLTAMKCFWQKQFEEATTLFVECILSVLGDRLVEVYMHMTDAKELWDALNTKFGATDASNDLYIMEQFHDYKMADNRSVVEQAHEIQTMAKELELLKCVLPDKFVVGCIIAKLPPSWRSFGPEQEKGKYKAQQTTNFKKQKKNNNNPNQDERTCFVCGQPGHLARKCPQRKGMKTPTSQTSKSANVTIGNTGDRSGYGRTGFHRPSGEWVTCFYSWCWHGRYEVYFGKDRAAEERATCPFYRQESCYECGGLFRFSLSDFCNKSVNHICGSVDDEANVWHSRLCHINFGLMSRLSSMFLIPKFSIVKGSKCHSCVQSKQPRKPHKAAEERNLAPLELLHSDLCEMNGVLTKGGKRYFMMLIDDATRFCYLYLLKTKDEALDYFKIYKAEVENQLDRKIKRLRFDRGGEFFSNEFDLFCEEHGIIHERTPPYSPESNGIAKRKNRTLTDLVNAMLDTAGLPKARWAEALLTSNHVLNRVPNRNKDKTPYEIWIRRKPSLSYLRTWGCLAKVNIPITKKRKLGPKSVDCVFLGYAHHNIAYRFLIVKSEVPDMHVGTIMESRDATFFENFFPMKDAHSSLSQPSEVIPSPITPPEQTEHTHEHVTEEDVSEAPRRSKRQRTAKSSGDDFTVYLMDDTPKSILEAYASPDADYWKEAIRSEMDSIIANRTLEVTERPYGCKPVGCKWVFKKKLRPDGTIEKYKARLVAKGYTQKEGEDFFDTYSPVARLTTIRVLLSLAASHGLLVHQMDVKTAFLNGELDEEIYMDQPDGFVVEGQEGKVCKLLKSLYGLKQAPKQWHEKFDKTLTSTGFAVNEADKCVYYRHGGGEGVILCLYVDDILIFGTNLEVINEFYYVEKILNRFGYIDSKPSPTPYDPSLLLRKNKRIARNQLEYSQIIGSLMYLASATRPDISFVGYSDSNWISNVDEIKATSGYVFTLGGGAISWRSCKQIILTRSTMEAELTALDTATVEAEWLRDLLMDLPIVEKPVPGILMNCDNQTVIVKVNSSKDNMKSSRHVKRRLRSVRKLRNSGVITLDYIQTARNLADPFTKGLSRNVIDNASKEMGLRPM

SEQ ID NO: 20651 - protein, 1306 aa, Oryza sativa
  unsure (1)..(1306): unsure at all Xaa locations
  Clone ID: TF_OSC400820j.C1.p1.np
MAGFADALRPDKFTHFKRWQIRVTLWLTAMKCFWVSTGKPEGVLTAEQQKQFEEATTLFVGCILSVLGDHLVEVYMHMTDAKELWDALNTKFGATDASNDLYIMEQFHDYKMADNRSIVEQAHDIQTMAKELELLKCVLPDKFVVGCIIAKLPPSWRSFGTALKHKRQEYSVEGLIASLDVEEKAREKDAASKGDGGQSSANVVHKAQNKSKGKYKAQQTTNFKKQKKNNNNPNQDERTCFVCGQPGHLARKCPQRKGMKAPAGQISKSANVTIGNTGDGSGYGNLPTVFSVNQSTNWWVDTGANVHVCADISLFSSYXVARGSTVLMRNGSHASVHGVGMVDLKFTSGKIVQLKNVQHVPSIDRNLVSGSRLTRDGFKLVFESNKVVVSKHGYFIGKGYECGGLFRFSLSDFCNKSVNHICGSVDDEANVWHSRLCHINFGLMFRLSSMCLIPKFSIVKGSKCHSCVQSKQPRKPHKAAEERNLAPLELLHSDLCEMKWVLTKGGKRYFMTLIDDATRFCYVYLLKTKDEALDYFKIYKAEVENQLDRKIKRLRSDRGGEFFSNEFDLFCEEHGIIHERTPPYSPESNGIAERKNRTLTDLVNAMLDTAGLPKAWXGEALLISNHVLNRVPNRNKDETPYEIWIGRKPSLSYLRTWGCLAKVNVPVTKKRKLGPKTVDCVFLGYAHHSIAYRFLIVKSEVPDMHVGTIMESRDATFFESFFPMKDTHSSSSQPSEIIPGSITPPEQTEHTHEHVTKEDDSEAPRRSKRQRTAKSFGDDFTVYLVDDTPKSISEAYASPDANYWKEAVRSEMDSIIANGTWEVTERPYGCKPVGCKWVFKKKLRPDGTIEKYKARLVAKGYTQKEGEDFFDTYSPVARLTTIRVLLSLAASHGLLVHQMDVKTAFLNGELDEEIYMDQPDGFVVEGQEGKVCKLLKSLYGLKQAPKQWHEKFDKTLTSAGFAVNEADKCVYYRHGGGEGVILCLYVDDILIFGTNLEVINEVKSFLSQNFDMKDLGVADVILNIKLIRGENVITLLQSHYVEKILNRFGYIDSKPSPTPYDPSLLLRKNKRIARNQLEYSQIIGSLMYLASATRPDISFAVSKLSRFTSNPGDDHWRALERVMRYLKGTVELGLHYTGYPAVLEGYSDSNWISDVDEIKATSGYVFTLGGGAVSXRSCKQTILTRSTMEAELTALDTATVEAEWLHDLLMDLPIVEKPTCEKTIEVCQEIKKLWSYNVGLHPNSXKPGRSLHEGTITKCDRQCIEGDGFETHSILERTHLCELDCWSQSMEILGESSRKLTKDLGV

SEQ ID NO: 20652 - protein, 364 aa, Oryza sativa
  Clone ID: TF_OSC400991j.C1.p14.fg
MADNRSVVEHAHEIQTMAKELELLKCVLPDKFVAECIIAKLPPSWRGFGTALKHKRQEYSVEGLIASLDVEEKAREKDAASKGDGGQSTANVVHKAQNKSKGKYKAQQTTNFKKKKNNNNPNQDERTCFVCGQPGHLARKCPQRKGMKAPAGQTSKSANVTIGNTGDGSGYGGNVARGSTVLMGNGSYASIHGVGTVGRAEPTNCYSQKCKGNFTLRKCSLRLAAEDEIHALLAIMELGAFLHSLLLRPAARDEINAFMSAWSSARSSAYSAPVWQSPLLIPSSSTWVPSSLIDVLASILTELIVGPCCPIITLDQAEVTEAFRAFDCKGNGFISAIELTRSIADTATPTASSSFYLTVGPITH

SEQ ID NO: 20653 - protein, 1035 aa, Oryza sativa
  Clone ID: TF_OSC401117j.C1.p5.fg
MAGFADALRPDKFTSVHFKRWQIRVNLWLTAMKCFWVSTGKPMGVLNADQQKEFDEATTLFVGCILSVLGDRLVEVYMHMTDATELWDALNTKFGATDASNDLYIMEQFHVYKMADNRSVVEQAHKIQTMAKELKLLKCVLPDKFVAGCIIAKLSPSWRGFGTALKHKRQEYFVEGLIASLDVEEKAREKDVASKGDGGQSSTNVVHKAQNKSKGKYKAQQTTNFNKKKKNNNPNQDERTCFVCGQPGHLARKCPQRKGMKAPAGQTSKSANVTIGNTGDGSGYGRTGFHRPNGEWVTCFCSWCWHGRSEVYFGKDRAAEERVAYYWKEDVRSEMDSIIANGTWEVTERPYGCKPVGCKWVFKKKLRPDGTIEKYKARLVAKGYTQKEGEDFFDTYSPVARLTTIRVLLSLAASHGLLIHQMDVKTTFLNEELDEEIYMDQPDGFVVEGQEDKVCKLLKSLYGLKQAPKQWHEKFDKTLTSAGFAVNEADKYVYYRHGGGEGVILCLYVDDILIFRTNLEVINEVKSFLSQNFDMKDLGVADVILNIKLIRGENGITLLQSHYVEKILNRFDYIDSTMELGLHYSGYPAVLEEYSGSNWISDVDEIKATSGYVFTLGGGAVSWRSCKQTILMRSIMEAELTALDTATVEAEWLRDLLMDLPIVEKPVPAILMNCDNQTIIVKMNSSKDNMKSSRHVKRRLKFVRKLRNSGVITLDYIQTARNLANPFTKGLSRNVIDNASKEMGLRPISNDTLMLLYICNVMIYLWNILNHYMPIFSTFKRHEIEAYEKFKRSAVGTALYIHPCLSEISEGDAADRASNLTDATVDSLIESIIIKDGVKAKFFFNIMSLANSAGEKLLAFSQYILPMKFLERLLVKRLGWHVGKEIFMISGDTSADDREVAMDQFNNSADAKVLFGSIKACGEGISLVGASRVIILDVHLNPSVTRQAIGRAFRPGQQKKVFVYRLVAADSPEVKFHETAFKKEVIPKLWFEWSELCTTEDFKLNQVDIDDSEDELLEANAIRQDIKALYRRMLQ

SEQ ID NO: 20654 - protein, 1308 aa, Oryza sativa
  unsure (1)..(1308): unsure at all Xaa locations
  Clone ID: TF_OSC401276j.C1.p11.np
MAGFADALRPNKFTGVHFKRWQIRVTLWLMVMKCFWVSTGKPEGILTADHQKQFEEATTLFVGCILSVLGDRLVKVYMHMTDAKELWDALNTKFGATDASNDLYIMEQFHDYKMADNRSVVEQAHEIQTMAKELELLKCVLPDKFVAGCIIAKLPPSWRSFGTALKHKRQEYSVEGLIASLDVEEKAREKDAASKGDGGQSSANVVHKVQNKSKGKYKAQQTTNFKKQKKNNNNPNQDERTCFVCGQPGHLARKCPQRKGMKAPAGQTSKSANVTIGNTGDGSGYGNLPTIFSVNQSTNWWVDTGANVHVCADISLFSSYQVARGSTVLMGNGSHASVHVVGTVDLKFTSGKIVQLKNVQHVPSIDRNLVSGSRLTRDGFKLVFESNKVVVSKHGYFIGKGYECGGLFRFSLSDFCNKSVNYICASVDDEANVWHSRLCHINFGLMSRLSSMCLIPMFSIVKGSKCHSCVQSKQSLKPHKAAEERNLAPLELLHSDLCEMNGVLTKGGKRYFMTLIDDATRFCYVYLLKTKDEALDYFKIYKAEVENQLDRKIKRLRSDHGGEFFSNEFDLFCEEHGIIHERTPPYSPESNGIAERKNRTLTDLVNAMLDTAGLPNAWWGEALLTSNHVLNRVPNRNKDKIPYEIWIGRKPSLSYLRTWGCLAKVNVPITKKRKLGPKTVDCVFLGYDHHSIAYRFLIVKSEVPDMHVGTIMESRDATFFESFFPMKDTHSGSSQPSEIIPSSITPPEQTEHTHEHVSEEDVSEAPRRSKRQMTAKSFGGDFTVYLMDDTPKSISEAYASPDADYWKEAVRSEMDSIIANGTWEVTERPYGCKPLGXKWVFKKKLRPEGTIEKYKARLVAKGYTQKEGEDFFDTYSPVARLIIFCVLLSLAASHGLLVHQMDVKTAFLNGELDEEIYMDQPDGFVVEGQEGKVCKLLKSLYGLKQAPKQWHEKFDKTLTSAGFAVNEADKCVYYRHGGGEGVILCLYVDDILIFGTNLEVINEVKSFLSQNFDMKDLGVADVILNIKLIRGENEITLLQSHYVEKILNRFGYSDSKPSLTPYDPSLLLRKNKRIARNQLEYSQIIGSLMYLASATRSDISFAVSKLSRFTSNPGDDHWRALERVMRYLKGNMELGLHYTGYPAVLEGYSDSNWISDVDEIKATSGYVFILGGGAVSWRSCKQTILTRSTMEAELTALDTATVEAEWLRDLLMDLPIVEKPTCEKTIEVCQEIEKLWSYNVGLHPNSXKPGRSLHEGTITKCDRXCIEGDGFETHSILERTHLCKLDCWLQSMEILGESSRKLTKDLGV

SEQ ID NO: 20655 - protein, 1039 aa, Oryza sativa
  Clone ID: TF_OSC401339j.C1.p49.fg
MGRAGLRNLCLRRPAPGEGAVIFTMAGFTDALRLDKFTGVHFKRWQIRVTLWLIAMKCFWVSTGKPMGVLNADQQKEFYEATTLFVGCILSILGDRLVEVYMHMTDAKELWDALNTKFGATDASNDLYIMEQFHDYKMANNHSVVEQAHEIQTMAKELELLKCVLPDKFVPGCIIAKLPPSWRGFGTALKHKRREYSIEGLIVSLDVEEKAWEKYAASKGDAQQTTNFKKQKKNNNNPNQDERTCFVCGQPGHLARKCPQRKGMKAPAGQTSKSANVTIGNTGDGSGYGNLPTVFSVNQSTNWWVDTGANVARGSTILMGNGSHASVHGVGTVDLKFTSGKIVQLKNVQHVLSIDRNLVSGSRLTRDRFKLVFESNKVVVSKHGYFIGKGYECGGLFRFFLSDFCNKSVNHICGSVDDEANVWHSRLCHINFGLMSRLSSIVPNRNKDKTPYEIWIGRKPSLSYLRTWGCLAKVNVPITKKRKLGPKTVDCVFLGYAHHSIAYRFLIVKSEVPDMHVGTIMESRDATFFESFFPMKDTHSGSSQPSEIIPSSITPPEQTEHTHEHVSEEDVSEAPRRSKRQRTAKSFGDDFTVYLVDDTPKSISEAYASPDADYWKEDVRSEMDSIITNGTWEVTERPYGCKPVGCKWVFKKKLRPDGTIEKCKARLVAKGYTQKEGEDFFDTYSPVARLTTIRVLLSLAASHGLLVHQMDVKTAFLNGELDEEIYMDQPNGTNLEVINEVKSFLSQNFDMKDLGIADVILNIKLIRGENEITLLQSHYVEKILNRFGYIDSKPSPTPYDPSLLLRKNKRIARNQLEYSQIIGSLMYLASATRPDISFAVSKLSRFTSNPGDDHWRALERVMHYLKGTMELGLHYTGYPAVLKGYSDSNWISDVDEIKATSRYVFTLGGGAVSWRSCKQTILTRSTMEAELTALDTATVEAGWLCDLLMDLPIVEKPVPAILMNYDNQTVIVKVNSSKDNMKSSRHVKRRLKSIRKLRNSGVITLDYIQTARNLADPFTKGLSRNVIDNASKEMGLRPM

SEQ ID NO: 20656 - protein, 681 aa, Oryza sativa
  Clone ID: TF_OSC401388j.C1.p3.gm
MGLPVDGGGETCLSSTMLSQASLRLGFRKGKRGQRSSDSVRARRGGTREGAVGRVRGGRREEEEAAAVEKQHEVQRSAGGVGGRLGITGANGPFECAREAGTILQHDRVSHPGAVTMPPRQKGKRGWANVAMGDVVPHTTAPAMLLLSLLIFAQSQHAEKPSVTTPGWLALPFQCQCCAQGPEQEQGKYKAQQTTNFKRQKKNNNNPNQDERTCFVCGQPGHLARKCPQCKGMKAPAGQTSQSANVTIGNTGDGSGYDNLPTVARGSTVLMGNGSHASVHGVGTVDLKFTSGKIVQLKNVQHVSSIDRNLVSGSRLTRDGFKLVFESNKVVVSKHGYFIGKGYECGGLFRFPLSDFCNKSVNHICDSVDDEANVWHSHYWKEAVRSEMDSIIANGTWEVTERPYGCKPVGCKWVLKKKLRPDGTIEKYKARLVAKGYTQKEGEDFFDTYSPVARLTTIRVLLSLEDSHGLLVHQMDVKTAFLNGELDEEIYMDQPDGFIVEVNEADKCVYYRHGGGEGVILCLYVDDILIFGTNIEVINESHYVEKILNHFGYIDTGQRQRAWRGWAQPRRRETGTAAAGKGARGSGDPPISAAAQGGAGASVAAWQRHGQAQAASGGLESDMMAHGGAGLKAAMAIRGDAMVRQLRRRMRDAMAAAAHGARGTDVTATVTRVARGSARRG

SEQ ID NO: 20657 - protein, 1256 aa, Oryza sativa
  Clone ID: TF_OSC401417j.C1.p24.fg
MAGFADTLRPDKFTGVHFKRWQIRVSTGKPEGVLTAEQQKQFEEATTLFVGCILSVLGDRLVEVYMHMTDAKELWDALNTKFGATDASNDLYIMEQFHDYKMADNRSVVEQAHEIQTIAKELELLKCVLPDKFVAGCIIAKLPPSWRSFNTALKHKRQEYSVEELIASLDVEEKAREKDAASKGDDGQSSANVVHKAQNKSKGKYKAQQTTNFKKQKNNNNNPNQDERTCFVCGQPGHLARKCPQRKGMKAPAGQTSKSANVTIGNTGDGNGNLVSGSRLTRDGFKLVFESNKVVVSKHGYFIGKGYECGGLFRFSLSDFCNKSVNHICGSVDDEANVWHSRLCHINFGLMSRLSSMCLIPKFSIVKGSKCHSCVQSKQPRKPHKAAEERNLAHLELLHSDLCEMNGVLTKGGKRYFMTLIDDATRFCYVYLLKTKDEALDYFKIYKAEVENQLDRNIKRLRSDRGGEFFLYEFDLFCEEYGIIHERTPPYSPESNGIAERKNRTLTDLVNAMLDTAGLPKAWWGESRDVTFFESFFPMKDTHSNSSQPSEIIPSSFTPPEQIEYTHEHVTEEDDSEAPRRSKRQRTTKSFGDDFTVYLVDDTPKSISEAYASPDADYWKEAVRSEMDSIIANGTWEVTERPYGCKPVGCKWVFKKKLRPDSTIEKYKARLVAKGYTQKEGEDFFDTYSPVARLTTICVLLSLAASHGILVHQMDVKTAFLNGELDEEIYMDQPDGFVVEGQEAKVCKLLKSLYSLKQAPKQWHEKFDRTLTSACFAVNETDKCVYYRHGGGEGVILCLYVDDILIFRTNLEVINEVKSFLSQKFDMKDLGVADVILNIKLIRGKNGITLLQSHYVEKILNHFGYIDSKPSPTPYDPNLLLRKNKRIARNQLEYSQIIGSLMYLASATRPDISFAVSKLSRFTSNPGDDHWRALERVMRYLKGTMELGLHYSGYPAVLEGYSDSNWISDVDEIKATSGYVFTLGGSAVSWRSCKQTILTRSTMEAELTALDTATVEAEWLRDLLMDLPIVEKPVPAILMNCDNQTVIVKVNSSKDNMKSSRHVKRRLKSVRKLRNSGVITLDYIQTTRNLADPFTKGLSRNVIDNASKEMGLRPIEDAVLQSILERTHLCELDCWSQSMKILGESSRKLTKDLGDCGHCGRALAAHAAGLQQCASAALRLRRQPAKAADCCRLRRQCGSGLLRRPSRPRRARVARRRSLSRSDQIAARVGVATREGEEGRDRESCDGATLRFLNSN

SEQ ID NO: 20658 - protein, 760 aa, Oryza sativa
  Clone ID: TF_OSC401478j.C1.p139.gm
MTENRFLDKTSPKDESEGAQIATPISGDETPSSSTMTRLVQYNSCRSATSTVAANLPRSMRRRWGTSTTAASVPVQCPRCRPPPAARLTLPTVRAARGTHRALLEEDSSPITIDVELERGLQNLCLRRPALGEGGNKIFGKRFARLLPIRPRRLAFLSARVLCAFVDARNREVTLWLGAMKCFWVSTGKPMGVLNADQQKEFDEATTLSVGCILSVLGDRLVEVYMHMTDAKELWDALNTKFGATDASNDLYIMEQFHDYKMADNRSVVEQAHEIQTMAKELELLKCVLPDKFVAGCIIVKLPPSWRGFSTALKHKRQEYSVEGLIASLDVEEKAREKDVASKGDGGQSTANVVHKAQNKSKGKYKAQQTTNFKKKKKNNNPNQDERTCFVCGQPGHLARKCPQRKGMKAPAGQTSMSANVTIGNTGDGSGYGKIVQLKNVQHVPSIDRNLVSGSRFAVNDAMMQINVYTIAMMGSHYVEKILNRFGYIDSKPSPTPYDPSLLLRKNKRIARNQLEYSQIIGSLMYLASATRPDISFAVSKLSRKLRNSGVITLDYIQTTRNLADPFTKGLSRNVIDNASKEMGLRPIEDAILQSILERTHLCELDCWSQSMDILGESSRKLTKDHPSVHLRSGEQVSGTSAFDAPHWEKAAIRGDSRSTRAMEWVGGETVVSVPPEPQVEEHHDEQQKHIGRRLGEEKLMRAEHWKWERKVWDGENTRAKKCGKEMVEIDNSCKVREKPCKVKNVPKYSEQNVLALKNV

SEQ ID NO: 20659 - protein, 1460 aa, Oryza sativa
  Clone ID: TF_OSC401518j.C1.p12.fg
MPLRRGALPPRAPLRPAPGGLCGRALLRRTCSLSWPATTGGAALRHTKYKNLADLYYAEDLVVDLISALYSYQMKNSRWKPVFALETGGPSNADSQDFEDDGGFLGRTRLGRLIQAAGRELLEKLNSARSNSPTKIFLVLFGFYTANALATILGQTGDWDVLVAGVVVAAIEGIGMLMYRKPMSRPPGRFQSLIAMVNYWKAGEAKVRECLGDRRRRGELDAGWEWWIVEGDELLLDIICHSPLGIGALLWVWRIHTVHAAAYSQRVTIQLPTMGLESRDATSGGDLRSRAKDDSYHNPQAPCKEELGAVTGQRRRKIRICFIVGNIPKNPVSTGKPMGVLNADQQKEFDEATTLFVGCIPSVLGDRLVEVYMHMTDAKELWDALNTKFGATDASNDLYIMEQFHDYKMADNRSVVEQAHEIQTMAKELELLKCVLPDKFVAGCIIAKLPPSWRGFGTALKHKRQEYSVEGLIASLDVEEKAREKDVASKGDGGQSTANVVHKAQNKSKGKYKAQQTTNFKKKNNNNNPNQDKRTCFVCGQPGHLARKCPQCKGMKAPAGQTSKSANVTIGNTGDGSGYGANVHVCADISLFSSYQVAWGSTVLIGNGSHASVHGVGTVDLKFTSGKIVQLKNVQHVPSIDRNLVSGSRLTRDGFKLVFESNKVVVSKHRYFIGKGYECGGLFCFSFSDFCNKSVNHICGSVDDEANVWHSRLCHINFGLMSRLSSMCLIPKFSIVKGSKCHSCVQSKQPRKPHKAAKERNLAPLELLHSDLCKMNGVLTKGGKRYFMTLIDDATRFCYVYLLKTKDEALDYFKIYKAKVENQLDRKIKRLRSDRGGEFFSNEFDLFCEEHGIIHERTPPYSPESNKIAERKNRTLTDLVNAMLDTAGLPKAWWGETLLTSNHVLNRVPNRNKDKTPYEIWIGRKPSLSYLRTWGCLAKVNVSITNKRKLGPKTVDCVFLGYAHYSIAYRFLIVKSEVPDMHVGTIMESRDATFFESFFPMKDTHSSSSQPSEIILSSITPPEQTEHTHEHVTEEDDSEAPRRSKRQRTVKSFGDDFTVYLVDDTPKSISEAYASPDADYWKEVVRSEMDSIIANGTWEVTERPMGVNMWGASGCSRRSSGLMVLLKTSYGLLVHQMDVKTAFLNGELDEEIYMDQPDGFVVEGFAVNEADKCVYYRHGGGEGVILCLYVDDILIFGTNLEDLGVVDVILNIKLIRGENEITLLQSHYVEKILNCFGYIDSKPSPTPYNPSLLLRKNKRIARNQLEYSQIIGSPMYLASATRPDISFAVSKLSWFTSNPGDDHWRALERVMRYLKGTMELGLHYSGYPAVLEGYSDSKWISDVDEIKATSGYVFTLGGGAVSWRSCKQTILTRSTMEAELTALDTATVEAEWLHDLLMDLPIVEKPVLAILMNCDNQTVIVKVNSSKDNMKSSRHVKRRLKSVRKLRNSGVITLDYIQTA

SEQ ID NO: 20660 - protein, 1257 aa, Oryza sativa
  Clone ID: TF_OSC403909j.C1.p3.fg
MCGGEKRGNTRELARLASPRLASPGRAGQVARVHDVCVEWSATARRLQPRVVRAEQPVFPPPRHCDFTMASFTDALRPDKFTGVHFKRWQIRVTLWLTAMKCFWVSTGKPMGVLKADQQKEFDEATTLFVGCILSVLGDRLIEVYMHMTDAKELWDALNTKFGATDASNDLYIMEQFHDYKMVGNRSVVEQAHEIQAMDKELRLLKCVLPDKFVVGCIIAKLPPSWRGFYTALKHKRQEYSVEGLIASLDVEEKAREKDAASKGDGGQSTANVVHMAQNKSKGKYKAQQTTNFKKKKNNNNPNEDERTCFVCGQPGHLARKCPQRKGMKAPAGQTSKSANVTIGNTGDGSGYGNLPTVFSVNQSTNWWVDTGANVARGSTVLMGNGLHASVRGVGTVDLKFTSGKIVQLKNVQHVPSIDRNLVSGSRLTRDGFKLVFESNKVVVSKHGYFIGSKCHSCVQSKQPRKPHKAAEERNLAPLELLHSDLYEMNGVLTKGGKRYFMTLIDDATRLCYVYLLKTKDKALDYFKIYKAEDENQLDRKIKRLWSDRGGEFFSNEFDLFCEEYGIIHERTPPYSPESNGIAKRKNHTLTDLVNAMLDTAGLPKAWWGETLLTSNHVLNRVSNRNKDKTPYEIWIRRKPSLSYLRTWGCLAKVNIPITKKRKLGPKTVDCVFLGYVHHSIAYRFLIVKFEVPDIHIGTIMESRDATFFESFFPMKDTHSSSSQTSEIIPNSITPLEQTEHTHEHVTEEDDSEALRRSKRQRTAKSFGDDFTVYLVDDTPKSISEAYASPDADYWKEAVRSEMDSIIANGTWEMTERPYGCKPVGCKWVFKKKLRPDGTIEKYKARLVAKGYTQKEGEDFFYTYSPVSRLTTIRVLLSLAASHGLLVHQMDIKTAFLNGELDEEIYMDQPDGFVVEGFAVNETDKCVYYRHGGGEGVILCLYVDDILIFGTNLEVINEVKSFLSQKFDMKDLGLADVILNIKLIRGENGIALLQSHYVEKILNRFGYIDSNPSPTPYDSSLLLRKNKRIARNQLEYFQIIGSLMYLASATRPDISFAVSKLSRFTSNPGDDHWRALERVMRYLKGTIELGLHYSRYPAVLEGYSDFNWISDVDEIKATSGYAFTLGGGAVSWRSCKQTILTRSTMEAELTALDTATVEAEWLRDLLMDLPIVEKPVPAILMSYDNQTVIVKVNSSKDNMKSSRHVKRRLKSVRKLRNSGVITFDYIQTARKLADPFTKGLSRNVIDNVSKEMGLRPM

SEQ ID NO: 20661 - protein, 1233 aa, Oryza sativa
  Clone ID: TF_OSC405599j.C1.p3.fg
MVSTGKPEGVLTADQQKQFEEATTLFVGCILSVLGDRLVEVYMHMTDAKELWDALNTKFGATDASNDLYIMEQFHDYKMADNRSVVEQAHEIQTIAKELELLKCVLPDKFVAGCIIAKLPPSWRSFNTALKHKRQEYSVEELIASLDVEEKAREKDAASKGDDGQSSANVVHKAQNKSKGKYKAQQTTNFKKQKNNNNNPNQDERTCFVCGQPGHLARKCPQRKGMKAPAGQTSKSANVTIGNTGDGNGNLVSGSRLTRDGFKLVFESNKVVVSKHGYFIGKGYECGGLFRFSLSDFCNKSVNHICGSVDDEANVWHSRLCHINFGLMSRLSSMCLIPKFSIVKGSKCHSCVQSKQPRKPHKAAEERNLAHLELLHSDLCEMNGVLTKGGKRYFMTLIDDATRFCYVYLLKTKDEALDYFKIYKAEVENQLDRNIKRLRSDRGGEFFLYEFDLFCEEYGIIHERTPPYSPESNGIAERKNRTLTDLVNAMLDTAGLPKAWWGESRDVTFFESFFPMKDTHSNSSQPSEIIPSSFTPPEQIEYTHEHVTEEDDSEAPRRSKRQRTTKSFGDDFTVYLVDDTPKSISEAYASPDADYWKEAVRSEMDSIIANGTWEVTERPYGCKPVGCKWVFKKKLRPDSTIEKYKARLVAKGYTQKEGEDFFDTYSPVARLTTICVLLSLAASHGILVHQMDVKTAFLNGELDEEIYMDQPDGFVVEGQEAKVCKLLKSLYSLKQAPKQWHEKFDRTLTSACFAVNETDKCVYYRHGGGEGVILCLYVDDILIFRTNLEVINEVKSFLSQKFDMKDLGVADVILNIKLIRGKNGITLLQSHYVEKILNHFGYIDSKPSPTPYDPNLLLRKNKRIARNQLEYSQIIGSLMYLASATRPDISFAVSKLSRFTSNPGDDHWRALERVMRYLKGTMELGLHYSGYPAVLEGYSDSNWISDVDEIKATSGYVFTLGGSAVSWRSCKQTILTRSTMEAELTALDTATVEAEWLRDLLMDLPIVEKPVPAILMNCDNQTVIVKVNSSKDNMKSSRHVKRRLKSVRKLRNSGVITLDYIQTTRNLADPFTKGLSRNVIDNASKEMGLRPIEDAVLQSILERTHLCELDCWSQSMKILGESSRKLTKDLGDCGHCGRALAAHAAGLQQCASAALRLRRQPAKAADCCRLRRQCGSGLLRRPSRPRRARVARRRSLSRSDQIAARVGVATREGEEGRDRESCDGATLRFLNSN

SEQ ID NO: 20662 - protein, 1005 aa, Oryza sativa
  Clone ID: TF_OSC411284j.C1.p10.fg
MARLPLRSRAARLHRRSQPRVVPAEQSVFPPPRRYDFTMAVFADALRPDKFNGVHFKRWQIRVTLWLTAMKCFWKEFDEATTLFVGCILSVLGDHLVEVYMHMTDAKELWDALNTKFGATNASNDLYIMEQFHDYKMADNRSVVEQAHEIQTMAKELELLKCVLPDKFVVGCIIAKLPPSWRGFGTALKHKRQEYSVEGLIASLDVEEKAREKDAASKGDGGQSIANVVHQAQNKSKGKYKAQQTTNFKKKKNNSNPNQDERTCFVCGQPGHLARKCPQRKGMKAPGGQTSKFANVTIGNTGDGSGYGNLPTVFSVNQSTNWWVDTGANVHVCADISLLSSYQVARGSTVLMGNGSHASVHDVGTVDLKFTSGKIVQLKNMQHVPSIDKNLVSGSRLTRDGFKLVFESNKVVVSKHGYFIGKGYECGGLFRFSLSAFCNKSVNHICGSVDDEANVWHSRLCHINFGLMSRFSSMCLIPKFSIVKGSKCHSCVQSKQPRKPHKATEERNLAPLELLHSDLCEMNGVLTKGGKRYFMTLIDDATRFCYVYLLKTKDEALDYFKIYKAEVENQLDRKIKILRSDRGGEFFSNEFDLFCEEHGIIHERTPPYSPESNRIAERKNRTLTDLSRDATFFESFFPMKDTHSSSSQPSEIIPSSITPPEQTEHTHEHVTKEDDSEAPRSSKRQRTAKSFGYDFTVYLVDDTPKSISEAYASLDADYWKEAIRSEMDSIITNGTWEVTERPYGCKPVGCKWVFKKKLRLDGTIEKYKARLIAKGYTQKEGEDFFDTYSLVARLTTIRVLLSLAASHGLLVHQMDIKTAFLNGELDEEIYMDQRDGFVVEGQEGKVCKLLKSLYGLKQAHKKWHKKFDKTLTSASFAVNEADKCVYYRHGGGEGVILCLYVDDILIFGTNLEVINEVKSFLSQNFDMKDLGVADVILNIKLIRGENEITLLQSHYVEKILNRFGYIDILEGYSDSNWISDVDKIKATSGYVFTLGGGAVSWRSCK

SEQ ID NO: 20663 - protein, 988 aa, Oryza sativa
  Clone ID: TF_OSC411372j.C1.p4.fg
MKCFWVSTGKPMGILNADQQKKFDEATTLFVGCILSVLDDRLVEVYMHMTNAKELWDALNTKFGAIDASNDLYIMEQFHDYKMADNCSIVEQAHEIQTMAKELELLKCVLPDKFVAGCIIAKQPPSWRGFSTALKYKRQEYSVEGLIASLDVEEKAREKDVASKGDGGQSTANVVHKAQNKSKGKYKAQQTTNFKKKNNNNPNQDERTCFVCGQPGHLARKCPQRKGMKAPVGQTSKFANVTIGNTGDGSSRTGSTVLMGNGSHASVHGYECGGLFRFSLSDFYNKSVNHICGSVDDKAYVWHSRLCHINFGLMSRLSSMCLIPKLSIVKGSKCYSCVQSKQPRKPHKVAEERNLAPLELLHSDLCEMNGVLTKGGKRYFVMLIDDATRFCYVYLLKTKDEALDYFKIYKAEVENQLDRKIKRLRSDRGGEFFSNEFDLFCEEHGIIHERTPPYSPESNGIAERKNRTLTDLVNAMLDTAGLPKACIAYRFLIVKSEVPDMHVGTIMESRDANFFEISFFPMKDTHSSSSQTSEIIPNSITPPEQTKHTHEHVTEEDDSEAPRRSKRQRTAKSFGDDFTVYLMDDTPKSISEAYASPDADYWKEAVRSEMDSIIANGTWEVTERPYGCKPVGCKWVFKKKLRPDGTIEKYKARLVAKGYTQKEGEDFFDTYSPVARLTTIRVLLSLAASHGLLVHQMDVKTTFLNGELDEVIYIDQPDGFVVEGQEDKACKLLKSLYGLKQAPKQWHEKLDRTLTSVSFAVNEAVKCVYYRHGGGEGVILCFYVDDILIFGTNLEVINEDLGVADVILNIKLIRGENGITLLQSHYVEKILNHFGYIDSKPSPTPYDPSLLLRKNKRIARNQLEYSQIIGSLIYLASATRPDISFAVSKLSRFTSNPEDDHWRALERVMRYPKGTMEFGLHYSGYPAVLEGYNDSNWISDVDEIKATSGYVFTLRGGAVSSRSCKQTILTRSTMEAELTALDTATVEA

SEQ ID NO: 20664 - protein, 1300 aa, Oryza sativa
  Clone ID: TF_OSC419914j.C1.p1.fg
MAGFADALRPDKFTGMLFKRWQIRVTLWLTAMKCFWVSTSKPMGVLNADQQKEFDEATTLFVGCILSVLGDRLVEVYMHMTDTKELWDALNTEFGATDASNDMYIMEQFHDYKMADNRSVVEQAHEIQTMAKELELLKCVLLDKFVAGCIIAKLPPSWRGFGTALKHKRQEYSVEGLIASLDVEEKAREKDAASKGDGGQSNANVVHKAQNKSKGKYKAQQTTNFKKQKKNNNNPNQDERTCFVCGQPGHLARKCPQRKGMKAPARQTYKSANVTIDNIGDGSGYDNLPTVFSVNQSTNWWVDTRANVARGSTVLMGNGSHASVHGVGTVDLKFTSGKIVQLKNVQHVPSIDRNLVSGSRLTRDGFKLVFESNKVVISKHGYFIGKGYECGGLFRFSLSDFCNKSVNHICGSVDDEANVWHSRLCHINFGLMSRLSSMCLIPKFSIVKGSKCHSCVQSKQPRKPHKAAEERNLAPLELLHSDLCEMNGVLTKKTKDEALDYFKIYKAEVENQLDRKIKRLRSDHGGEFLSNEFDLFCEEHSIIHERTPPYSPETNGIAERKNRILTDLVNAMLDTAGLPKAWWGEALLTSNHVLNRVPNRNKDKTPYEIWIGRKPSLSYLRTWGCLVKVNVPITKKRKLGPKTVDCVFLGYAHHSITYRFLIVKSEVPDMHVGTIMKSRDATLFESFFPMKDTHSGSSQPSEIIPSSITPPEQTEHTHEHVSEEDVSEAPRRSKRQMTAKSFGDDFTVYLVDDTPKSISEAYASPDADYWKEAVRSEMDSIIANGTWEVTERPYGCKPVGCKWVFKKKLRPDGTIEKYKARLVAKGYTRKECEDFFNTYSPVARLTTIRVLLSLAASHGLLVHQMDVKTAFLNGELDEEIYMYQPDGFVVEGQEGKVCKLLKSLYGLKQAPKQWHEKFDKTLTSAGFVVNEADKCVYYRHGGGEGVILCLYVDDILIFGTNLEVINEVKSFLSQNFDMKDLGVADVILNIKLIRGENGITLLQSHYVEKILNRFGYIDSKPSPTPYDPSLLLRKNKRIARNQLEYSQIIGSLMYLASATRPDISFAVSKLSRFTSNPGDDHWRALERVMRYLKGTVELGLHYTGYPAVLEGYSDSNWISDVDEIKATSGYVFTLGGGAVSWRSCKQTILTRSTMEAELTALDTATVEAEWLRDLLMDLLVVEKPVPAILMNCDNQTTCEKTIEVCQEIKKLRSYNVGLHPNSEKPGRSLHEGTITKCDRQCIEGDGFETHFTDVRSAAYFNGHQHNIEAPHQNRKKEYRMRTYITYGIHIMLLDLKLVYC

SEQ ID NO: 20665 - protein, 666 aa, Oryza sativa
  Clone ID: TF_OSC900064j.C1.p13.gm
MEDAKALRRLLNDTDLDLVSDRERQAYYMLSDREYAHMREYAPELLKKIGIRLIYTGKINNPRRGVHLRSGEQVSGTSAFDVLHREKAAIRFLGSASRDCSLFVRDGSPSSPLACCAPSSTPATTSSSCRATDLSATSWLGDRLVEVYMHMTDAKELWDALNTKFGATDASNDLYIMQQFHDYKMADNRSVVEQAHEIQTMAKELELLKCVLPDKFVAGCIIAKLPPSWRGFGTALKHKRQEYSVEGLIASLDVEEKAREKDTASKGDGGQCSANVVHKAKNKSKGKYKAQQTTNFKKQKKNNNNPNQHERTCFVCGQPGHLARKCPQRKGMKAPAGQTSKSTNVTIGNTGDGSGYGNFPTVARGSTVLMGNGSHASVHGVGTVDLMFTSGKIVQLKNVQHVPSIDRNLVSGSYYWKEAVRSEMDSIIANGTWEVTERPYGCKPVGCKWVFKKKLRLDASHGLLVHQMDVKTAFLNGELDEEIYMDQPDGFVVEGFAVNEANKCVYYRHGGGEGVIMCLYVDDILIFGTNLEMINESHYVEKILNRFGYIDSKPSPTHYDPSLLLRKNKRIARNLLEYSQIIGSLMYLASATRPDISFAVSKLSRRAPAIRRAGLWNLCLRRPTLGEGGNKVFGKRFARLLPVCPRRLAFLSARVLRAFVDARNRE

SEQ ID NO: 20666 - protein, 880 aa, Oryza sativa
  Clone ID: TF_OSC900186j.C1.p17.fg
MADQGHSVAGSDEMLLGVYMTDAKELWDALNTKFGATDASNDLYIMEQFHDYRMADNRSVVEQAHEIQTMAKELELLKCVVPDKFVAGCIIAKLPPSWRSFGTALKHKRQEYSVEGLIASLDVEKKAREKDAASKGDGGQSSANVVHKAHNKSKGKYKAQQTTNFKKQKKKKNNPNQDERTCFVCGQPGHLARKCPQRKGMKAPAGQTSKSANVTIGNTRDGSGYVARGSTVLMGNGSHASVHGVGTVDLKFTSGKIVQLKNVQHVPTIDMNLVSGSRLTRDGFKLVFESNKVVVSKHGYFIGKGYECGGLFCFSLSDFCNKSVNHICGSVDRGGKNKTEPKNRTEKTETETEKTEIETEKTETEKFGSDHGGELFSNKFDLFCEEHGIIHERTPPYSPESNGIAERKNRTLTDLVNAMLDTAGLPKAWWGKALLTSNHVLNRVPNRNKDKTPYEIWIGRKPSLSYLRTWGCLAKVNVPITKKRKLGPKTVDCVFLGYAHHSIAYRFLIVKSEVPDMHVGTIMESRDATFFESFFPMKDTHSSSSQPSEIIPNSITEHTHEHVTEEDVSEAPRRSKRQRTAKSFGDDFTVYLVDDTPKSISEAYASPDADYWKEAVRSEMDSIIANGTWEWVFKKKLRPNGTIEKYKARLVAKGYTQKEGEDFFDTYSPVARLTTICVLLSLAASHGLLVHQMDIKTTFLNGELDEIYMDQPDGFVVEGFAVNEVDKCVYYRHGGGEGVILCLYVDDILIFGTNLEVINKVKSFLSQNFDMKDLGVADVILNIKLIRGENGITLLQSHYVEKILNRFGYIDSKPSPTPYDPSLLLRKNKRIARNQLEYSQIIGSLMYLASATRLDISFAVSKLTRFTSNPGDDHCVRLSE

SEQ ID NO: 20667 - protein, 1442 aa, Oryza sativa
  Clone ID: TF_OSC900199j.C1.p19.fg
MCGGEKRGNTRELARLASPRLASPGRAGQVARVHDVCVEWSATARRLQPRVVRAEQPVFPPPRHCDFTMASFTDALRPDKFTGVHFKRWQIRVTLWLTAMKCFWVSTGKPMGVLKADQQKEFDEATTLFVGCILSVLGDRLIEVYMHMTDAKELWDALNTKFGATDASNDLYIMEQFHDYKMVGNRSVVEQAHEIQAMDKELRLLKCVLPDKFVVGCIIAKLPPSWRGFYTALKHKRQEYSVEGLIASLDVEEKAREKDAASKGDGGQSTANVVHMAQNKSKGKYKAQQTTNFKKKKNNNNPNEDERTCFVCGQPGHLARKCPQRKGMKAPAGQTSKSANVTIGNTGDGSGYGNLPTVFSVNQSTNWWVDTGANVARGSTVLMGNGLHASVRGVGTVDLKFTSGKIVQLKNVQHVPSIDRNLVSGSRLTRDGFKLVFESNKVVVSKHGYFIGSKCHSCVQSKQPRKPHKAAEERNLAPLELLHSDLYEMNGVLTKGGKRYFMTLIDDATRLCYVYLLKTKDKALDYFKIYKAEDENQLDRKIKRLWSDRGGEFFSNEFDLFCEEYGIIHERTPPYSPESNGIAKRKNHTLTDLVNAMLDTAGLPKAWWGETLLTSNHVLNRVSNRNKDKTPYEIWIRRKPSLSYLRTWGCLAKVNIPITKKRKLGPKTVDCVFLGYVHHSIAYRFLIVKFEVPDIHIGTIMESRDATFFESFFPMKDTHSSSSQTSEIIPNSITPLEQTEHTHEHVTEEDDSEALRRSKRQRTAKSFGDDFTVYLVDDTPKSISEAYASPDADYWKEAVRSEMDSIIANGTWEMTERPYGCKPVGCKWVFKKKLRPDGTIEKYKARLVAKGYTQKEGEDFFYTYSPVSRLTTIRVLLSLAASHGLLVHQMDIKTAFLNGELDEEIYMDQPDGFVVEGFAVNETDKCVYYRHGGGEGVILCLYVDDILIFGTNLEVINEVKSFLSQKFDMKDLGLADVILNIKLIRGENGIALLQSHYVEKILNRFGYIDSNPSPTPYDSSLLLRKNKRIARNQLEYFQIIGSLMYLASATRPDISFAVSKLSRFTSNPGDDHWRALERVMRYLKGTIELGLHYSRYPAVLEGYSDFNWISDVDEIKATSGYAFTLGGGAVSWRSCKQTILTRSTMEAELTALDTATVEAEWLRDLLMDLPIVEKPVPAILMSYDNQTVIVKVNSSKDNMKSSRHVKRRLKSVRKLRNSGVITFDYIQTARKLADPFTKGLSRNVIDNVSKEMGLRPMKIRICFVLETLRKIRVCLLLYTAPSLIDYSIPLAGVHRRSGEQVSGTSAFDVLHREKAAISTSMHQFAGQAQPEEEQKCVHCGGGVAGAQVEAALNRKNVEALPEDETVEGGPDDVWVPDHETCVFVPADKAAVFGTENHDHCGAAAVAGGSPSVLDQAVFVHEEDMEDVERPAVDMAAANHKPK

SEQ ID NO: 20668 - protein, 1223 aa, Oryza sativa
  Clone ID: TF_OSC900250j.C1.p4.fg
MAKELKLLKCVLPDKFVAGCIIAKLPPSWRSFGTALKYKRQEYSVEGLIASLDVEEKAREKDAAYKGDGGQSSANVVHKAQNKSKGKYKAQQTTNFKKQKKNNNNPNQDKRTCFVCGQPGHLARKCPQRKGMKAPAGQTSKSANVTIGNTGNGSGYGNLPTVFSVNQSTNWWVDTGANVHVCADISLFSSYQVARGSTVLMGNGSHASVHGVGTVDLKFTSGKIVQLKNVQHVPSIDRNLVSGSRLTRDGFKLVFESNKVFVSKHGYFIGKGYECGGLFRFSLSDFCNKSVNHICGSVDDEANVWHSRLCHIIFGLMSRLSSMCLIPKFSIVKGSKCHSCVQSKQPRKPHKAAEERNLAPLELLHSDLCEMNGVLMKGGKRYFMTLIDDATRFCYVYLLKTKDEALDYFKIYKAEVENQLDRKIKRLRSDRGGEFFSNEFDLFCEEHGIIHERTPPYSPESNGIAERKNRTLTDLVNAMLDTAGLLKAWWGEALLTSNHVLNRVLNRNKDKTPYEIWIGRKPSLSYLRTWGCLAKVNVPITKKRKLGPKTVDCVFLGYAHHSIAYRFLLVKSEVPDMHVGTIMKSRDATFFESFFPMKDTHSGSSQPSEIIPSSITPPEQIEHTHEHVSEEDVSEAPRRSKRQRTAKSFGDDFTVYLVDDTPKSISEAYASPDADYWKEAVRSEMDSIIANGTWEVTERPYGCKPVGCKWVFKKKLRPDGTIEKYKARLVAKGYTQKEGEDFFDTYSPVARLTTIRVLLSLAASHGLLVHQMNVKTAFLNGELDEEIYMDQPNGFVVVGQGKVCKLLKSLYGLKQAPKQWYKKFNKTLTSAGFAVNEADKCVYYRHGGGEGVILCLYVDDILILGQTLRGENGITLLQSHYVEKILNRFGYIDSKPSPTPYDPSLLLRKNKIIARNQLEYSQIIGSLMYLASATRPDISFVVSKLSRFTSNPGDDHWHALERVMHYLKGTMELGLHYTGYRAVLEGYSDSNWISDVDEIKATSGYVFTLGGGAVSWRSCKQTILTRSTMEAKLTALDTATVEAEWLRDLLMDLPIVKKPVPAILMNCDNQTVIVKVNSSKDNMKSSRHVKRRLKSVRKLRNSGVITLDYIQTARNLADPFTKGLSRNVIDNASKEMGLRPIEDAVLQSSLERTHLCKLDYWSQSMEILGESSRKLTKDLGMPAKSFDRAAGLSATSGETGGRGNRYPEEIEHEKKGVGKIVHT

SEQ ID NO: 20669 - protein, 893 aa, Oryza sativa
  Clone ID: TF_OSC900297j.C1.p4.gm
MGRTAQTSTLSIVLPAPSSPTMLPHYSIPLTGVHRRSGEQVSGTIAFDVLHREKAAISVLGDRMVEVYMHMTDAKELWDALNTKFGATDASNDLYIMEQFHDYKMADNRSVVEQAHEIQTMAKELELLKCVLPDKFMAGANVVHKAQNKSKGKYKAQQTTNFKKQKKNNINPNQDERTCFVCGQPGHLARKCPQRKGMKAPTRQTSKSANVTIGNTRDGSRYGNNTGDGSKYGNLPTVARGSTVLMGNGSHASIHGVDMVDLKFTSGKIVQLKNMQHVPSIDMNLDTHSSSSQPSKVIPSSITPPEQTEHTHEHVTEEDVSEAPRRSKRQRTAKSFGDDFTMYLVDDTPKSISEAYASPDVDYWKEAVHSEMDSIIANGTWEVTERPCGCKPVGCKWVFKKKLRPDVNEADKCVYYRHGGGEGVILCLYVDDILIFGTNLEVINESHYVEKILNRFGYIDSKPSPTPYDPSLLLRKNKRIAKNQLEYSQIIGSLMYLASATRPDISFAMSKLSRFTSNPGDDHWRALERVMRYLKGTMKLGLHYNGYPAVLEGYSDSNWISDVDEIKATSGYVFTLGGGAVSWRFCKQTILTRSTMEAELTALDIATVEAEWLRDLLMDLPIVEKPVPAILMNYDNQTGRRCACTMYASNDYSIPLAGVHRRLGEQVSGISAFDILHQEKAAIRFLGSASRDCSLFVRDGSPSSPLACFAPSSTLATASSSCRATGLSATSGHKQKEGSSFPVPPMPIIWKRTPVQEIMCAYRVAAPVSGEDEAAPASSERTGRRQGGHGISFPVVNELFRHILAPPRPSSPAAAAAAPAPRTPLLLTMREEDGKSEGSGMILILEIFSGTQPITQIVVLMSMAARNSNEPYDLVAKKSPLVVLLLTVVGVRE

SEQ ID NO: 20670 - protein, 383 aa, Oryza sativa
  Clone ID: TF_OSC900312j.C1.p12.fg
MADNRSVVEHAHEIQTMAKELELLKCVLPDKFVAECIIAKLPPSWRGFGTALKHKRQEYSVEGLIASLDVEEKAREKDAASKGDGGQSTANVVHKAQNKSKGKYKAQQTTNFKKKKNNNNPNQDERTCFVCGQPGHLARKCPQRKGMKAPAGQTSKSANVTIGNTGDGSGYGNLSTVFSVNQSTNWWVDTGGNVARGSTVLMGNGSYASIHGVGTVGRAEPTNCYSQKCKGNFTLRKCSLRLAAEDEIHALLAIMELGAFLHSLLLRPAARDEINAFMSAWSSARSSAYSAPVWQSPLLIPSSSTWVPSSLIDVLASILTELIVGPCCPIITLDQAEVTEAFRAFDCKGNGFISAIELTRSIADTATPTASSSFYLTVGPITH

SEQ ID NO: 20671 - protein, 1082 aa, Oryza sativa
  Clone ID: TF_OSC900381j.C1.p18.fg
MAGFADALRPDKFTGVHFKRCRSNSRKPLFVGCILSVLDDRLVEVYMHMTDAKELWDALNTKFGATDASNDLYIMEQFHDYKMADNRSVVEQAHEIQTMAKELELLKCVLPDKFVAGCIIAKLPPSWRSFASLDVEEKAREKDAASKGDGGQSSANVVHKAQNKSKGKYKAQQTTNFKKQKKNNNPNQDERTCFVCGQPGHLARKCPQCKGMKAPAGQTSKSANVTIGNTGDGSGYGNLPTVFSVNQSTNWWVDTGANVARGSTVLMGNGSHASVHGVGTVDLKFTSGKIVQLKNVQHVPSIDRNLVSGSRLTRDKFKLVFESNKVVVSKHGYFNGKGYECGGLFRFSLSDFCNKSVNHICGSVDDEANVWHSRLCHINFGLMSRLSSMCLIPKFSIVKGSKCHRCVQSKQPRKPHKAAEERNLAPIELLHSDLCEMNGVLTKGEKRYFMTLIDDATRFCYVYLLKTKDEALDYFKIYKAEVENQLDRKIKRLRSDRGGEFFSNEFDLFCEEHGIIHERTPPYSPESNGIAEKKNRTLTDLVNAMLDTAGLPKAWWREALLTSNHVLNRVPNRNKDKTPYEIWIGRKPSLSYLRTWGCLAKVNVLITKKCKLGPKIVDCVFLGYAHHSIAYRFLIVKSEVPDMHVGTIMESRDATFFESFFPMKDTHSGSRQPSEIIPSSITPPEQTEHTHEHVSEEDVSEAPRRSKRQRTAKSFGDDFTVYLVDDTPKSISEAYASPDADYSKEAVHSEMDSIIANGTWEVTERPYRCKPVGCKWVFKKKLRLDGTIEKYKARLVAKGYTQKEGEDFFDTYSPVARLTTIRVLLSLAASHGLLVHQMDFSFIKWTLRQLFLMESWMRRSIWINLMGFAVNEADKCVYYRHGGGEGVILCLYVDDILIFGTNLEVINEVKSFLSQNFDMKDLGVADVILNIKLIRELGRNVLVHVRPRRSAGSSPQNTLFASARPCNDVMLKKLGGISPVRLFCDKANMRSAGRCDKPSGMELPRRFWSNSSCTIFVRFASDGGKWPESELWLSWSTVRFGNASSHRGMPPTIEVVVFEVRDVEGGAIVERVRYLAGERVVA

SEQ ID NO: 20672 - protein, 1300 aa, Oryza sativa
  unsure (1)..(1300): unsure at all Xaa locations
  Clone ID: TF_OSC900389j.C1.p9.np
MAGFADALRPDKFTGVHFKRWQIRVTLWLTAMKCFWVSTGKPEGILTVDQQKQFEEATTLFVGCILSVLGDRLVEVYMHMTDAKELWDALNTKFGATNASNDLYIMEQFHDYKMADNRSVVEEAHEIQTIAKELELLKCVLPDKFVAGCIIAKLPPSWRSFSTALKHKRQEYSVEGLIASLDVEEKAREKDAASKGDGGQSSANVVHKAQNKSKGKYKAQQTTNFKKXKKNNINPNQDERTCFVCGQPGHLARKCPQRNGMKAPVGQTSKSANVTIGNTGDGSGYGNLPTVFSVNQSTNWWVDTGANVHVCVDISLFSSYQVARGSTVIMGNGSHASVRGVGMVDMKFTSGKIVQLKNVQHVPSIDRNLVSGSRLTRDGFKLGFESNKVVVSKHGYFIDKGYECGGLFRFSLSDFCNMSVNHICGSVDDEANVWHSRLCHINFGLMFRLSSMCLIPKFSIVKGSKCHSCVQSKQPRKPHKAVEERNLAPLELLHSDLCEMNGVLTKGGKRYFMALIDDATRFCYVYLLKTKDEALDYFKIYKAEVENQLDRKIKRLRSNRGGEFFSNEFDLFCEEHGIIHERTPSYSPESNGIAERKNRTLTDLVNAMLDTAGQPKAWWEALLTSNHVLNRVPNRNKDKTPYEIWIGRKPSLSYLRTWGCLAKVNVPITKKHKLGPKTVDCVFLGYAHHSIAYRFLIVKSEVPDMHVGTIMESRDATFFESFFPMKDTHSSSSXPSEVIPSSITPPEQTEHTHEHVTEEDVSEAPRRSKRQRTAKSFGDDFTVYLVNDTPKSISEAYASPDADXWKEAVRSEMDSIIANGTWEVTERPYGCKPVGCKWVFKKKLRPDGTIEKYKARLVAKGYTQKEGEDFFDTYSPVARLTTIRVLLSLAASHGLLVHQMDVKTAFNGELDEEIYMDQPDGFVVEGQEGKVCKLLKSLYGLKQAPKQWHEKFDKTLTSAGFAVNEADKCVYYRHGGGEGVILCLYVDDILIFGTNLEVINEVKSFLSQNFDMKDLGVADVILNIKLIRGENGITLLQSYYVEKILNRFGYIDSKPSPTPYDPSLLLCKNKRIAKNQLEYSQIIGSLMYLASATRPDISFAVSKLSRFTSNPGDDHWRALERVMRYLKGIMELGLHYTGYPAVLEGYSDSNXISDVDEIKATSGYVFTLGGGAVSCRSCKQTILMRSTMEAELTALDTTTVEAEWLRDLLMDLPIVEKPVPAILMNCDNQTVIVKVNSSKDNMKSSRHVKRRLKSVRKLRNSGVITLNYIQTARNLADPFTKGLSRNVIDNALKEMGLRPM

SEQ ID NO: 20673 - protein, 654 aa, Oryza sativa
  Clone ID: TF_OSC900404j.C1.p25.gm
MGRTAQTSTLSIVLPAPSSPTMLPHYSIPLTGVHRRSGEQVSGTIAFDVLHREKAAISVLGDRMVEVYMHMTDAKELWDALNTKFGATDASNDLYIMEQFHDYKMADNRSVVEQAHEIQTMAKELELLKCVLPDKFMAGANVVHKAQNKSKGKYKAQQTTNFKKQKKNNINPNQDERTCFVCGQPGHLARKCPQRKGMKAPTRQTSKSANVTIGNTRDGSRYGNNTGDGSKYGNLPTVARGSTVLMGNGSHASIHGVDMVDLKFTSGKIVQLKNMQHVPSIDMNLDTHSSSSQPSKVIPSSITPPEQTEHTHEHVTEEDVSEAPRRSKRQRTAKSFGDDFTMYLVDDTPKSISEAYASPDVDYWKEAVHSEMDSIIANGTWEVTERPCGCKPVGCKWVFKKKLRPDVNEADKCVYYRHGGGEGVILCLYVDDILIFGTNLEVINESHYVEKILNRFGYIDSKPSPTPYDPSLLLRKNKRIAKNQLEYSQIIGSLMYLASATRPDISFAMSKLSRFTSNPGDDHWRALERVMRYLKGTMKLGLHYNGYPAVLEGYSDSNWISDVDEIKATSGYVFTLGGGAVSWRFCKQTILTRSTMEAELTALDIATVEAEWLRDLLMDLPIVEKPVPAILMNYDNQTEIEKLRSYNVGLHPNS

SEQ ID NO: 20674 - protein, 214 aa, Oryza sativa
  Clone ID: TF_OSC16941j.C1.p1.fg
MANQHARSNGEKHQGNTNPRQDYSFSLTPVPGQRNQNEKRKCRVRKDICCFSCQEMGHFADKCPKPRNMAASTSVHATPRNQKLAPQRIVIHASRSSPIARVATAPTPTSALPQGVNAPFQSHPPADETEASICVVPLDVPIQQLINQVQDEEPECKKVIVCYNCSEEGHYSRDCPQPRQNRPPHFRQFTGSKHANRQVVTGANAVPVKPSASQ

SEQ ID NO: 20675 - protein, 77 aa, Oryza sativa
  unsure (1)..(77): unsure at all Xaa locations
  Clone ID: TF_OSC423269j.C1.p2.gp
MASEYGGGGGGGSRACYKCGEEGHMARDCSQGGGGGGGYGGGGGGYRGGGGGGGGGGCYNCGETGHIARECPSKTYX

SEQ ID NO: 20676 - protein, 1567 aa, Oryza sativa
  Clone ID: TF_OSC900284j.C1.p10.np
MASRPRRAARAPARFGFEEGRVEPEENHESANEQSHHSNRSHRTASRNAEVEQPRRSNRSHHTAPRNAEMEQSHRTASHNSGEERLPSPPHVENNMQHLMAVQTQILQGLAAAVAGFQHNAHGNGHPHMSNNRSKLTDFLRSRPPEFSQTVEPVEADDWLKDVDRKLNLVQCTPVEKTLYASHQLRGPAADWWENYCNAHPEPTNIAWDEFATAFRAAHVPESTIDMKKEEFNRLKQGNSSVNENLSMFNKLARYAPEEVDTDKKKIRKFLKGIAVGMRLQLLAHDFPTFQHMINKALLLEDARKEATEEYKKRKSNHGNSSRGAPRPRYGQPMQYHQSVTQANRQPGYAPRPQMNRPAPQPQQRAPSGNTAPNSVTSFKSPQGPSAVQCFRCNQIGHYARQCPQNPTNTNSGHANGSTARAPTPAAAQSRPSSQASGQGSRASNNFGRGRVNHIQAETAQDAPDVVMGMFSVNSVPAIVLFDSGASHSFISQAFVKRNGWKTQNLRVPMIVHSPGRNIRATQICPEVNLRIEEVDFLAKPIVLDSQSLDIILGMDWLAKHKGQIDCAEKSITLQGPGGKQVRFTSNTPTASRSILTCLQVTTLESVPIVCEYPDVFPEELTSMPLDREIEFAIELAPGTAPIAKRPYRMAANELAEVKRQIEELEGKGYVRPSSSPWGAPVLLVKKKDGSERMVIDYRALNEVTIKNKYPLPRIDDLFDQLNGARVFSKIDLRSGYHQLKIRSEDIPKTAFSTRYGLYEFTVMSFGLTNAPAFFMNLMNKIFMEYLDQFVVVFIDDILIYSKNEEHAEHLRLIMEKLRDHQLFAKFSKCEFWLDRVAFLGHVISSNGVEVDPSKVEAVLAWNPPKNVLEIRSFLGLAGYYRRFIEGFSKLARPMTELLKKEKKFQWSAACEDSFQEMKKRLTTAPVLTLPDIRKDFEIFCDASRQGLGCVLMQERKVVAYASRQLRPHEVNYPTHDLELAAVVHALKIWRHYLIGNRCEVYTDHKSLKYIFTQTELNMRQRRWLELIKDYDLGIHYHPGKANVVADALSRKAYCNIAQIRPDQDRLCRELEKLRLTVVQSGVPASLTVQPTLESQIREAQKDDEGIKELIKRIQEKKDTNFSIDNQGTVWCGPRICVPAKKELRDLILKEAHQSAYSIHPGSTKMYQDIKAYFWWAGMKRDVAEYVALCDICQRVKAEHQRPAGLLQPLPIPEWKWEEIGMDFITGLPRTPSRYDSIWVIVDRLTKSAHFVPVKTTFDGKKLAELYMTHVVCRFGCPKKIVSDRGTQFTSRFWKQLHEALGTDLNFSTAYHPQTDGQTERVNQILEDMLRACALDFEGTWDRCLPYAEFSYNNSYQASIQMSPNEAMFGRKCRTPLCWNEVGEALVFGPDILKSAEEQVKLIRERLKTAQNRQKNYADNRRRDLEFEKGDHVYLRVSPLHGMRRFGMSGKLAPRYIGPYLITARHGEVAYQLELPEGLADVHNVFHVSQLKKCLRVPKEQVPLGNIELEKNLTYKERPIKVLEEAERQTRRKTIKFYKVQWSNHSEDEATWEREDLLRAEFPELLP

SEQ ID NO: 20677 - protein, 1423 aa, Oryza sativa
  Clone ID: TF_OSC14746j.C1.p4.fg
MKNGIDEIFRDTKKDAIVMSSTKSELQNERIFVPIVLDTNILQASENNQGNEKEKKYEVEKDLSIAPCMLEECSIDQAPIISKEEKRDTDNGVITTQGMGGAQNQRYQQGNNNRVPDDPYAKVKFKIPSFSGYYDAEKYSDWEMIVEQKFSAHLVPDQHRVRQASSEFKDFAIMWWARLADDGILPTTWKELKVAMRDIFVPPSYLRDLSKKLMRLEQRDKSVQDYYGELQKGLMRCSIVKGTEDSICRFYMGLRRKIQDIVDNKEFNTVNQLFQFAMLAVKELQGRDQQVKNKASTYIPRAKPSLGLPKPISFWTTPLASKRPVASGVSAAPKPPSPRPAVSGKGSSQVSTKSASSIASTGRTSRIRCHHCHGFGHVQKICPSQRAYVATVDCYICTSDVEDVEVEEKKDGEQKDLSIAPCMLEECLIDQAPIISEDEKKGNDNGATTNQGISLLDEVNLVSARLITRGDVVLRLRGSVACSFRSQIELCRDSAQIDCLSIPIGRSGPNILIIRGKRSEPPLSPEEEVKFEASDCLFRGALISVLADNIVDVYMQMPSRKDMWDALEAKFGVSDAGSELYAMEQFYDYKMVDDRSIVEQAHEIQMLAKELENNNCELPDKFVADGIIAKLLPSWSDFATSLKHKRQEFSVSDLIGSLGVEEKARAKDNRGKKVEGGSSANMLQKKNPHASHNNKKVKADVKPKATTNFKKKGKGKAKGDCFVCGKSGHWAKDCPERKDRKSANMVISEGRGTSGYGRERFLLVDGKWVTCGCSRCWMKHCVTFKTYKAEVENQLERKIKRLRSDRGGEYFSNEFTSFCEEFGIIHEMTPPYSPQSNGVAERKNRTLTEMVNAMLDTAGLSKEWWGEAVLTACHVLNKIPMKHKEVTPFEEWERKKLNLSYLRTWGCLAKVNVPIAKKHKLGPNTVDCVFLGYAIHSVGYRFLIVNYGVPDMRVGTIIESRDATFFDNEFAMKNTPSTSSQETVIPHKHFAPIEHNDQTPEGNPEEDNIVDTRKSKRQRVAKSFGDDNIVYLVDGTPRTIEEAYSSPDADHWKEAVRSEMDSIMSNGTWEVVERPYGCKPVGCKWVFKKKLRPDGTIEKYKARLVAKGYTQKEGEDFFDTYSPVARLTTIRVLLALAASHGLLVHQMDVKTAFLNGELEEEIYMDQPDGYVLEGQERMVCKLLKSLYGLKQAPKQWHEKFDTTLTSVGFVVNEVDKCVYYRYGGGEGVILCLYVDDILIFGTSLNVIEEVKYFLSKSFEMNDLGEVDVIFNIKLLRGDEGGITLVQSHQVDKILSRFGYSVYKPAPTPYDPSVLLRKNRRIARDQLRYSQIIGSLMYLASATRPDISFVVSKLSRFVSNPGDDHWHALERVMCYQKGTMGYGIHYTGYSKVLEGYSDSNLISDADEIKATSGYVFTLGGGAVS

SEQ ID NO: 20678 - protein, 776 aa, Oryza sativa
  unsure (1)..(776): unsure at all Xaa locations
  Clone ID: TF_OSC31101j.C1.p1.np
GAALYCSRDWGKWREFRRGRRSDVGDLKLSQLRLHCALAPPPPRISPHPAVPARIKDGENHPRDSLSRFPLFSLSLSLGFVRIAPAILAGAINGGRDLRAFPPSPAALSPSRRYIIVPRAPLFRFRRSPLALAFGFVLATFSSLSAVAADLRLAAVVAPVFLPTRRHLHRLRRVVADPVRPFASPADRRSSVSFVVPNRAAAFLRSGRRFRRPRCPGVSRGPPSRFPLLSALSGAAPPRRWSPAVTIGARARVSRRSSRRGRLRPPRGCQVGPAVSRPRPRVRLTRGTHGAGRRQPRAPGPPWTERLTRGPLPWTRTNEGYTSCGPADNEKGNKVRSQDIGTSSSRVNEAPDNSCVTLVQHLINQNRLLIEILQQHQTPILNLSQIQPQVQLEAVQSLTPQVSMPPASQKTHGGVPHVDSKEASIICFMCDEQGHYARNCPXQKRKTPMRTEDEVRKMIITSTEWPPPGMTKRQRRNTFRGAPQLTEHLLANGGRVSDSEDSDQVSSDDEDEMERKACSRCGEIGHVASSCATTCVSDDEDEMERKACSRCGEIGHVASSCATTCVHCEEDHPPDRCPTSRITCFFCEGTDHVPKDCQFSFLLTKKMANQPASSNGEKHQGNTNPRQDYSFSLTPVPGQRNQNEKRKCRVREDICCFNCQGMGHFADKCQKPRNIAASTSVHATPCNQKLAPQRIVIHASRSSPIARVATAPTPASASPQGVNAQFQPQPSVDKTGKDFQPPIPTPSQNDRPQTDSSAKKTLICYNCKEPGHYSRD

SEQ ID NO: 20679 - protein, 469 aa, Oryza sativa
  unsure (1)..(469): unsure at all Xaa locations
  Clone ID: TF_OSC400445j.C1.p12.gp
LQKMVQYGDDTYDEERAVEKLFRCVPEKYRQIARSIESLLDLSTMSIEEALGRLKVVDGDEPQPLSGPITIGGKLNLTREQWEASQGDGRKGESSSPTGGRKPRKARGGVQLRWARRRAEGGARRGAQGVATGNHKPARDNACRNCGKLGHWAKDCRQPRRGQAHVARVEEEEPALLLAHASIELPPAAPAAAAFLHLDEPKVLVSLCNGSSNDKADGWYLDTGATHHMTGXREFFTEFDSSVQGSVKFGDASGVEIKGVGSVTFTAKSGEHRLLTGVYYIPALRNSIISVGQLDENGSRVLVEDGLMRIWDRRRRLLAKVTRGTNQLYILSAQVAQPVCLAARRDDEAWQWHERFGHLHFEALKQLSAKEMVRGMPCLDHVEQLCDVCVVTKQRRLPFPQQTSFRAKERLELVHGDLCGPVTAATPGGRRYFLLLVDDLSRYMWVMVLGSKGEAADAIRHAQATAEAE

SEQ ID NO: 20680 - protein, 2588 aa, Oryza sativa
  Clone ID: TF_OSC400445j.C1.p19.fg
MAAPPNSPIGWWREVRARLWLHTVEVEVNFLAHPFVVYSHFPLFESGSPPSFSLKAALHLISKKKDQGPLLLGVSCSSDLTTSQIATKKLYFAKMKDSAYDADDVMDEFDYLILKANAQQKSKLSSLASSSLAIGKRLVGQDKFRSKLRRVLNSLIRVKECADMLIKVIGAENSNSYMPPQPLQWRVTSSISPGQIIIGRQNEQDDLVHRLLREADGPEPSRGLTISPTPSIITIVGSGGIGKTALAQLIYNDRRIVSGFDLRTWIYVSNIFNKVKITKEILKSIDRNSDITNFSFNMLQEDLKNKLTAKKFLLVLDDVWYDEKIGELTNADRWRELFAPLCYGAKGSKILVTARTNIVSRILGCPAPFHLEGLKGEDSWNLFRICAFGAEDPGNYPELESIGECIVQKLNGSALVIKVVGAHLNANLNVEEWTRVMKSSSSNKEDIMQILRLSYECLPGHLQQCFTFCSLFPKGYSLEPDLLVNMWIAHKFVHGHIGTYESMRETGRSYFNELLSRSFFQELQYGHTIRYVMHDLMNDLASHISRAAPRRCAMSDARSRRLVASSTWRQQDAELAAAEERRRATAQTAAAAAARVAKLAAVELAAARAEAEAEAAEDAARAAEVEVETLRSSINGSIAGDITADRELEELARGRAWERAERWAAAHLHGGGGGPRDRAPADGNPDGRWRAGGSPEPARGPRRQRGSLSPDWRHGHHGVQTVVRDFGPGGGWPTLTKTNYIEWAAVMRSGTGDVDYDEDRRALDALIAAVPPEMQFSLSQKRTAKEAWDAIAAARIGSDRARKSTLQALRKEWENLPFKPGEDVDDFALRLNTLLQKMVQYGDDTYDEERAVEKLFRCVPEKYRQIARSIESLLDLSTMSIEEALGRLKVVDGDEPQPLSGPITIGGKLNLTREQWEASQGDGRKGESSSPTGGRKPRKARGGVQLRWARRRAEGGARRGAQGVATGNHKPARDNACRNCGKLGHWAKDCRQPRRGQAHVARVEEEEPALLLAHASIELPPAAPAAAAFLHLDEPKVLVSLCNGSSNDKADGCVQGSVKFGDASGVEIKGVGSVTFTAKSGEHRLLTGVYYIPALRNSIISVGQLDENGSRVLVEDGLMRIWDRRRRLLAKVTRGTNQLYILSAQVAQPVCLAARRDDEAWQWHERFGHLHFEALKQLSAKEMVRGMPCLDHVEQLCDVCVVTKQRRLPFPQQTSFRAKERLELVHGDLCGPVTAATPGGRRYFLLLVDDLSRYMWVMVLGSKGEAADAIRHAQATAEAECDRKLRRGMPAIFWGEAVVTAAYILNRSPTKALDGRTPYEAWHGRKPAVSHLWVFGCLAFAKELGHIGKLDDRSTPGVFIGYAEGSKAYRILDLETQRVRTARDVVFDEGRGWVWDKAVDDGSTPMYDDFTVEYVHFEGAGGVGSSSSSSVSTPAPESPPTPTPTHPRATTSTTTSSSSTPPQPVTPHAPAPTVTPPSTSTSTPARVERSPVEFATPLSHDGERIAYHDGEQLRYRTMEDLLGDQPVPGLVPRDLEAQLHLACDDGEPRSFAEAEKHAAWRAAMQSEMDAVQENRTWELADLPRGHRAITLKWVFKLKRDEAGAIVKHKARLVARGFVQQEGIDYDDAFAPVARMESVRLLHALAAQEGWGVHHMDVKSAFLNGDLKEEVYVHQPPGFVIPGKEGKVLRLHKALYGLRQAPRAWNAKLDSTLKGMGFEQSPHEAAIYRRGNGGNALLVGVYVDDLVITGTKDAEDDSGITLRQTAYAKRVVELAGLTDCNPALTPMEERLKLSRDSTAEEVDATQYRRLVGSLRYLTHTRPDLAFSVGYVSRFMQRPTTEHQQAVKRIIRYVAGTLDHGLYYPRCPGKAHFVGCEAEYMAASAASTQALWLARLLSDLLGRDTGTVELRVDSKSALALTKNPVFHERSKHIRVRYHFIRSYLEEGSIKASYINTKDQLADLLTKPLGRIKRLVTFPKCLGTLSSILCIDVHRMCTVDLAASSHMPCLRAAGEFCVDKSKVQGLEVLKQMNELQGSLAITSLENVKSRDEATDAQLFRKSQIFKLKLQWGSSNASSKSDKANDVFDALRPHSGLEELIVQGYPGCVSPSWLESEWLSRLRHISISDCKCWKLLPSLGQIQSLRTLRIARLNAVVCIGPEFYGTAGFPSLEILEMIELPELAEWSSVDCFFPALLEVCIRGCPKLKQLPPVVLPPVRMSIYVSTEVCRLRNHNRLETCFTQEVSLSTLLDMLHLRRLEPVKCVNIIFEGANTLEDGLKDVTTNLPSLEELVIRGCSDLQHAFAASKQREEDGNVFSSASIQCLKMIGCNLTVDIFLSVFQNISFLSLWINDCNITYSTPERVLAMPKSVTGVLEKLCILSCDGLTAFMGLETFLRLSTIEIASCPKLTSVPDFRCLPALQNLIIKNCPELKELPENGNLTTLTALVVEHCNALISLRNLRDLSFLSKLVVRNCMKLMALPQMISFSSLRVLIIKNCPEVVSLPEDGLPVSLNCLYLAGCHPVLEEQFDQKNGSEWEKYEVLPFCFFADKSIEDIEEIAKEVLMADDLTRISIQGNRVHATDSAASSSSFP

SEQ ID NO: 20681 - protein, 1335 aa, Oryza sativa
  unsure (1)..(1335): unsure at all Xaa locations
  Clone ID: TF_OSC419088j.C1.p1.np
MRVNLQAQGLWEAVDTGDVPFHEDRQALSAILRAVPAEMLRPLAEKDNAKDAWDALKSMRVGTDRVRESCAQKLRQAFESMQFKPDESVEDFSLHLQWVVSDLRLLGDDITEEKIMCKFLRVVPRRYRQMALSIETLIDLTTLSIEDLTGRLLTVDDHPDSDSEDAGQALFGKKEEQARANKGLGQSSSRGSGTGTGSSERRQRGRGGCGRDGAGGKHKPGANQGGGRDVSKDKCRYCGELGHWAKDCRKAKRDRDKLAHAHLLGDDEPTLLMAQVCELVPTTEPELINEGDDEPTLLMAQVCELVPTTEPELINEVNLNKERALVSLREEGEVDPDWILDMAASNHMTGLDTTMRGTVKFGDTRIEGRGTMLFACKNGDYCGLIGVYFIPKLRSNMVSLGQLNKVGCKTVIEDGALTLRDPRWRLLCRVRRGRERLYVLQVELAQLVSLAARSSEDAWLXHARFGHLNFDSLRTLYAHGLAHGLPKLERVRQVCDGCLISKQRRVPFPTAATFRATSRLDLVHGNICVPISPPTHGGKKYFLLLIDDMSRYMWLFLLTSKSEAPATIKRFKAGVEVETACKLRVLRTNRGGEFTSIEFGLYCANEGVARQLTAPYSPQQNGVIKRRNQTVVSMARCMMKAKHMPRKFWGEAVRTAVFILNRSPTKAVPNKTPYKAWHGRTPAVHYFKTFGCVVHIKEVKPHLKKLEDRSKMMVFLGYEPGTKGYRVYDPDANRVVITRDAVFDEVTSWPWGEPVEHGEASTDDSFTVYYEVASSIVAEVGLLASRPCPTPSAQLATPPDTPSVEFMSLPNSMLDVDDDXGAPRRYRSMANILDTTAPVELDXNEIYLAAAEELANLSEAEQDEHWRQAMLDEIKSIEENNTWILTELLTGKRPIGVKRVFKLKKKETSAVIRHKARLVAKGYVQRHGIDFDEVFAPVARMESVRLLLAVAAYLGWTVHHMDIKSAFLNRELEEEVYVSQPPGFIDDKHPSQVLHLNRALYGLRQARRTWNAXLDTRLHELGFKRSATEHAVYTRGEGSKRLIIGVDLGLLSYYLRIEVRQGSDDITINXSAYAQKLLKIGGLVDCNSTCVPMEPRLKLMKNSDRPAIDATLYRSLVGSLRYLVHTWPDFAFAVGSVSRFMESPRDDHLLVVKHILRYVAGTQNFGCCLARSGETGICLLGFSDSDLGGDIDDRKSTSGALFFLGSSPIAWQSQKQKVVALSSCEAEYIAATGAACLGIWLARLLAEVLGTEPEMAILKVDNKSVISLCKNPVFHDRSKHIDTRYHIRQCIEEKKDDVEFIPTDEQVADILTKPLVCIKFQEFRNKAGVVQIVTW

SEQ ID NO: 20682 - protein, 2084 aa, Oryza sativa
  Clone ID: TF_OSC12503j.C1.p1.fg
MLDLGGKNGENGNEDEASSKGTPPPKGATIPFDYSKLTIPSHYFVSMPSGHTPQFDGTYYDAWKHKVKLHLISLHPSIWKVVCTGIDIPHDDMELTSGQEQFIHRNAQASNAILSALSPEEFNKVDGLEEAKEIWDTLQLAHEGSPAVREAKIELLEGRLGRFVMDVKETPQEMYDRMMILVNKIKGLGKTSACIWSKKSHSFLSMIRERKHFKRLTPSDILGRIVSHEMQEEEAREVRQMVNNAAMIKNQEVALKAKQEEESSCEESEDEEMAFIVKRFKHFLRKSGYDKGRKDDDKGKRQSKRACFNCGEYGHFIADCPKSNEAKAKGGKKKPERAHVAEAHMAEVWHSGDEEDPEVKPKPKSKDKVEGEGGVATVAFKSSSSSKECLFNNLSDDDDDSYHYSCFMAQGRKSFSKPAMQHLAKLMRALDSKEQSLERQEELLILEKKRNLALEESLAKECAKNKQLANELNLANGSLASLRDVNETLQEKFANLDKSHKDLEVQFDTLWNSTSQPNVVSNSSNPFTSNGCARCYDIDLNSYATNIDAMQALKKENERLSTLVKYGCMKTYHSKDVLYKTITAHPNKDGHELGFSGGSPVPKRVMVNGKECLMFVREGKAPQASEVTGLVSCQGPGTSGQTGRNLWVGVSVSQKFPPGSSGRFARKFRANGRAQDMTGSSGHNARRFQPDGLYYDSYVISKNSEGKVVAYFNVNYNDEYRTCVWVPKALVTNIKGPKLRQAYSSGGSSWVVDSGCTNHMTGERSMFTSLDKENGTRENIVFGDDGKGKLGYNCLFTDEDVTVFRRDDSSVAFKGKLKGDLYLVDFDVDRVNPETCLIAKSSMGWLWHRRLAHVGMRNLATLLKGEHILGLTNVTFEKDRSEAQDVFKRFAKQAQNLYDLTIKRVRSDNGGEFKNTQVEEFLDEVGIKHEFSAPYDPPKNGIVERKNRTLIEAARAMLDKYKTSDIFWAEAVSTACHAINCLYLHKILKKTSYELLSGKKPNVSYFRVFGSRCFILSKRPRSSKFSPKVDEGFLLGYESNAHAYRVFNKTFGIVEVIRDVTFDESNGSQGEQVVVHVVGDVDPSQAIGTKAIGDIRPVETQDDQEDRDQPSSSTSNSPTSSQESVDPEVPGPDDRILRTSPSQEVPGPSARKFRAEDSQGVPVDGIDAEGTVEHPDQAQVPSVHHPRIHHTVQRDHPVDNILGDIRKGITTRSRVANFCQHYSFVSSLEPTRVEDALGDTDWVMAMQEELNNFTRNQVWTLLERPDQNIIGTKWIFRNKQDEHRVVVRNKVRLVAQGFTQVEGLDFGETFAPVARLESIRILLAYAAHHDFRLFQMDVKSAFLNRPISELVYVEQPPGFEDPKLPNHVYKLHKALYGLKQAPRACSIMTKRFEMSMMGELTFFLGLQVKQAQEGTFISQTKYVKDILKKFGMEDAKPIKTPMPTNGHLDLDDNGKCVDQKVYRSKSVCMCAHFQAEPKECHLIAVKRILRYLVHTPNIGLWYPKGCDFELLGYSDSDYAECKVDRKSTTGTCQFLGRSLVSWSSKKQNSIALSTAEAEYVAAGSCCAQLLWMKQTLKDFGYNFTKIPLLCDNESTIKIANNPVQHSRTKHIDIRHHFLRDHETKGDICLTHVRTESQLADIFTKPLDEKRFCELRISTMPREKRQKASQDVSGDKSPPIRFPRGRLGKEKVVDAAVVAVLVLVLGLPVIMARENPVVEMKWIDWAYMRKKNNEVFNQVMQVCHNKNLGDILALEYDWNEEVIAQFYATAFFGTTRKGTPYVKWLTEDDEDLNRPNIHSEASLPMIKTKFMYAKDAPRTCMGSTHGLHPNYKVLYSIFHWSLLPKVGDATALPSKHAHLLSRMRYNQPPFNVMKLIWYEIANTILEPKRGCIYAPFIMKMIETVTGVFYIKDGHHNPFRPRAPPFSSPVVPRSVPSTSAGPSTSGPPSSSSFSPIKKALQAIFCMCAKTAKKVKKIERRQKEDRREARKEVSDDSEDEVYVDPFEAYEAARNVAGEGPSTFFNEESSHSDDDDDDDDDDDDGDEGDTEAAAEDAPIDVDEGDTAAQSDESHLSGDTEIVPSDGDE

SEQ ID NO: 20683 - protein, 570 aa, Oryza sativa
  Clone ID: TF_OSC13789j.C1.p4.fg
MSHLEGDEYLEEKGDASSTKETGSKGATIHFDYIKLNVPPHNFVSVPSGRAPHFDGTHYAAWKHKMKLHLISLHPSIWKVVCTGIDVPNDDMELTSEQEQLIHRNAQASNTILSALSPKEFNKFDGLEEAKEIWDTLQLAHEGSPAVREDKIELLEGRLGRFVMDDKETPQEMYDRMMILVNKIKGFGSEDMTNHFVVKRLLRAFGPRNPTLVSMIRERKDFKRLTPSDILGRIVSHEMQEEEAREVRQMVKNAAMIKNQEVALNAKQEEESSCEESEDEEMALIVKRFKHFLLKSGYGKGRKDDDKGKRQSERACFNCGEYGHFIADCPKTNEAKAKGDKKKPERAHVVKAHMVEVWYSEDEEASEDKPKPKPKDKIEGEGGIATVAFKSSSSSKECLFNNLSDDDDDSYHYSCFMAQGRKVMTQKPSHTSLDDDSSDEETSLRDVNETLQEKFAILDKSHKDLEVQLDTLWSSTSQPNVVSNSSNPSTSNGCARCYNIDLTSYATNVDAMQALKKENERLGTLVKYGCMKTYHSKDALYKTITAHPNKDGHGLGFSGGMSRPDKFIPK

SEQ ID NO: 20684 - protein, 658 aa, Oryza sativa
  Clone ID: TF_OSC30721j.C1.p1.fg
MELTSEQEQLIYRNAQASNAILSALNPEEFNKVDGLEEAKEIWDTLQLAHEGCPAVREAKIELLEGRLGRFVMDDKETAQEMKDFKRLTPSDILGRIVSHEMQEEEAREVRQMMKNAAMIKNQEVALKAKQEEESSCEESEDEEMAFIVKRFKHFLYKSGYGKGRKDDDKGKRQSKRACFNCGEYGHFIADCPKSNEANAKGGKKKPERAHVAEAHMAEVWYFGDEEDPEVKPKPKSKDKVEGEGGVATVAFKSSSSSKERLFNNLSDDDDDSYHYSCFMAQGRKVMTQKPSQTSLDVDSSDEESDNELDDVLKSFSKPAMQHLVKLMRALDSKEQSLERQEELLILEKKRNLVLEESLAKECAKNKQLANELNLANGSLASLRDVNETLQEKFANLDKSHKDLEVQFDTLWNSTSQPNVVSNSSNPSTSNALKKENEKLCTLVKYGCIKTYHSKDALYKTITAHPNKDGHGFGFSGRSPVSKRVMVNGKECLMFVREGKAPQASEVTGLVSCQGPGTSGQTGRNLRVGVSVSQKFPPESSGRFAKKFRANGRAQDMTGSSGHNARRFRPDGLYYDSYVISKNLEGKVGAYFNGNYNDEYRTCVWVPKALAYSSGGSSWVVDSGCTNHMTGERSMFTSLDEENGTRENIVFGDDGKGK

SEQ ID NO: 20685 - protein, 449 aa, Oryza sativa
  Clone ID: TF_OSC400044j.C1.p46.fg
MSHQEGNGEIDEGDKGDASSTEEIASKGATIHFDYSKLNVPSHNFVSVPSGRAPHFDGTHYAAWKHKMKWHLISLHPSIWKVVCTGIDVPHDGMELTSEQEQLIHRNAQASNAILSALSPEEFNKVDGLEEAKEIWDTLQLAHEGSPAVREAKIELLEERLGRFVMDDKETPQEMYDRMMILVNKIKGLRSEDMTNHFVVKRLLRAFGPRNPTLVSMIHERKDFKRLTSSDILGRIVSHEMQEEEAREVRQMVKNAAMIKNQEVALKAKQEEESSCEESEDEEMALIVKRFKHFLRKSGYGKGRKDDDKGKRQSKRACFNCGEYGHFIADCPKSNEAKAKGGKKKPERAHVAEAHMAEVWYSEDEEASEAKPKPKPKPKDKVEGEGSVATIAFKSSSSSKERLFNNLSDDDDDSYHYSCFMAQGRKVMTQSPLTLLLMMILVMKKVIIN

SEQ ID NO: 20686 - protein, 1794 aa, Oryza sativa
  Clone ID: TF_OSC400116j.C1.p1.fg
MSHLEGTEGLDDKGDASSTKDTGPKGATIHFDYNKLNVPPHNFVSVPSGRAPQFDGTHYAAWKHKMKLHLISLHPSIWKVVCTGIDVPHDDMELTSEQEQLIHCNAQASNAILSALSLEEFNKVDGLEEAKEIWDILQLAHEGSPAVREAKIELLEGRLGRFVMDDKKTPQEMYDRMMILVNKIKGLGSKDMTNHFVVKRLLRAFDPRNPTLVSMIREKKNFKRLTPSDILGRIVSHEMQEEEAREVRQMVKNAAMIKNQEVALKAKQEEESSCEESEDEEMAFIVKRFKHFLRKSGYGKGRKDDDKGKRQSKRACFNCGEYGHFIADCPKSNEAKAKGGKKKPERAHVTEVNMAEVWYSRDEEDPEVKPKPKLKDKVEGEGRKEMTQKPSHTSLDVDSSDEESDNELDDVLKSFSKPAMQHLAKLMRALDSKEQSLERQEELLILEKKRNLALEESLAKECAKNEQLANELNLANGSLASLRDVNETLQEKFANLDKSHKDLDVQFDTLWNSTSQPNVVSNSSNPSTSNGCARCYNIDLNSCTTNVDAMQALKKENERLGTLVKYGCIKTYHSKDALYKTITAHPNKDGHGLGFSGGSPVSKRVMVNGKECLMFVREGKTPQASEETRPFSGQHPEVPDKMIGSSCPAYSSDGSNWVVDSGCTNHMTGERSMFTSLDEEGGSRENIVFGDDGKGKLQFIIRISIVRDDSSIAFKGVLKGDLYLVDFNVDRVNPEACLIAKSSMGWLCHRRLAHVGMRNLASLLKGEHILGLSNVSFEKDRVCSACQVGKQVGSPHPIKNIMTTTRPLELLHMDLFGPVAYIIIGGNKYGFVIVNDFSRFTWVYFLHDKSKAQDVFKRFAKQAQNLYDLTIKRVQSDSGGEFKNTQVEEFLDEEGIKYEFSTPYDPLQKGIVERKNRTLIEAARAMLDEYKTSDVFWAKAVSTACHAINRLYLHKILKKTSYELLSCKKPNVSYFRVFGSKCFILSKRPRSSKFSSKVDEGFLLGYESNAHAYRVFNKTSGIVEVTRDVTFDESNGSQGEQVVVHVVSDVDPSQAISIKAIGDIRPVETQDDQEDRDQPPSSTSNSPTSVVSAEPEVPGPIDWNIRTSPGPEVPGSLVQNLRTSGSEDVPTAQVHDYVQRDHPVDNILGDIRKGVEDALGDPDWVMAMQEEFNNFTRNQVWTLMERPKKNVIGTKWIFRNKQDEHGVIVRNKARLFQMDVNSAFLNGPISELVYVEQPPGFEDLKLPNHVYKLHKALYGLKQAPRACVSMCARFQAEPKECHLIAVKRILRYLVHTPNLGLWYPKGCDFKLLGYSDSDYAGCKVDRKSTTGTCQFLGWSLVSWSSKKQNSIALSTAEAEYVAAGSCCAQFHWMKQTLKDFGYNFSKIPLLCDNESAIKIANNPVQHSRTKHIDIHHHFLRDHETKRDICLTHVRTESQLADIFTKPLDEKRFCELRMVSMPREKRQKLSQDVPSDSSPLVRGPRGRLGKEKVGDFYSGSQILIHSRRAGSIVIRDAPRSPSPVASESDNGGNEDEPGSESNPLRLYKTRAVDPDPRHPRVNYLKNLLRCAKDRMVSPDTMTADSQDDRFRTLVQIDWYNSMIMRRSYPVVEMKWLDWQYMSSKNNLVFNEVRKDAPKDCLGTTRGLHPYYRVLYSIFRWSLLPKVNDATALPSRHALLLSRMRYNKPDFSIMKLIWTGKEVSDISDDEEFVDPFAAYEAARDIANGEGPSGTTHFFNEESSYSEENSDDEESDAPTENVPTDLDEAVDAAGQDIDSPDSGDTEIISSDGDDDEA

SEQ ID NO: 20687 - protein, 1778 aa, Oryza sativa
  Clone ID: TF_OSC400685j.C1.p36.fg
MSDLGGKNGENGNEDEASSKGTPPPKGATIPFDYSKLTIPSHNFVSVPSGRAPQFDGTYYAAWKHKMKLHLISLHPNIWKVVCTGIDIPHDDMELTSEQEQLIHRNAQASNAILFALSPEEFNKIDGLVEAKEIWDTLQLAHEGSPAVREAKIELLEERLGRFVMDDKETPQEIYDRMMILVNKIKGLGSEDMTNHFVVKKLLRAFGPRNPTLVSMIRERKDFKRLTPSDILGRIVSHEMQEEEAREVRQMVKNAAMIKNQEVALKAKQEEMAFIVKIFKHFLRKSGYGKGRKDDDKGKRQSRRACFNCGEYGHFIADCPKSNEAKAKGGKKKPEHAHVAEAHMAEVWYSGDEEDPEVKPKPRSKDKVEGEGGVATVAFKSSSSSKERLFNNLSDDDDDSYHYSCFMAQGCKVMTQKPSQTSLDVDSSDEESDNELDDVLKSFSKPAMQHLAKLMRALDSKEQSLERQEELLILEKKRNLTLEESLAKKCAKNEQLANELNLANGSSASLRDVNETLQEKFANLDKSHKDLEVRFDTRWNSTSQPNVVSNSSNPSTSNGCARCFNIDLNSYATNIDAMQALKKENERLGTLVKYGCMKTYHSKDALYKTITAHPNKDGHGLGFSGGSPVSKRVMVNGKECLMFVREGKAPQASEVTSLVSCQGPGTSGQTGRNFRVGVSVSQKFPPGSSGQFAKKFRANGRAQDMTGSSGHNARRFRPEGLYYDSYAYSSGGSSWVVDSGCTNHMTGEMSIFTSLDEENGTRENIVFGDDGKGKIIGLAFISIGGNKYGFVIVDNFSRFTWVYFLHDKSEAQDVFKRFAKQAQNLYDLTIKRVRSDNGGEFKNTQVEEFLDEEGIKHEFSAPYDPPQNGIVEKKNRTLIEAAREMLDEYKTSDSFWTEAVSTTCHAINRLYLHKILKKTSYELLSGKKPNVSYFHVFASKCFILSKRPRSSKFSPKVDEGFLLGYESNAHAYRVFNKTSGIVEVTRDVTFDESNGSQGEQVVVHVIDDADPREAIGSKAIGDIRPVETQDDQEDRDQPSSSTSNSPTTSQESVDPEVPGPDDRNLQTSPGQEVPGPSARKFRAEDSQGLPTTQVDGIDAVGTVEHPDQAQVSSVHHPRIHHTVQRDHPVDNILGDIRKGVTTRSRVANFCQHYSFVSSLEPTRVEDALGDPDWVMAMQEELNNFTRNQVWTLVERPDQNVIGTKWIFRNKQDEHGVVVRNKARLIVQGFTQVEGLDFGETFAAVACLESIRMLLAYAAHHDFRLYQMDVKSAFLNGPISELVYVEQPPGFEDPKLPNHVYKLHKALYGLKQAPRVWYECLRDFLLKNGFEIGNTYTTLFTKKFENDLFICQIYVDDIIFGSTNASFCEEFSSIMAKRFEMSIMGELTFFLGLQVKQAQEGTFISQTKYVKDILKKFEMEDAKPIKTPMPTNGHLDLDENGKCVDQKGCDFELLGYSDSDYAGCKVDRKSTTGTCQFLGRSLVSWSSKKQNSIALSTTEAEYVAAGSCCAQLLWMKQTLKDFGYNFTKIPLLCDNESAIKIANNPVQHSRTKHIDIRHHFLRDHETKGDIFLTHKRQKASQDVSGDESPPIRFPRGRLGKEKVIEGGSGSGTRTSPRFTRQSSNRPVQIRDVDSGQGSDAPNTRGRGRGGGRSSGAGRASHDFPIGSRENPVQLYKTLGFDTTPMHHIGRPKSNYLHQLAKCRRDLITARENPMVKMKWIDWTYMRKKNNEVFNQVMQVCHNKNLGDILALEYDWNEEVIAQFYATAFFGTTRKGIVTP

SEQ ID NO: 20688 - protein, 1762 aa, Oryza sativa
  unsure (1)..(1762): unsure at all Xaa locations
  Clone ID: TF_OSC400735j.C1.p3.np
MSYLGGKNGENGNEDEASSKGTPPPKGATIPFDYSKLTIPSHNFVSVPSGRAPQFDGTYYAAWKHMMKVHLISLHPSIWNVVCTGIDIPHDDMELTSEQEQLIHRNAQASNAILSALSPEEFNKVDGLEEAKEIWDTLQLTHEGSPAVREAKIELLEGRLGRFVMDDKETPQEMYDRMMILVNKIKGLGSEDMTNHFVVKRLFGPRNPTLVSMIRERKDFKRLTPSDILGRIVSHEMQEEEGREVRQMVKNSLKAKQEEESSCEESEDEEMTFIVKRFKHFLRKSGYGKGRKDDDKGKRQSKRACFNCGEYGHFIADCPKSNKAKAKGGKKKPERAHVAEAHMAEVWYSRDEEDPEVKPKPKSKDKVEGEGGVATVAFKSSSSSKERLFNNLSDDDDDSYHYSCFMAQGRKVMTQKPSETSLDVDSSDEESDNELDDVLKSFSKPAMQHLAKLMRALDSKEQSLERQEELLILEKKRNLALEESLAKECAKNEQLANELNLANGSLASLRDVNETLQEKFANLDKSHKDLEVQFDTLWNSTSQPNVVSNSSNPSTSNGCARWYNIDLNSYATNIDDMQALKKENERLGTLVKYGCMKAYHSLDALYKTITAHPNKDGYRLGFSGGSPVSKCVMVNGKECLMFVREGKAPQASEVTSLVSCQGPGTSGQTGRNIRVGVSVSQKFPPGSSGQFARKFRANDHAQDMTGSSGHNAWRFRKEGLYYDSYAYSSDGSSWVVDSGCTNHMTGERSMFTSLDEXNGTRENIVFGDDGKGKVIGLAYISIGGNKYGFVIVDDFSRFTWVYFLHDKSEAQDVFKRFAKQAQNLYDLTIKRVRSDNGGEFKNTQVEEFLDEEGIKHEFSTPYDPPQNSIVERKNRTLIEAARAMLDEYKTSDIFWVEAVSTACHAINRLYLHKILVSYFRVFGSKCFILSKRPCSSKFSPKVDEGFLLGYKSNAHAYRVFNKTSGIVEVTRDVTFDESNGSQEEQVVVHVVDDADPRQAIGSKAIGDIRPVETQDDQEDRDQPSSSTSNSPTTSQESVDPEVPGPDDRNLRTSLGXEVPGPSPRKFGAEDSQGVPTAQVDGIDAEGTVEHPDQAQVPSVHHPRIHHTVQRDHPVDNILGDIRKGVTTRSRVANFCQHYSFVSSLEPTRVEDALGDPDWVMAMQEELNNFTCNLVWTSVERPDQNVIGTKXIFCNKQDEHGVVVRNKARLVAQGFTQVEGLDFGETFAPVARLESIQMLLDYAAYHDFRLYQMDVKSAFLNGPILELVYVEQPPGFEDPKLPNHVYKLHKAQNGLKQPRAWYECLRDFLLKNSFEIGKADTTLFTKKFENDLFICQTYVDDIIFGSTNASFCEEFSSIMTKRFEMSMMGELTFFLALQVKQAQEGTFISQTKYMKDILKKFGMEDAKTIKTPMPTNGHRDLDENGKCVDQKGCDFELLGYSDSDYAGCKVDRKSTTGTCQFLRQSLVSWSSKKQNSIALSTAEAEYVAADSCCAQLLWMKQTLKDFGYNFTKIPLLCDNESATKIANNPVQHSRTKHIDIRHHFLRDHETKGDICLTHKRQKASQDVSGDESPPIRFPRGRLGKEKVVEGGSGSGTRTSPRFTRQSSNRPVQIRDVDSGQGSDAPNTRGRGRGGCRSSRAGRASHDFPVGSRENPVRLYKTLGFDTTPLHHIGRPKSNYLHQLAKCRRDLIMARENPVVEMKWIDWAYMRKKNNEVFNQVMQVCHNKNLGDILALEYDWNEEVIAQFYATAFFGTTRKGTPYV

SEQ ID NO: 20689 - protein, 1991 aa, Oryza sativa
  Clone ID: TF_OSC401074j.C1.p9.fg
MVKNAAMIKNQKVALKAKQEEESSCEESEDEEMAFIVKRFKHFFHKSGYGKGRKDDDKGNKQSKRACFNCGEYGHFIADCPKSNEANAKGGKKKPERAHVVEAHMAEVWYSGDEEDPEVKPKPKSKDKVEGEGGVATVAFKSSSSSKEHLFNNLSDDDDDSYHYSCFMAQGRKVMTQKPSQTSLDVDSSDEESDNELDDVLKSFSKPDMQHLAKLMRALDSKEQSLERQKELLILEKKRNLALEESLAKECAKNEQLANELNLANGSLASLRNVNETLQEKFANLDKSHKDLEVQFDTLWNSTSQPNVVSNSSNPSTSNGCARCYNIDLNSYATNIDAMQALKKENERLGTLVKYGCMKTYHSKDALYKTITAHPYKDGHGLGFSGGSPVSKRVMVNGKECLMFVREGKAPQVSEVTGLVSCQEPGTSGQTGRNLRVGVSVSQKFPPGSSGRFARKFWANGRAKDMTGSSGHNARRFRPDGLYYDSYVISKNLEGKVVAYFNGNYNDEYHTYVWVPNALAYSSGGTSWVVDSGCTNHMTGERIMFTSLDEENETRENIVFGDDGKGKLGYNCLFTDEDVTVFRRDDSSVAFKGKLKGDLYLVDFDVDRVNPEACLIAKSSMGWLWHRRLAQVGMRNLATLLKGEHILGLTNVTFEKDRVCSACQAGKQVGNPHPIKNIMTTTRPLELLHMDLFGPVAYISIGGNKYGFVIVDDFSRFTWVYFLYDKSEAQDVFKRFAKQAQNLYDLTIKRVRSDNGGEFKNTQVEVFLDEVGIKHEFFAPYDPPQNGIVERKNRTLIEATRAMLDEYKTSDIFWAEAVSTACHAINRLYLHKILKKTSYELLSGKKPNVSYFRVFGSRCFILSKRPCSSKFSPKVDEDSYLAMSQMHMPTVSSTKPLVLLKLQGSPTSSQESVDPEVPGPDDRNLRTSPGQEVSGPFARKFRAEDSQGVPTAQVDGIDAEGTIEHPDQAQVPSVHHPRIHHTVQRDHPVDNILGDIRKGVTTRSRVANFCQHYSFVSSLEPTRVEDALGDPDWVMAMQEELNNFTRNQVWTLVERPDQNVIGTKWIFRNKQDEHGVVVRNKARLVAQGFIKVEGLNFGETFAPIARLESIRILLAYAAHHDFRLFQMDVTSAFLNGPISELVYVEQPPGFEDPKLPNHVYKLHKALYGLKQAPRACSIMTKRFEMYMMGELTFFLGLQVKQAQEGTFISQTKYVKDILKKFGIEDAKPIKTPMPTNGHLNINDNGKCVDQKVYRSMLGSLLYLCASRHDIMLSVCMCARFQAEPKECHLIAVKRILRYLVHTPNLGLWYPKGCDFELLGYSDSDYAGCKVDRKSTTGTCQFLGRSLVSWSSKKQNSIVLSTAEAEYVAAGSCCAQLLWMKQTLKDFGYNFTKIPLLCDNESAIKIANNPVQHSRTKHIDIRHHFLRDHETKGDICLTHVRTESQLADIFTKPLDEQRFCELRISTMPREKRQKASQDVSGDESPPIRFPHGCLGKEKVVEGGSGSGTRTSSRFTRQSSNRLVQIRDVDSGQGCDAPNTRGRGRGGGRSSGAGRASHDFPVGSRENPVRLYKTLGFDTTPMHHIGRPKSNYLHQLAKCRRDRLIDPETRPEESHDPRFRTFTQLDWYNSMIMARENPVVEMKWIDWAYMRKKNNEVFNQVMQVCHNKNLGDILALEYDWNEEVIAQFYATAFFGTTRKGTPYVKWLTEGVRHKISMAQFAEMLGLDDEDLNRPNIHSEAPLPMIKTKFMYAKDAPRTCMGSTHGLHPNYKVLYSIFCWSLLPKVGDATALPSKHAHLLSRMRYNQPPFSVMKLIWYEIANTILEPKRGCIYAPFIMKMIETITGVFYIKDGHHNPFRPRAPPSSSPVVPRSIPSTSAGPSTSAPPSSSSSSPIKKALQAIFYMCAKTAKKAYEAARNVVGEGPSTFFNEESSHSDDDDDDDDDDDDDDGDQGDTEAAAEDAPTDVNEGDTAAQSDESHLSGDIEIVPSDGDE

SEQ ID NO: 20690 - protein, 1431 aa, Oryza sativa
  Clone ID: TF_OSC401693j.C1.p19.fg
MSSASMAGACSFLVAAAGKPPRRSSLQRCFMTREGSKRSGGVNGRAQWRNDSVGGQSSRAYNGLNGSVVLPAEEVDVEAGGGKEELELGAPELRGGGGTSGQHGERGGGVPIYDECGGELRLEVAGPKEGQATGEKARCGGGDEEPQPVAEHVLLQGDSTEDAIGGGEEGVGKELEPRESWGQRGGRGDRRRVAEREKIGLVRGSGRLASSPSPHLQRHNTCLRAFTTLCVTSARLSTVSRALCSSGVRSRPLADSLGFPDKIGRRSSRGGQGRNGSGGGDSAGPARKTDKCHNCGKLGHWAKDCRSKPKQEQAHVVQEEDEPTLMLMTGGCIDVVEETGAPCVTPAPPAPRPRLDVVELVEQKVFAALDDATDHDNKRWILDTGASNHMTGSRAAFSDIDTNVTGNVRLGDGSLVRIGGRRTILFACKNGEHHMLHKAYYLPCLAANIISVGQLDETGFKVLVEDGVMRVWDEQHRLLARITRTPGRLYVLDINLARPVYLMARAGEDAWRWHARFGHVNFTALRKMGREALVRGLPVLSQVEQVCEACLAGKQRRAPFPQQALHRATEPLALLHGDLCGPVMPATPSGNRYFPLLVDDYSRYMWLVLLATKDAAPDAMKRVQAAAERKSGRKLRALRTDRGGEFTVGHFTEYCAELGLRRELTAPYSPQQNGVVERRNQSVVSTARSMLKAKGLPGMFWGEAVNTAVYLLNRCSSKSIDGKTPYELWNGVTPAVHHLRTFGCVAHVKVTAPTKKLDDRSRPMIFVGYELGSKAYRVYDPATRRVHVSRDVVFDEEAQWNWDGEAATNVDSDFTIEYTTVYHPATATPTQTGTEHGGAPASPRSPASGSTPTTPPVAEVSPVEFVSPPPDVEDDLDADHDDAPLRFRRIDDVLGPATPPGQAVRELSEELFAVTAEEPASFAEAEQLSCWRQAMIEEMRSIEANKTWRLVDPLARQRPIGLKWVYKAKKDAAGNITKYKARLVAKGYVQRQGIDFDEVFAPVARLESVRLLLAHAACEGWAVHHMDVKSAFLNGELLEEVYVAQPPGFVVDGQEHKVLRLDKALYGLRQAPRAWYSKLDASLLSLGFHRSDSEHAVYMRGTGEQRLVVGVYVDDLIITGGNPGELKQFKEEMKGTFQMSDLGLLQYYLGLEVNQTEDGITVNQRAYAEKILQTAGMVASNPSLTPMETRLKLSKMSNAPSVDATDYRWIVGSLRYLVNSRPDLAYSVGYVSRFMEKPTTEHLAAVKRVLRYVAGSIGYGCHYKRKKDASLVGYSDSDLAGDVDTRKSTSGVFFFLGDNLITWQSQKQKVVALSSCEAEYIAATTAACQGVWLARLLAELQGEEADAVTLRIDNQSAIMLSKNPVFHDRSKHIDTRYHYIRECIEEGRVKVEFIGTNEQLADILTKSLGRDRFMELRSQIGLVEVQTPRKV

SEQ ID NO: 20691 - protein, 2098 aa, Oryza sativa
  Clone ID: TF_OSC403369j.C1.p1.fg
MTRETLLAPRIKGATIHFDYSKLNVPPHNFVSVPSERAPQFDGTHYAAWKHKMKLHLISLHPSIWKVVCTGIDVPNDDMELTSEQEQLIHRNAQASNAILSTLSPEEFNKMYDRIMILVNKIKGLGNEDMTNHFVVKRLLRAFGPRNPTLVSMIRERKDFKRLTPSDILGIIVSHAMQEEEAREVRQMVKNAAMIKNQEVALKAKQEEVSSCEEIEDEEMAFIVKRFKHFLRKSGYGKGRKDDDKGKRQSKRACFNCGEYGHFIADCPKSNEAKAKGGKKKLERAHVAEVWYSGDEEDPEVKPKPKPKDKVEGEGGVATVAFMSSSSSKERLFNNLSDDDDDSYHYSCFMAQGRKLMRALDSKEQSLERQEELLILEKKRNLALEESLATKCAKNEQLANELNLANGSLAILRDVNETLQDKFANLDKSHKDLEVQFDTLWNSTSQPNVVSNPSNPSTSNDCARCYNIDLNSCATNVDAMQALKKENERLGTLVKYGYMKTYHSKDALYKTITAHPNKDGHGLGFSSGSPVSKRVMVNGKECLMFLREGKAPQASEVTCPFTGQTLGSSGQNDGKFLPCKTGSSEHFVRKFRTSDESKGLTGSSWYNARKFRPEGLYYDLYVISKNSEGKVVAYFNGNYNDEYRTCVWVPKALVTNIKGPKLMTGERCMFTSLDEQGGSRENIFFGDDGKGKDCVCSACQAGKQVGSPHPIKNIMTTTRPLELLHMDLFGPVAYISIGGNKYGFVIVDDFSRFTWVYFLHDKSKAQDVFKRFAKQAQNLYDLTIKRVRSDNGGEFKNTQVEKFLDEEGIKHEFSAPYDPPQNGIVERKNRTLIEAARAMLDEYKTSDVFWAEAMSDVDPSQAIGTKAIGDIRLVETQDDQEDRDQPPSSTSNSPTSAVSAEPEVPDPIDQNLRTSPGPIPPVHHPRIHNTVQRDHPVDNILGDIRKGVTTRSRVACFCQHYSFVSSLEPTRVEDALGDPDWVMAMQEELNNFTRNQVWTLAERPKQNVVGTKWIFRNKQDEHGVVVRNKAQIVAQGFTQVEGLDFGETFAPVAHLESIRILLAYAAHHDFRLFQMDVKRAFLNGPISELVYVEQPPGFEDPKLPNHVYKLHKALYGLQQAPRAWYECLQDFLLKNGFEIGKADTTLFTKKFKSDLFICQIYVDDIIFGSTNASFCEEFSSITTKSFEMSMMGELTFFLGIQVKQAQEGTFISQTKYVKDILKKFGMEDTKPIKTPMPTNGHLDLDNNGKCVDQKVYRSMIGSLLYLCASRPDIMLSVCMCARFQAEPKECHLIAVKRILRYLVHTPNLGLWYPKDCDFELLGYSDSDYAGCKVDRKSTTGTCQFLGRSLVSWSYKKQNSIALSTTEAEYVAAGSCCAQLLWMKQTLQDFGYNFTKITLLCDNESAIKIANNPVQHSRTKYIDICHHFLRDHETKRDICLTHVRTETQLADIFTKPLDEKRLCELRSELNILDSRNIRFLFLIVEFSSIPLNLGLTALCSVRPEVPVTLVRNIRGSGFCRPEVPVFLVRNFRSLSSQPANLDSSNFYFNHCTSTLLILVAVVSMPHEKRQKLSQDVPADSSPPVHGPRRRLGKEKVGNFYSGSQIPIHSRRAGSIVIGDAPRSPSPVASKSDDGGNEDEPSSESNPLRLYKTRVVDPDPRRPSVNYLKNLLKCGMDRMVSPDTMPADSQDDRFRTVVQVDWYNSVIMGRSHPVVEMKWLDWQYMSLKNNLVFSEVRKVCERKHVADLLALQYSWNEEVIGQLYSTAFFGTTKKGIEFVKWTIQGQQYRVSMAQFAAALELDDDDLSRPHIFVENALSPTSTTFLYEKDAPKDCLGTTRGLRPYYRVLYSIFRWSLLPKVGDTTALPDRHALLLSRIRYNKPDFSIMKLIWSEIYEIVCELKRGCIYAPYIMKMIEAKIGISYFKDNQHKPFRPHVPSSSAPPSTRATRASTSAARSSSAAPQRSESSSPIKKALRAIFCMCAKTAKKVKKIERRQKEDWIAAGKDVSNISDEEEFVDPFAAYETAQDIASGEGPSGTSHFFNEESSHSKESSDDEESDAPTENVPTDPDEAVDIAGQDIDSPHSGDTEIIPSDGDDDEA

SEQ ID NO: 20692 - protein, 167 aa, Oryza sativa
  Clone ID: TF_OSC4135j.C1.p1.fg
MIRERKHFKRLTPSDILGRIVSHEMQEEEAREVRQMVNNAAMIKNQEVALKAKQEEESSCEESEDEEMAFIVKRFKHFLRKSGYDKGRKDDDKGKRQSKRACFNCGEYGHFIADCPKSNEAKAKGGKKKPERAHVAEAHMAEVWHSGDEEIPRSSPSPSQKTRLKEK

SEQ ID NO: 20693 - protein, 1355 aa, Oryza sativa
  Clone ID: TF_OSC414619j.C1.p7.fg
MELTSEQEQLIHRNAQASNAILSALSPEEFNKVDGLEEAKEIWDTLQLAHEGSPVVREAKIKLLEGRLERFVMDDKETPQEMYDRMMILVNKIKGLGSEDMTNHFVVKRLLRAFGPRNPTLVSIIRERKDFKRLTPSDILRRIVSHEMQEEEAREVRQMEKNAAMIKNQEVALKAKQEEELSCKESEDEEMAFIVKRFKHFLRKSGYGKGRKDGDKGKWKSKRACFNCGEYGHFIADCPKSNEAKAKGGKKKPERAHYSGDEEDPEVKPKPKPKEKVEGEGGVATVAFKSSSSSKKRLFNNLSDDDDDSYHYSCFMAQALKVMTQKPSHISLDVGSNDEESDNELDDVLKSFSKPTMQHLAKLMRALDSKEQSLERQEELLILEKKKNLALEESLAKECAKNEQLANELILANGSLASLRDVNGTLQEKFVNLDISHKDLEVQFVTLWNSTSQPNVVSNPSNPSTSNGCARCYNIDLNSYATNVDAMQALKKENERLGTLVKYGCMKTYHSKDALYKTIIAHPNKDGHRLGFSGGSPVSKRVMDPNLFGSVAYISIGGNKYGFVIVDDFSRFTWVYFLHDKSEAQDVFKHFAKQAQNLYDLTIKRVRSDNGGEFKNTQVEEFLDEEGIKHEFSAPYDPPQNSIVERKNRTLIEAVRAMLDEYKTSDVFWAEAVSTACHAINRLYLHKILKKTSYELLSVTRDVTFDESNGSQGEQVVVHVIGDVDPSQAIGTKAIGDIRPVETQDDQEDRDQPPSSTSNSPTSAVSAEPEVPGPIDQNLQTSPGPEVLGSPVRNLRTNGSEDVPTLQVPLVHHPRIHHTIQRDHPVDNILGDIRKGVTTRSRVASFCQHYSFVSSLEPTRVEDVLGDPDWVMAMQEELNNFTHNQVWTLVERPKQNVIGTKWIFRNKQDEHVVVVRNKARLVAQGFIQVEGLDFGETFTPVARLESIKILLAYAAHHDFRLFQIDVRSAFLNGPISELVYVEQPSGFEVPKLPNHVYKLHKALYGLKQAPRAWYECLRDFLLKNGFEIGKADTTLFTKKFKSDLFICQIYVDDIIFGFTNASFCEEFSTVMTKRFEMSMMGELTFFLGLQVKQAQEGTFISQTKYVKDILKKFGMEDAKPIKTPMPTNGHLDLNDNGKCVDQKVYRSMIGSLLYLCASRPDIMLSVCMCARFQAEPKECHLIAVKRILRYLVHTPNLGLWYPKGCDFELLGYSDSDYAGCKVDTKSTTGTCQFLGRSLVSWSSKKQNSIVLSTAEAEYVVAGSCCAQLLWMKPTLKDFGYNFTKIPLLCDNESAIKIANNPIEHSRTKHIDIRHHFLRDHETKGDICLTHVRTETQLADIFTKPLDEKRFCELRS

SEQ ID NO: 20694 - protein, 199 aa, Oryza sativa
  Clone ID: TF_OSC415728j.C1.p4.fg
MAFIVKRFKHFLRKSGYGKGRKDDNKGKRQSKRACFNCGEYGHFIADCPKSNEAKAMGGKKKPEHDHVAEAHMTEVWYSGDEEDPEVKPKPKPKDKVEGEGGVATVAFKSSSSSKERLFNNLSDDDDDSYHYSCFMAQGHKVMTQKPSHTSLDVDSSDEESDNELDDVLKSFSKPAMQQLAKLMRALDNLNVHCLIRID

SEQ ID NO: 20695 - protein, 1195 aa, Oryza sativa
  unsure (1)..(1195): unsure at all Xaa locations
  Clone ID: TF_OSC420031j.C1.p1.np
TIHFDYNKLNVPPHNFVSVPSGRAGKRQSKRACFNCGEYGHFIADCPKTNKAKAKGGKKKPERGRKVMTQKPSHTSLDDVLVMKKVIMNXMMCLRALAEFLDEEGIKHEFSAPYDPPQNGIVERKKNXTLITTPGGVMTAKYYSPAVPIEIQGIPFPSDLILLDTKNLDVILGMNWLAQFQGVVDCARRTVTLYRGPEQPVVFFAPPTSVGSSELHQIGLSEIPIVREFGDVFPEELPGMPPKREIEFWIDLAPGTTPLYKXPYRMASNELAEVKKQLEELKEKGYIRPSTSPWGAPVIFVEKKDKTKRMCVDYRALNEVTIKNKYPLPRIDDLFDQLKGATVFSKIDLRSGYHQLRIREEDIPKTAFTTRYGLYEFTVMSFGLTNAPAFFMNLMNKVFMEYLDKFVVVFIDDILVYSQSEEDHQHHLRLVLGKLREHQLYAKLSKCEFWLSKVKFLGHVISAKGVAVDSETVTAVTDWKQPKTVTQIRSFLGLAGYYRRFIENFSKIARPMTQLLKKEEKFVWSPQCEKAFQTLKERLVSSPVLILPDTRKDFMVYCDASRQGLGCVLMQEGHVVAYASRQLWPHEGNYPTRDLELAAVVHALKIWRHYLIGNRCEIYTDHKSLKYIFTQSDLNLRQRRWLELIKDYDVGIHYHPGKANVVADALSRKSHCNTLDVRGIPPELNQQMEALNLSIVGRGFLATLEAKPTLLDQIREAQKNDPDMRGLLKNMKQGKAASFTEDEHGTLWNGNRVCVPDDRELKQLILQEAHESLYSIHPGSTKMYLDLKEKYWWVSMKREIAEFVALCDVCQRVKAEHQRPAGLLQPLQVPEWKWDEIGMDFITGLPKTQGGYDSIWVVVDRLTKVARFIPVKTTYGGNKLAELYFARIVSLHGVPKKIVSDRGSQFTSHFWKKLQEELGTRLNFSTVYHPQTDGQTERLNQILEDMLRACVLDFGKTWDKSLPYAEFSYNNSYQASIQMAPYEALYGRKCRTPLLWDQVGESQVFGTDILREAEAKVRTIRDNLKVAQSRQKSYADNRRRNLEFAVDDFVYLRVTPLRGVHRFQTKGKLAPRFVGPFHIIARRGEVAYQLELPASLGNVHDVFHVSQLKKCLRVPSEQADSEQIEVREDLTYVERPVKILDTMECRTRNRVIRFCKVQWSNHAEEEATWEREDEMKAAHPDLFASSSESRGRDSV

SEQ ID NO: 20696 - protein, 2296 aa, Oryza sativa
  Clone ID: TF_OSC420074j.C1.p1.fg
MKAPAGQTSKSANVTICNTGDGSGYGNLPTVFSVNQSTNWWVDTGTNVARGSTVLMGNGSHASVHGVDTVYLKFTSGKIVQLKNVQHVPSIDRNLVSGSRLSRDRFKLVFESNKGGKRYFMTLIDDATIFCYVYLLKTKDETLDYFKIYKAEVENQLDRKIKRLMSDRGGEFFSNEFDLFFEEHGIIHERTPPYSPESNGIAESKNRTMTDLVNAMLDTAGLPKAWWGEALLTSNHVLNRVPNRNKDKTPYEIWIGRKPSLSYLRTWGCLAKVNVPIRKKRKLGPKTVDCVFLGYAHHSIAYRFLIVKSEVLDMHVGTIMESRDATFFESFFPMKDTHSSSSQPSEVIPSSITPPEQTKHTHEHVTEEDVSEAPRRSKRQRTAKSFGDDFTVYLVDDTPKSISEAYASPNADYWKVAVRSEMDSIIANGTWEVTERPYGCKSVGCKWVFKKKFRPDGTIEKYKAWLVTMGYTQKEGEDFFETYSPIVRLTTIRVLLSLAASHGLLVHQMDVKITFLNGELDEEIYMDQPDGFVVEGQEGKVCKLLKSLYGLKQAPKQWHEKFDKTLTSAGFAVNEADKCVYYRHGGGEGVILCLYVDDILIFGTNLEVINEVKLFLSQNFDMKDLGVADVILNIKLIRGENVITLLQSHYVEKILNRFGYIDSSMELWLHYSGYPVVLEGYSDSNWISDVDEIKATSGYVFTLGGGAVSWRSCKQTILTRSTMEAELTALDTATVEAEWLRDLLMDLPIVEKPVPAILMNCDNQTVIVKVNSSKDNMKSSRHVKRRLKSVRKLRNSGVITLDYIQTARNLADPFTKGLSRNVIDNASKEMGLRPIEGYPEVLAGTSGRRFIAKNFLSAAWKFLAFLPGTSWQLHRFEDEDLGGKNGENRNEDEASSKGTPPHKGATIPFDYSKLTIPSHNFVSVPSGRAPQFDGTYYAAWKHKMKLHLISLHPSIWKVVCTGIDIPHDDMELTSEQEQLIHRNAQASNAILSALSSDEFNKVDGLEKAKEMWDNLQLAHEGSPAVREAKIELLEGRLGRFVMDDKETSQQMYDRMMILVNKIKGLGSVDMTNHFVVKRLLCAFGPRNPTLVSMIQEMKDFKRLTPSDILGRIVSHEMQEEEAREVRQMVKNATMIKNQEVALKVKKEEDSSCKESEDEEMAFIVKRFKHFLCKSGYGKGRKDDDKGNMQSKRACFNCGEYGHFIADCPKSNEAKAKGGKKKPERTHVAEAHMAEVWYSGDEEDPEVKPKPKSKDKVEGEASLRDVNETLQEKFVNLDKSHKDLEVQFDTLWNSTSQPNVVSNSSNPSTSNGYARCYNIDLNSCGTNIDAMQALKKENERLGTLVKYGCMKTYHSKDALYKTITAHPNKDGHGLGFSGGSPVSKRVMVNGKECLMFVREGKAPQESEVTSLVNCQGPGTSGQTGRNLRVGISVSQKFPLGSSGRFARKFRANGHAQDMTGSSGHKARRFRPEGLYYDSYVISKNSEGKVVAYFNGNYNDEYRTCVWVPKALAYSSGGSSWVVDSGCTNHMTGERSMFTSLDEESGTRENIVFGDDGKGKLGYNCLFTDEDVTVFRRDDSSVAFKGKLKGDLYLVDFDVDRVNPEACLIAKSSMGWLWHHRLAHVGMRNLATLLKGEHILGLTNVTFEKDYVCSACQAWKQVGNPHPIKNIMTTTRPLELLHMDLFGPVAYISIGGNKYGFVIVDNFSRFTWVYFLHDKSEAQDVFKRFAKQGQNLYNLTIKRRESSTSSPPPYDPPQNGIVERKNQTLIEAARAMLDEYKTSDIFWAETVSTACHAINRLYLHKILKKTSYELLSGKKPNVSYFRVFGSKCFILSKRPRSSKFSRKVDEGFLLGYESNAHAYHVFNKTSSIVEVTRDVTFDESNGSQGEQVVVHVVDDADPRQAIDSKAIGDIRPVKTQDDEEDRDQPSSSTSNSPTTSQESVDPEVPGPDDWNLRTSPGPEVLGPSARKFQAKDSQGVPTAQVDGIDAEGTVEHPDRAHVPSVHHPRIHHIVQRDHPVDNILGDIRKGVMAMQEEFNNFTRNQVWTLVERPDQNVIGTKLYQMDVKSAFLNGPLLELVYVEQPPGFEDPKLPNHMYKLHKALNGLKQAPRALGGPQRVPLLPPHLQRGNAIISMSRFDINSLMEAVQRHRVTHLFCVPPVIIALTKHGRAAAIDTVGEWDTGVEAGEEQLRDVTTLHHRPLCTMTREKRQKASQDVSGDESPPIRYTRGRLGKEKVVEGGSGSGTRTSPRFTRQSSNRPVQIRDVDSGQVMPLIQEVAGEVVVAVLGLEGHLMISL

SEQ ID NO: 20697 - protein, 559 aa, Oryza sativa
  Clone ID: TF_OSC422195j.C1.p16.fg
MSHLEGDEYLEEKGDASSTKETGSKGATIHFDYIKLNVPPHNFVSVPSGRAPHFDGTHYAAWKHKMKLHLISLHPSIWKVVCTGIDVPNDDMELTSEQEQLIHRNAQASNTILSALSPKEFNKFDGLEEAKEIWDTLQLAHEGSPAVREDKIELLEGRLGRFVMDDKETPQEMYDRMMILVNKIKGFGSEDMTNHFVVKRLLRAFGPRNPTLVSMIRERKDFKRLTPSDILGRIVSHEMQEEEAREVRQMVKNAAMIKNQEVALNAKQEEESSCEEKIQALSSQEWLWQGRKDDDKGKRQSERACFNCGEYGHFIADCPKTNEAKAKGDKKKPERAHVVKAHMVEVWYSEDEEASEDKPKPKPKDKIEGEGGIATVAFKSSSSSKECLFNNLSDDDDDSYHYSCFMAQGRKVMTQKPSHTSLDDDSSDEETSLRDVNETLQEKFAILDKSHKDLEVQLDTLWSSTSQPNVVSNSSNPSTSNGCARCYNIDLTSYATNVDAMQALKKENERLGTLVKYGCMKTYHSKDALYKTITAHPNKDGHGLGFSGGMSRPDKFIPK

SEQ ID NO: 20698 - protein, 2111 aa, Oryza sativa
  Clone ID: TF_OSC900024j.C1.p13.fg
MSDLGGKNGENRNEDGARSKGTPSPKGVTIHFDYSKLTIPPHNFVSVPSGRAPQFDGTHYAAWKHKMKLHLISLHPSIWKVVCTGVDVPHDDMELTSEQEQLIHRNAQASNAILSALSPEEFNKVDGLEEAKEIWDTLQLAHEGSPAVREAKIELLEGRLGRFMMDDKETPQEMYDRMMILVNKIKGLGSEDMTNHFVVKRLLRAFGPRYPTLVSMIRERKDFKRLTPSDILGRIVSHEMQEEEAREVRQMVKNAAMIKNQEVALKAKQEEESSCEESEDEEMAFIVKRFKHFLRKSGYGKRRKDDDKGKRQSKRACFNCGEYGHFIADCPKSNEAKAKGGKKKPERAHVAEAHMAEVWYSRDEEDPEVKPKPKPKDKVEGEGGVATVAFKSSSSSNKRLFNNLSDDDDDFYHYSCFMAQGRKVMTQKPSHTSLDIDSSDEESDNELDDVLKSFSKPAMQHLAKLMRALDSKEQSLERQEELLILEKKRNLALEEILAKESSLRNVNETLQEKFASLDKSHKDLEVQFDTLWNSTSQPNVVSNSSNPSTSNGCARCYNIDLNSHATNVDAMQALKKENERLGTLVKYGCMKTYHSKDALYKTITAHPNKDGHGLGFSGGSPVSKRVMAYFSGGSSWVVDNGCTNHMTGERSMFTSLEEEGGSRENIVFGDDGKGKLQFIIRVSIVRDDSSIEFKGVLKGDLYLVDFDVDRVNPEACLIAKSSMGWLWHRRLAHVVMRNLASLLKGEHILGLSNVSFEKDRVCSACQAGKQVGSPHPIKNIMTTTRPLELLHMDLFGLVAYISIGGNKYGFIIVDDFSRFTWVYFLHDKSEAQDVFKRFAKQAQNLYDLTIKRVRSDNGGEFKNTQVEKFLDEEGIKHEFSAPYNPPQNGIVERKNRTLIEAARAMLDEYKTSDVFWAEAMSTACHAINRLYLHKILKKTSYELLSGKKPNVSYFHVFGSKCFILSKRPRSSKFSPKVDEGFLLGYESNAYAYRVFNKTSGIVEVTRDVTFDESNGSQGEQVVVHIVGDVDPNQAIGTKAIGDIRPVETQDDQEDRDQPPRHRHPIALQVLCLLSRKFRVLLTGTSGHLQARKFRVLQSGTSGSVAVKTCQWHKVEDALGDPDWVMAMQEELNNFTRNQVWTLVERPKQNVIGTKWIFRNKQDEHGVVVRNKARLFQMDVKSAFLNGPISELVYVEQPPGFEDPKLPNHVYKLHKALYGLKQAPRACFEIGKVDTTLFTKKFKSDLFICQIYVDDIIFGSTNASFCEEFSSIMTKRFEMSMMGELTFFLGLQVKQALVGIFISQTKYVKDILKKFGMEDAKPIKTPMPTNGYLDLDDNGKCVDQKVYRSMIGSLLYLCASRPDIMLSVCMCARFQAEPKECHLIAVKRILRYLVHTPNLGLWYPKGCGFELLGYSDSDYAGCKVDRKSTTGTCQFLGRSLVSWSSKKQNSIALSTAEAEYVAAGSCCAQLLWMRQTLKDFGYNFTKIPLLCDNESAIKIANNPIQHSRTKHIDIRHHFLRDHETKGDICLTHVRTESQLADIFTKPLDEKRFCELRSFHFQIFEFSSIPLNLGLTALCSVRPEVPVTPVRNFRGSGAGNSGVLGPELPVSVQPASNLDFATVSFNHCTPTLLILVAVVIMPREKRQKLSQDVPADSSPPVRGPRGRLGKEKVGDFYSGSQIPIHSRRASSIVIRDAPRSPSPAASDSDDGGNEDEPGSESNPLRLYKTRAVDPDPKRPRVNYLKNLLKCGRDRMVDWYNSVIMGRSHPVVEMKWLDWQYMSSKNNIVFNEVRKVCERKHVADLLALQYSWNEEVIGQFYSTAFFGTTKKGLDFVKWTIQGQQYRVSMAQFAAALGLDDDDLSRPHIFVEDALSPTSTTFMYEKDAPKDCLGTTRGLRPYYRVLYSIFRWSLLPKVGDATALPGRHALLLSRMRYNKPDFSIMKLIWSEIYETVCEPKRGFIYAPYIMKMIEAKTGICYFKDNQHKPFRPHAPTTSATPTTRVTRASTSAAPSFSAAPQRSESSSPIKKALRAIFCMCAKTAKSDEGPSGTSRFFNEESSHSEESSDDEESDAPTENAPTDPNEAVDAAGQDIDSPHSGDTEIIPSDGDNDEA

SEQ ID NO: 20699 - protein, 1450 aa, Oryza sativa
  Clone ID: TF_OSC900028j.C1.p16.fg
MELTSEQEQLIYRNAQASNAILSALNPEEFNKVDGLEEAKEIWDTLQLAHEGCPAVREAKIELLEGRLGRFVMDDKETAQEMKDFKRLTPSDILGRIVSHEMQEEEAREVRQMMKNAAMIKNQEVALKAKQEEESSCEESEDEEMAFIVKRFKHFLYKSGYGKGRKDDDKGKRQSKRACFNCGEYGHFIADCPKSNEANAKGGKKKPERAHVAEAHMAEVWYFGDEEDPEVKPKPKSKDKVEGEGGVATVAFKSSSSSKERLFNNLSDDDDDSYHYSCFMAQGRKVMTQKPSQTSLDVDSSDEESDNELDDVLKSFSKPAMQHLAKLMRALDSKEQSLERQEELLILEKKRNLVLEESLAKECAKNKQLANELNLANGSLASLRDVNETLQEKFANLDKSHKDLEVQFDTLWNSTSQPNVVSNSSNPSTSNALKKENEKLCTLVKYGCIKTYHSKDALYKTITAHPNKDGHGFGFSGRSPVSKRVMVNGKECLMFVREGKAPQASEVTGLVSCQGPGTSGQTGRNLRVGVSVSQKFPPESSGRFAKKFRANGRAQDMTGSSGHNARRFRPDGLYYDSYVISKNLEGKVVAYFNGNYNDEYRTCVWVPKALAYSSGGSSWVVDSGCTNHMTGERSMFTSLDEENGTRENIVFGDDGKGKLQFIIRFSIMDDSSVAFKGKLKGDLYLVDFDVDRVNPEACLIAKSSMGWLWHHRLAHVGMQNLATLLKGEHILGLTNVTFEKDRVCSACQAGKQVGNPHPIKNIMTTTRPLELLHMDLFGPVAYISIGGNKYVFVIVDDFSRFTWVYFLHDKSKAQDVFKRFAKQAQNLYDLTIKRVRSDNGGEFKNTQVEEFLDEEGIKHEFSAPYDPPQNGIVERKNRTLIEAARAMLDEYKTSDVFWAEAVSTACHAINRLYLHKILKKTSYELLSGKKPNVSYFRVFGSKCFILSKRPCSSKFSPKVDEGFLLGYESNAHAYRVFNKTSGIVEVTRDVIFDESNGSQGEQVVVHVVGDVDPSQAIGTKAIGDIRPVETQDDQEDRDQPPSSTSNSPTSVVSAEPEVPGPIDRNLRTSPGPEVPGSTVRNLRTSGSEDVPTAQVDGIDAAGTLEVEDELGDPDWVMAMQEELNNFIRNQVWTLVERPDQNVIGTKWIFRNKQDEHGVVVRNKARLYQMDVKSAFLNGPISELVFVEQPPGFEDPKLPNHVYKLHKALYGLKQAPRAWYECLRDFLLKNGFEIGKADTTLFTKKFENNLFICQIYVDDIIFGSTNASFCEEFSSIMTKRFEMSMMGELTFFLGLQVKQAQEGTFISQTKYVKDIVKKFGMEDAKPIKTPMPTNGHLDLDENGKCVDQKVYRSIIGSLLYLCASRPDIMLSVCMCARFQAEPKECHLIAVKRILRYLVHTPNLGLWYPKGCDFELLGYSDSDYAGCKVDRKSTTGTCQFLGRSLVSWSSKK

SEQ ID NO: 20700 - protein, 1849 aa, Oryza sativa
  Clone ID: TF_OSC900207j.C1.p1.fg
MTRETLLAPRIKGATIHFDYSKLNVPPHNFVSVPSERAPQFDGTHYAAWKHKMKLHLISLHPSIWKVVCTGIDVPNDDMELTSEQEQLIHRNAQASNAILSTLSPEEFNKMYDRIMILVNKIKGLGNEDMTNHFVVKRLLRAFGPRNPTLVSMIRERKDFKRLTPSDILGIIVSHAMQEEEAREVRQMVKNAAMIKNQEVALKAKQEEVSSCEEIEDEEMAFIVKRFKHFLRKSGYGKGRKDDDKGKRQSKRACFNCGEYGHFIADCPKSNEAKAKGGKKKLERAHVAEVWYSGDEEDPEVKPKPKPKDKVEGEGGVATVAFMSSSSSKERLFNNLSDDDDDSYHYSCFMAQGRKVMTQKPSHISLDVDSSDEESDNELDDVLESFSKPAMQHLAKLMRALDSKEQSLERQEELLILEKKRNLALEESLATKCAKNEQLANELNLANGSLAILRDVNETLQDKFANLDKSHKDLEVQFDTLWNSTSQPNVVFNPSNPSTSNDCARCYNIDLNSCATNVDAMQALKKENERLGTLVKYGYMKTYHSKDALYKTITAHPNKDGHGLGFSSGSPVSKRVMVNGKECLMFLREGKAPQASEVTCPFTGQTLGSSGQNDGKFLPCKTGSSEHFVRKFRTSDESKGLTGSSWYNARKFRPEGLYYDLYVISKNSEGKVVAYFNGNYNDEYRTCVWVPKALVTNIKGPKLMTGERCMFTSLDEQGGSRENIFFGDDGKGKDCVCSACQAGKQVGSPHPIKNIMTTTRPLELLHMDLFGPVAYISIGGNKYGFVIVDDFSRFTWVYFLHDKSKAQDVFKRFAKQAQNLYDLTIKRVRSDNGGEFKNTQVEKFLDEEGIKHEFSAPYDPPQNGIVERKNRTLIEAARAMLDEYKTSDVFWAEAMSDVDPSQAIGTKAIGDIRLVETQDDQEDRDQPPSSTSNSPTSAVSAEPEVPDPIDQNLRTSPGPIPPVHHPRIHNTVQRDHPVDNILGDIRKGVTTRSRVACFCQHYSFVSSLEPTRVEDALGDPDWVMAMQEELNNFTRNQVWTLAERPKQNVVGTKWIFRNKQDEHGVVVRNKAQIVAQGFTQVEGLDFGETFAPVAHLESIRILLAYAAHHDFRLFQMDVKRAFLNGPISELVYVEQPPGFEDPKLPNHVYKLHKALYGLQQAPRAWYECLQDFLLKNGFEIGKADTTLFTKKFKSDLFICQIYVDDIIFGSTNASFCEEFSSITTKSFEMSMMGELTFFLGIQVKQAQEGTFISQTKYVKDILKKFGMEDTKPIKTPMPTNGHLDLDNNGKCVDQKVYRSMIGSLLYLCASRPDIMLSVCMCARFQAEPKECHLIAVKRILRYLVHTPNLGLWYPKDCDFELLGYSDSDYAGCKVDRKSTTGTCQFLGRSLVSWSYKKQNSIALSTTEAEYVAAGSCCAQLLWMKQTLQDFGYNFTKITLLCDNESAIKIANNPVQHSRTKYIDICHHFLRDHETKRDICLTHVRTETQLADIFTKPLDEKRLCELRSELNILDSRNIRPEVPVFLVRNFRSLSSQPANLDSSNFYFNHCTSTLLILVAVVSMPHEKRQKLSQDVPADSSPPVHGPRRRLGKEKVGNFYSGSQIPIHSRRAGSIVIGDAPRSPSPVASKSDDGGNEDEPSSESNPLRLYKTRVVDPDPRRPSVNYLKNLLKCGMDRMVSPDTMPADSQDDRFRTVVQVDWYNSVIMGRSHPVVEMKWLDWQYMSLKNNLVFSEVRKVCERKHVADLLALQYSWNEEVIGQLYSTAFFGTTKKGIEFVKWTIQGQQYRVSMAQFAAALELDDDDLSRPHIFVENALSPTSTTFLYEKDAPKDCLGTTRGLRPYYRVLYSIF

SEQ ID NO: 20701 - protein, 550 aa, Oryza sativa
  Clone ID: TF_OSC900226j.C1.p2.gm
MSDLGEKNGENGNEDGASSKGTPSTKGATIPFDYSKLTIPSHNFVSVPSGHAPQFDGTHYAAWKHKMKLNLISLHPSIWKVVCTGVDVPHDDMELTSEQEQLIHRNAQASNAILSALSPEEFNKVDGSEEAKEIWDTLQLAHEGSPAVCEAKIELLEGRLGRFVMDDKETPQEMYDRMMILVNKIKGLGSEDMTNHFVVKRLLRAFGPRNPTLVSMIWERKDFKRLTPSDILGRIVSHEMQEEEAHEVRQMVKNAAMIKNQEVAWKAKQEEESSCEESEDEEMAFVVKRFKHFLRKSGYGKGRKDDDKGKRQSKRACFNCGEYGHFIADCPKSNEAKAKGGKKKPERAHVAEAHMAEVWYSRDEEDPEVKPMPKPKDKVEGEGGVATVAFKSSSSSKARLFNNLSDDDDDSYHYSCFMAQGRKGSRWTGCTAAAHGNERPRSILSKTDGQDPSVHDRATGNDDDDVGGDVTTGGGSGVHARRRMTARRRKRRAPTGSGRHGELTGDQSSGGGATDGDGVEEEAAATFGLMTTAVLRRPTATAEGRTRTAT

SEQ ID NO: 20702 - protein, 2236 aa, Oryza sativa
  Clone ID: TF_OSC900330j.C1.p8.fg
MSDLGGKNGENGNEDGASSKGTPSPKGATIPFDYSKLTIPSHNFVSMPSGRAPQFDGTHYAAWKHKMKLHLISLHPCIWKVVCTGVDVPHDDMELTSEQEQLIHRNAQASNAILSALSPEEFNKVDGLEEAKEIWDTLQLAHEGSPAVREAKIELLEGRLGRFVMDDKEIPQEMYDRMMILVNKIKGLGSEDMTNHFVVKRLLRAFGPRNPTLVSMIRERKDFKRLTPSDILGRIVSHEMQEEEAREVRQMVKNAAMIKNQEVVLKAKQEEESSCEESEDEEMAFIVKRFKHFLRKSGYGKGRKNDDKGKRQSKRACFNCGEYGHFIADCPKSNEAKAKGGKKKPERAHVAEAHMAEVWYSGDEEDPEVKPKPKPKDKVEGEGGVATVALKSSSSSKERLFNNLSDDDDDSYHYSCFMAQGRKVMTQKPSHTSLDVDSSDEESDNELDDVLKSFSKPAMQHLAKLMRALDSKEQSLERQEELLILEKKRNLALEESLAKKCAKNEQLANELNLANGSLASLRDVSETLQEKFASLDKSHKDLEVQFDTLWNSTSQPNVVSNSSNPSTSNGCARCYNIDLNSHATNIDAMQALKKENERLGTLVKYGCIKTYHSKDALYKTITAHPNKDGHGLGFSGGSPVFKRVMVNGKECLMFVREGKAPQASEMTCPLTGQTPGSSGQNDRMFLPCKTGSSGHFVRKFRASDRPKGLTGSSGYNARKFQPEGLYYDSYVISKNSEGKVVAYFNGNYNDEYRTCVWVPKALAYSSGGSSWVVDSGCTNHMTGERSMFTSLDEEGGSRENIVFGDDGKGKVMGLGKIAISKNQSLSNVLLVNSLSYNLLSVSQLCKLGFNCLFTDVDVTVFRRDDSSIAFKGVLKGDLYLVDFDVDRVNPEACLIAKSSMGWLWHRRLAHVGMRNLASLLKGEHILGLSNVSFEKDRVCSACQAGKQVGSPHPIKNIMTTTRPLELLHMDLFGPVAYISIGGNKYGFVIVDDFSRFTWVYFLHDKSEAQDVFKRFAKQAQNLYDLTIKREEGIKHEFSAPYDPPQNGIVERKNQTLIEAARAMLDEYKTSDVFWAEAVSTACHAINHLYLHKILKKTSYELLSGKKPNVSYFLVFGSKCFILSKRPRSSKFSPKMDEGFLFGYESNAHAYRVFNKTSGIVEVTRDVTFDESNGSQGEQVVVHVVGDVDPSQAIGTKAIRDIRPVETQDDQEDRDQPPSSTSNSPTSAVSVEPEVLGPIDRNLWTSPGPEVPGSIVRNLRTSGSEDAQMDRRWMYYAHRSSTEYKEGVTEFVTFADNDRKSRMSMHMLCPCRDCKNDQMIEDKDEVHVHLIMNGFMKKYTCWTKHGEQEVPDVAAEEVLDQDVENTAAARDGMFVPSPLGGETIDLDTQCLLQCCMTLKTQRTTTEILRSLEYADLDVCPIYGASRYKRAKSEGEGSKSKRGGPAKVVWYLPIAERMKRMFANKEQAKLVRWHAEERKVDSMLTHPADLVQWRTIDRIYQEFSNDPRNMRFAMCTDGINPFGDLSSRHSTWPVLLVNYNLPPWLCFKRKYIMLAMLIQGPRQPGNDIDVFLEPIIDDFERLWNEGTRTWDAYAQEYFNLHAMLFCTINDYPALGNLSGQTVKGKWACSECMEETRSKWLKHSHKTVYMGHRRFLPRYHPYRNMIKNFNGHRDTAGPPAELTGTEVHNLVMGITNEFGKKRKVGKRKEKSTSKEKTEEHVEKQKIKERSMWKKKSIFWRLPYWKDLEVRHCIDLMHVEKNVCESLMGLLLNPGTTKDGLNARRDLEDMGVRSELHPITTESGRVYLPPACYTLSKEEKIDLLTCLSGIKVPSGYSSRISRLVSLQDLKLVGMKSHDCHVLITQLLPVAIRNILPPKVRHTIQRLCSFFHAIGQKIIDPEGLDELQTELVRTLCHLEMYFPPTFFDIMEHLPVHLVRQTKCCGPAFMTQMYPCERYLGIFKGYVRNRSHPEGSIIESYTTEEVIDFCVDYMSETSSIGLPRSHHEGRLDGVGTVGRKTIRLDRKVYDKAHFTVLQHMTEVVPYVDEHLAVIRQENPGRSKSWVRNKHMSSFNEWLKNRIARLQNLSSETLQWLSQGPEWSATTWQGYDINGYTFHTVKQDSKCTVQNSGLRIEAASDGGRRDQYYGFTTVNLANNAYKDEPFILAKQVVQVFNIVDPCNKKLHVVREGKRRIVGLENIVDEDDYNQHVHGIGQEIPLEEEEEEDEVQYACVDHEEGLFL

SEQ ID NO: 20703 - protein, 1103 aa, Oryza sativa
  Clone ID: TF_OSC900406j.C1.p18.gm
MELTSEQEQLIHRNAQASNAILSALSPEEFNKVDGLEEAKEIWDTLQLAHEGSPAVREAKIELLEGRLGRFVMDDKETPQEMYDRMMILVNKIKGLGSEDMTNHFVVKRLLRAFGPRNPTLVSMIWERKDFKRLTPRDILGRIVSHEMQEEEAREVRQIVKNAAMIKNQEVALKGKQEEESSCEESKDEEMAFIVKRFKYFLRKSGYGKGRKDDDKGKRQSKRACFNCGEYGHFIADCPKSNEAKAKGGKKKPKRAHVAEAHMAEVWYSGDEEDPDHEVKLKPKSKDKVEGEGGVATVAFKSSSSSKEHLFNNLSDDDDDSYHYSCFMAQGRKVMTQKPSQTSLDVDSSDEESDNELDDTYHSKDALYKTITAHPNKNGHGSGFRVEVMDPEHPDKPGETSGWESLSLKNSHQEVPGQWPCTRYDRKFRSQCQEVPARGKQVGNPHPIKNIMTTTRPLELLHMDLFGSMAYISIGGNKYGFVIVDDFSRFTWVYFLHDKSEAQNVFKRFTKQAQNLYDLTIKKVRSDNGEFKNTQVEEFLDEEGIKHEFSTPYDPPQNGIVERKNRTLIEAARAMLDEYKTSDIFWAEAVSTACHAINLLYLHKILKKTSYELLSGDVDPSQAIGTKAIGDIRLVETQDDQEDRDQPPSSTSNSPTSAVSAEPEVPGPIDRNLRTSPGPEVPGSTVRNLRTSGSEDVPTAQVDGIDVPGTLEHTDQAQVPPVHHPRIHHIVQRDHPVDNILELVYVEQPPGFEDPKLPNHVYKLHKTLYGLKQAPRACIMTKSFKMSMMGELTFFLGLQVKQAQEGTFISQTKYVKDILKKFGMEDAKPIKTPMPTNGHLDLDDNGKCVDQKREHHSTGILDGTDEAYSSENPPSDTYSSSEDQPGYTNDNVDIQIHREHHSTGILDGTDEAYSSENLPSDTYSSSEVGGKRLTSARGRGADRRGPPVSDREREKGGGGARAHGSAARGKGGAAAPRGGRTDGPDLPKGRSDGGGTSRPGRAGAARDGGNHGAGGAALTRRRRACGSGARRRPKATDRRRGAAARGGAAATRLSGAHAATRYGEKEKEEGEASPTTVDDGGRRRTTTTAGRAPEPPNEQKERD

SEQ ID NO: 20704 - protein, 1179 aa, Oryza sativa
  Clone ID: TF_OSC900415j.C1.p4.fg
MSDLGGKDGEIGNEDGASSKGTPSPKGATTPFDYSKLTIPSHNFVSVPSGRAPQFDGTHYAAWKHKIKLYLISLHPSIWKVVCTGIDVTHEDMELTLEQEQLIHRNAQASNAILSALSPEEFNKVDRLEEAKEIWDTLQLAHEGFPAVREAKIELLEGRLGRFVMDDKETPQEMYDKMMILVNKIKGLGSEDMTNHFVVKRLLRAFGPRNPTLVSMIRERKDFKRLTPSDILGRIVSHEMQVEEARESGYGKGRKDDGKGKRQSKRACFNCGEYGHFIADCPKSNEAKAKRGKKKPERAHVAEAHMAEVWYSEDEEASEAKPKPKPKDKVEGEGGVATVAFKSSSSSKERLFNNLSDDNDDSYQYSCFMAQGRKAYSSGGSSWVVDSGCTNHMTGERSMFTSLDEENKTHENIVFGDDGKGKLGYNCLFTDEDVTVFRRDDSSVAFKGKLEGDLYLVNFDVDRVNPEACLIAKSSMGWLWHRRLAHVGMRNLAILLKGEHILGLTNVTFEKDRVCSAFQAGKQVGNLHPIKNIMTTTRPLELLHMDLFGPVAYISIGGEAQDVFKRFAKQAQNLYDLTIKRVRSDNGREFKNTQVEEFLDEEGIKHEFSAPYDPPQNGIVERKNQTLIEAARAMLDEYKTSDIFWAEAVSTACHAINRLYLHKILKKTSYELLSGKKPNVSYFRIFGSKCFILSKRPRSSKFSPKVDEGFLLGYESNAHAYCVFNKTSGIVEVTRDVTFDESNGSQGEQVVVHVVGDVDPSQAICTKAIGDIRPVETVEDALGDPDWVMAMQEELNNFTRNQVWTLVERPDQNVIGIKWIFRNKQDEHGVVVRNKARLVAQGFTQVEGLDFGETFAPVARLESIQILLAYAAHHDFRLFQIDVKSAFLNGPISELVYVEQPPGFEDPKLPNHVYKLHKALYGLKQAPRACSIMTKRFEMSMMGELTFFLGLQVKQAQEGTFISQTKYVKDILKKFMMEDAKPIKTPMPTNSHLDLDDNGKCVDQKVYRSMIGSLLYLCASRPDIMLSICMCACFQAEPKECHLIAIKRILRYVVHTPNLGLWYPKGCDFELLGYSDSDYAGCKVDRKSTTGTCQFLGRSLVSWFSKKQNSIALSTAEAEYVATGSCCAQLLWMKQTLKDFGYNFTKIPLLCDNESAIKIANNPVQYSRTKHIDIRHHFS

SEQ ID NO: 20705 - protein, 80 aa, Oryza sativa
  Clone ID: TF_OSC422776j.C1.p6.gm
MEMELGLGRYWGVGRRRCGACAVAPAAVHCRTCDGDGGGGGYLCAGCDAEHGRAGHERVWVCEVCELAPAAVTCKADAAA

SEQ ID NO: 20706 - protein, 56 aa, Oryza sativa
  Clone ID: TF_OSC415445j.C1.p6.gm
MELRKYWGVGGRRCGACEASPAAVHCRGCGGVYLCTACDARPDHARTDHERIVVVL

SEQ ID NO: 20707 - protein, 256 aa, Oryza sativa
  Clone ID: TF_OSC403009j.C1.p11.fg
MKIQCDACESAAAAVVCCADEAALCAACDVEVHAANKLAGKHQRLPLEALSARLPRCDVCQEKAAFIFCVEDRALFCRDCDEPIHVPGTLSGNHQRYLATGIRVGFASASPCDGGSDAHDSDHHAPPMGSSEHHHHHQQPAPTVAVDTPSPQFLPQGWALQKESSPPLGFQELEWFADIDLFHNQAPKGGAAAGRTTAEVPELFASQAANDVAYYRPPTRTAAAAFTAATGFRQSKKARVELPDDEEDYLIVPDLG

SEQ ID NO: 20708 - protein, 403 aa, Oryza sativa
  Clone ID: TF_OSC23982j.C1.p10.fg
MGQDEVEVGAEKKDQELPEVEVVEEEEEEGSKKAAAGCDYCGDAAAVVYCRADAARLCLPCDRHVHGANGVCSRHARAPLCAACAAAGAVFRRGAGGFLCSNCDFSRHRHGGERDPAAPLHDRSTVHPYTGCPSALDLAALLGISYSDKAAAATAAAGGDDGGWWAIWEEPQVLSLEDLIVPTTSCHGFEPLLTPSSPKIQNSPDGKVNEEVIRQLTELANSDGGGAQIWAHREAAQAGDHQLPSWGTTTQHNTGHGNFGTANSNEVATMPTPGYENGGWDNSDYPALNDPCKVEFTYEQPPASSAEACISSFVQMSELCPSMSNGSSMEETHQTNPGNGTPMQVLPKMPEFVPCPDRNLVISRYKEKRKTRRFDRQVRYESRKARADSRLRIKGRFAKVNQI

SEQ ID NO: 20709 - protein, 427 aa, Oryza sativa
  Clone ID: TF_OSC400961j.C1.p15.fg
MAGRFGTFLMYLHWLPHTGAKATTTTSKATSFMNYNFGGNVFDQEVGVGGEGGGGGEGSGCPWARPCDGCRAAPSVVYCRADAAYLCASCDARVHAANRVASRHERVRVCEACERAPAALACRADAAALCVACDVQVHSANPLPAITIPATSVLAEAVVATATVLGDKDEEVDSWLLLSKDSDNNNNNNNNNDNDNNDNNNSNSSNNGMYFGEVDEYFDLVGYNSYYDNRIENNQDRQYGMHEQQEQQQQQQEMQKEFAEKEGSECVVPSQITMLSEQQHSGYGVVGADQAASMTAGVSAYTDSISNSISFSSMEAGIVPDSTVIDMPNSRILTPAGAINLFSGPSLQMSLHFSSMDREARVLRYREKKKARKFEKTIRYETRKAYAEARPRIKGRFAKRSDVQIEVDQMFSTAALSDGSYGTVPWF

SEQ ID NO: 20710 - protein, 223 aa, Oryza sativa
  Clone ID: TF_OSC900291j.C1.p4.fg
MENEVGCECQLCGGRRGVVFCGAHGGRLCLQCDRALHQAHGGAGDHPRAPLCDSCNAAAAELRLNDGATLCGPCAYPYAYAYPYTYTYVYTGCPTPLEMMRLLHAAPPPPPATCSLQQRGEGEELLPTLLSATATPNTATAAPMAMPPPPLQHHTTTSLIMMIRNIHKREERNRAKLRFSKQIKYACRKAGADARKRVKGRFAKASSSSSSSSSSSSSIDHRL

SEQ ID NO: 20711 - protein, 300 aa, Oryza sativa
  Clone ID: TF_OSC401495j.C1.p5.fg
MSVAAEGKEKGVGGGGGGAGAGACELCGAAARVYCGADEATLCWGCDAQVHGANFLVARHARALLCRGCARPTPWRAAGPRLGPTASLCERCVRRGGGGRGGGGGGGAAGGGGRGGGGDEEMGGEGDEEEEDEDEEVVVEEEEDEDDEDEEGEGEGENQVVPWAEEAEATPPPVASSTSSSSREAAANGANAADRVKEDQPCSTSQPSLCRYASSAHHGGGGRSDEATSSRNGGGVGGRFLASRHRKRSPSDFRRSGLAQSLIDSKLAFRFQEHCKSTFPSSSLSILPCTWQLFLRQLKQ

SEQ ID NO: 20712 - protein, 59 aa, Oryza sativa
  unsure (1)..(59): unsure at all Xaa locations
  Clone ID: TF_OSC400901j.C1.p11.gp
MEVGNGKCGGGGAGCELCGGVAAVHCAADSAFLCLVCDDKVHGANFLASRHRPPPVGGX

SEQ ID NO: 20713 - protein, 132 aa, Oryza sativa
  unsure (1)..(132): unsure at all Xaa locations
  Clone ID: TF_OSC400070j.C1.p2.np
MNCNFSSNLFEQEAGGRGFPWGSPCDGCHADSTTVHSADHVTSRHRRLQANECTPQASVLACCADAVALCTTCDAEVHSANPLAQRHQVPVLPLPVASFNXAEAAHGSEEDEVNSWLLRRGSDDRGCTLVLS

SEQ ID NO: 20714 - protein, 352 aa, Oryza sativa
  Clone ID: TF_OSC406117j.C1.p11.fg
MVRCLVENASLCQNCDWNGHSAGSSAAGHKRQTINCYSGCPSSSELSKIWTFVSDIPNVAPEPNCEQGISMMSISDSGVSNQDNAAGDSSLLDIASATLMSDLGTAGKPKSLIGSSSEAGVNLLPLATDQMAGSVDSTSAKVPYTADQDMFSKDSIYEDFCVDDVDLSFENYEELFGTSHIQTEQLFDDAGIDSYFESKEIPSGNSDEQPKLMQPVTSNAVSADSGMSIPGAKGDSSLCIPVRQARSSISLSFSGLTGESSAGDYQDCGVSPVLLMGEPPWHPPGPEGSFAGATRDDAITRYKEKKKRRKFDKKIRYASRKARADVRKRVKGRFVKAGEAYDYDPLCETRSY

SEQ ID NO: 20715 - protein, 229 aa, Oryza sativa
  Clone ID: TF_OSC401841j.C1.p12.fg
MRIQCDACEAAAATVVCCADEAALCARCDVEIHAANKLASKHQRLPLDAALPAALPRCDVCQEKAAFIFCVEDRALFCRDCDEPIHVPGTLSGNHQRYLTTGIRVGFSSVCSANADHLPPPAPKGNSKPPASGIAAAAAPKPAVSAAAQEKGSPIGFKDLEWLDDIDLFHVQSPAKGGSTAAEVPELFASPQPASNMGLYKASGARQSKKPRVEIPDDDEDFFIVPDLG

SEQ ID NO: 20716 - protein, 421 aa, Oryza sativa
  Clone ID: TF_OSC401487j.C1.p38.fg
MASAAAATGAALGARTARACDGCMRRRARWHCPADDAFLCQACDASVHSANPLARRHHRVRLPSASSSPASSPRSAAAPRAGSDDPDAPAWLHGLKRRPRTPRTKPGGGGKHDASAATVAAAAASAVPDLEAEESGIVGDTDHDVGEEDDEDLLYRVPVFDPMLAELYNPVAADDEEQQIEQKPAARVVPFSEPSPEFASGSVEADGLSGFDVPDMELASFAADMESLLMGVDEGFDDLGFLDDEKPHVKLDLDMDMDFASISPAPAPEREERKRKRPEMILKLDYEGVIDSWARDGASPWFHGERPRFDPSESWPDFPAGSRGGLGAAVTAVTGGEREARVSRYREKRRTRLFAKKIRYEVRKLNAEKRPRMKGRFVKRAAALPPLPLPRHQHPPPPPPRALPPVPMMLAPRGAHGRYRF

SEQ ID NO: 20717 - protein, 479 aa, Oryza sativa
  Clone ID: TF_OSC414184j.C1.p8.fg
MKDGGGGGGRGQQQQWPCDYCGEAAAALHCRADAARLCVACDRHVHAANALSRKHVRAPLCAACAARPAAARVASASAPAFLCADCDTGCGGDDGAALRVPVEGFSGCPAAAELAASWGLDLPGGCGGEEEEADDAFFSALDYSMLAVDPVLRDLYVPCDPPEVVVAGGGRRLKGEALGHQLAEMARREAETAHPHTQPHSDLSPRTPRRTSAAASGRLQEKQAPPPLPHAAATAAPLPYTSLLMMAPANCTELMENNRVGDEDENVLWESTAPSVPPTQIWDFNLGKSRDHNENSALEVGFGSNNGGFMIKSYNDMLKEISSGTTKDLEDIYDSRYFAAAEDIMSTNVCQLSSKNPSTRSNKRKASSCASTIDGPTTSTSHVPAASGALGGSSNDRGSALPKEISFCDQTVVPTGADQRPCTIKIDSETLAQNRDSAMQRYEKHIRYESRKLRADTRKRVKGRFVKSNGAPDDVSNGG

SEQ ID NO: 20718 - protein, 269 aa, Oryza sativa
  Clone ID: TF_OSC401779j.C1.p12.fg
MKVQCDVCAAEAASVFCCADEAALCDACDHRVHRANKLAGKHRRFSLLNPSASGRSPTSTTAPLCDICQEKRGFLFCKEDRAILCRECDVPVHTASELTMRHSRYLLTGVRLSSEPAASPAPPSEEENSSSFCCSADDAVPAPAAPATSHGGSSGSSSISEYLTTLPGWHVEDFLVDDATAEAAAAAAATSSGISANGPCQGVTRIGGLQESAGYPAWMAQQQLCCDGLVAGDASPASRERWVPQMYADQLAAGSKRSRTSTASSYSYW

SEQ ID NO: 20719 - protein, 176 aa, Oryza sativa
  Clone ID: TF_OSC412318j.C1.p1.fg
MGAGGWSARSMRWVGQGRRRSRVPGSKGRRRWWMAEAAGSSSSSSASAVVVAVVIAVVVVVWVVVRRKVRRAAARREEVLRLTRLAQEESEMAEVECARAYYSELFPSVVHATEMVDEAAWGAPPAVVPAQAEAEAEMEARAQPQPQPPVGAKGVCAVCFRPTTFRCKQCKAVKYW

SEQ ID NO: 20720 - protein, 177 aa, Oryza sativa
  Clone ID: TF_OSC18513j.C1.p1.fg
CMQIIMKSCRDTHCHYCFSEAPADVVVCPSCTIPIYCSNRCQEKAIGQMSCNQNTHLESNNNVVDIAKLSVTSTKSKTPDSKQIAEHRHECGGACWAAVLPADIVLAGRIMAQYIEKQLLVGKRSTISGPNLDLVHHYDQDSSASKFESHIYATVLFLCLQSYYKSGVSWAEDSLSQ

SEQ ID NO: 20721 - protein, 379 aa, Oryza sativa
  Clone ID: TF_OSC410441j.C1.p2.fg
MVAKRGAGACALSWDEEGEVSRGEKRRRADGDGSSDVGGGGGIGAFDALHDELVVSILADVAASAGSPADLAAAMLTCRRFRELGKHGLVLARASPSAVAVRAAAWCDDAHRFLVRCAEAGNVEASYLLGMIMFYCFENRKLGAELLGAAARRGHGEALYSMAIIQFNGSGLPKDGRNLQAGAQLCARAASRGHTDALRELGHCVSDGYGVRRSLSGGRRLLIQANFRELCAAVANGGARFAAALGRSGECKPPGPHMCLLSDYGCHVAGAAGRRAHAANAFLAGWYASRPLASGAGAAALRMCSQPTCGRPETRKHEFRRCSVCSGVIYCSRACQAMHWKVAHKSACVPMAHWLVAANAGAGNAVGAAAAAAAQMAMP

SEQ ID NO: 20722 - protein, 419 aa, Oryza sativa
  Clone ID: TF_OSC400421j.C1.p12.fg
MESNAEKLRGLTITSLDEEDDEPELPHRSPPASGGGGGGGAGYEDDDEEEEEEAEVTLGFLEKPKHPGLLLRHLFPSKAGGIPAWLDPVNLPSGNSRCCGFCGEPLQFVLQIYAPIEDNAASFHRTLFMFMCPSMACLLRDQHDQWKHRQGNPCRSVKVFRCQLPRSNAFYSSEPPKHNDSDKPLCPGAPVCHWCGTWKGDKLCSSCKKARYCSEKHQTLHWRSGHKSDCLQLISSSEASSSIFPAVGKVPASKSWPEYEIAIDYEGAFNSDSCDESNSKSLVMQRPGKPDDMMQSWMDQFEADADNKCWASFQERVSRAPKQVLRYCREENAKPLWALSAGCPSNADIPSCSYCRGPLCYEFQIMPQLLYYFGVKNEPDSLDWATIVVYTCKGSCDQNVSYKEEFAWVQLYPTTTTRS

SEQ ID NO: 20723 - protein, 400 aa, Oryza sativa
  Clone ID: TF_OSC7547j.C1.p3.fg
RRRARTAPPIPTRSGGGGGGGAGYEDDDEEEEEEPEVTLGFLEKPKHPGLLLRHLFPSKAGGIPAWLDPVNLPSGNSRCCGFCGEPLQFVLQIYAPIEDNAASFHRTLFMFMCPSMACLLRDQHDQWKHRQGNPCRSVKVFRCQLPRSNAFYSSEPPKHNDSDKPLCPGAPVCHWCGTWKGDKLCSSCKKARYCSEKHQTLHWRSGHKSDCLQLISSSEASSSIFPAVGKVPASKSWPEYEIAIDYEGAFNSDSCDESNSKSLVMQRPGKPDDMMQSWMDQFEADADNKCWASFQERVSRAPKQVLRYCREENAKPLWALSAGCPSNADIPSCSYCRGPLCYEFQIMPQLLYYFGVKNEPDSLDWATIVVYTCKGSCDQNVSYKEEFAWVQLYPTTTTRS

SEQ ID NO: 20724 - protein, 89 aa, Oryza sativa
  unsure (1)..(89): unsure at all Xaa locations
  Clone ID: TF_OSC400080j.C1.p23.gp
PTPGSAAEDEAAGLRLCSHALCGRPETRRHEFRRCSVCGVVNYCSRACQALHWKTAHKAECTPMDRWLDNAAAGAANPNAAAMAAPAPX

SEQ ID NO: 20725 - protein, 320 aa, Oryza sativa
  Clone ID: TF_OSC419993j.C1.p16.fg
MASWEEQLRDELAGRDLAVASVPGKGRGLFAARSFFPGEVVISQEPYASTPNKISVGSNCDNCFASRNLRKCSVCRVAWYCGSACQREEWKLHQLECRAIAALTEDRKKMLTPTIRLMVRLVLRRKLQDDKMANLVQLILPSFELDLKEITHTFSKFACNAHTICDPELRPLGTGLYPVLSIINHSCVPNAVLIFEGRTAYVRALQPISKNEEDSEEDALLEGYRCNDQKCDGFLLPNAVDNSEVGSMYKTIEELERKLYHPLSITLLHTRETLLKIYMELQDWQTALMYCRLTIPVYERIYPPFHPMIGLQFYTCGKLE

SEQ ID NO: 20726 - protein, 266 aa, Oryza sativa
  Clone ID: TF_OSC400648j.C1.p12.fg
MKKFPTLGNAETENAPFPFPLLSLEAAGEAGGHMECAAKGLVAEPCAGEARRRCGGCGAVAYCSRAHQTVHWGFHKEECARLAEQMSRIDMLKQFPFTFSVESPAPNHTFPSLRCFLLESFKLHQKGLWKSECICDPEVTSVKDLSKTTDWSMGSALCPCTEPEHNVSTPLTSWKDYYRWRSLPLQSPVAVLLHWDSKPHLIVAPNAGIAAYPSWIPTIEIIRKVGIPAIFTDFCEEAAHLASSCITSITGQPLRVPIQNCKFVSP

SEQ ID NO: 20727 - protein, 978 aa, Oryza sativa
  Clone ID: TF_OSC401717j.C1.p3.fg
MAEAAGSSSSSSASAVVVAVVIAVVVVVWVVVRRKVRRAAARREEVLRLTRLAQEESEMAEVECARAYYSELFPSVVHATEMVDEAAWGAPPAVVPAQAEAEAEMEARAQPQPQPPVGAKGVCAVCFRPTTFRCKQCKAVKYCSFKCQIAHWRQGHKNECRPPSTDANHDDVAELSVAKERKIEQTSASEENIAETNTAATVKNLNDKTKDMPSEVLASVEVPDDDHSVSAVKLPQSSSQVASLGSRKTESNMKPTTPVENGSYTKDLDEALVCRFQPSPPKISGSGSLINKESLIDSKKHQDCSQTSNSKKYADNNNAQAALPVAVEPKTSRTALHVEVGHSKTKAAGSDNIGVSKMVPSVLTVDKVSPVPGGRSVTPNSSKRADNIAERNSKPSEKSISTANSLATSLKKIVRQQTAPKVVRHYPSEPTHFPYELFIKLYEKVELQPFGLHNLGNSCYANAVLQCLMFTRPLTSYLLGGLHSKNCSKKEWCFMCEFEKLVGEGRQGKIALSPTGILSHLPDIGSSFGPGKQEDAHEFLRYAIDAMQSVCMKEARKSGTHRLHEETTLMQLIFGGYLRSKIRCTRCDATSEQHERILDLTVEIDGDISSLEGALERFTSTEVLDGDNKYKCSRCKSHERAKKKLTISEAPNVLTIALKRYQSGKFGKINKAIRFPETLNLQRYMSPKADDTSPVYSLYAVVVHHDIMNAAFSGHYVCYVKDTHGKWYKTDDSQVKPVSLENVMSKCAYMLLYARCSPRAPSSVRPALMAQDPARVKKDKARVNSGRWHGGGPIHQGGQMYADHMTDDLPHTYDEFGHGPYSPAESPSPSESSSIFTSSDTGSHSTDSSESTRNSTSEDMERLIFGDQVSYFDGSMFGHGENGRMTYSRSKSSLGTSSSGQEVDQYRPDEHRLQGAREGWNQGDESSSLYTNQSKHQFSSKLTEQYRRRLDGTEHDPGEANSVLLRRSARERTAQTFY

SEQ ID NO: 20728 - protein, 376 aa, Oryza sativa
  Clone ID: TF_OSC400036j.C1.p67.fg
MEPDTDKLQSLQINPNKETNLVAVFKNDYVDDEDDEDMDPQVTLGFIEEPEGPEDWHLLLPQHFPNKAGGVPAWLDPVNLPSGKSRCCDFCGEPLRFVLQVVFHLYDKLQVYAPIQCKETAYHRTLFVFMCPSMACLLLDQHEQGKDRAGEKVCSRCRKSSYCSKKHQELHWRAKHKNECHQISGSHNASAIMPDAGKVFAGNIWPEYMVVDETEKVSCFASCENRSELLMEQGQSEEDDMTASLMDQFEVDDDNRCWASFLERISREQDQVLRYCRESTAKPLWVVYSGSLTNAAKPSCIYCNGPLCYEFQIMPQLLHYFHVENEPDSLDWATIIVYTCKGSCDQNVSYMEEFVWVQLSPATTRTNQSTCPPAGL

SEQ ID NO: 20729 - protein, 883 aa, Oryza sativa
  Clone ID: TF_OSC402150j.C1.p11.fg
MATPDVILPGPSLRPMPYMRSAPSARPEYHECATCHGPAKTRCSRCKSVRYCSGKCQIIHWRQGHKQTCQQWNGFGTSSSGGLPPTENTEQMPFLSNLNSPLRGSDVHLHDMDFDTMSEPSFVTTDSYNLDTSPFLSDRSNMNKPNQFLHTSENGAAIGSYEKNDYSIDGEVPSSEILSGNKGLNNSSGSGENCGNRDVIYPLNSVVHQPNNYAPEIRKRPKASITVYESDKGVYLTSDMISSGEGPYASAAESLQRSNSSGNVTGKGNMIHKKPPYPSGSTKTAVSTNSSLQGCNGISKAGASKVEALKKPSKFLKTSLVGLINDNKRSKVLFPYEDLVKFFQYEVRGISPRGLFNCGNSCYANAVLQCLMCTKPLMIYLLLRLHSKDCNTKTQAPTLLGVVVKSLTISDFFDIDCFILLGCSKNWCLMCELEQYASTLRESGGPVSPSRILSNLRNIGCRLGGGSQEDAHEFLRHLVMSMQGACLDGLGGEKQVEASLQETTLIQQMFGGRLKSKVKCLRCYHESERYENIMDLTLEIHGWVESLQDALTQFTAPEDLDGENMYKCGRCSAYVKARKQLSVHEVPNILTVVLKRFQTGKYGKINKCVTFPDMLDMVPFVTGAGDNPPLYFLYAVVVHVDTENASFSGHYISYVKDMQGTWLRIDDSEVQAVSLNQVMSEGAYMLFYMRSFPRPPKIYIEKGLSSVPTCSKRHSSKSSKGSKQDLNHTESLFASSDQTYGIYDFRPDNGYIQDQHAALRTRNFYHTDDAFADSISTDFSDATSSEWSLFTSSDESSFTTESTRDSFSVVDYGDNAGLDPISSIFGPYYAQDHPPGSFASCTRLSPSNPQTRFLTHGTLKGGIPALELQGNICNSPKISAKAE

SEQ ID NO: 20730 - protein, 423 aa, Oryza sativa
  Clone ID: TF_OSC400964j.C1.p156.gm
GNHSPNANTNATANANAAPHHLSTAGRGGAGAWTEMRTRSGSLYRSGGGGGETAMVGQKRKRSSLPPQYATAGDCCGGGGRRKRLAGGGPDYLDELPDDLVLAVLSKLAASASSPSDLLSVHLTCKRLNGLGRHDMVFAKASPASLAVKAASWSEPVQRFLKLCADAGNLEACYILGMIRFYCLGNRSGGAALLARAAVGGHAAALYSLAVIQFNGSGGAKSDRDLRAGAALCARAAALGHVDALRELGHCLQDGYGVRRDPAEGRRFLVAANARELTLALAAAASHRPFAALPLAGGAAAGAIGCPLLSDFGWSLPEAEPHPANLFMADWWASRGVQATAKKPGLEAPAAATGDSDGGGELRLCSHVRCGRRETRRHEFRRCSVCGAANYCSRACQALDWKRAHKAQCVPMDRWLLAAGEAQ

SEQ ID NO: 20731 - protein, 81 aa, Oryza sativa
  unsure (1)..(81): unsure at all Xaa locations
  Clone ID: TF_OSC400964j.C1.p176.gp
PGLEAPAAATGDSDGGGELRLCSHVRCGRRETRRHEFRRCSVCGAANYCSRACQALDWKRAHKAQCVPMDRWLLAAGEAQX

SEQ ID NO: 20732 - protein, 858 aa, Oryza sativa
  Clone ID: TF_OSC415384j.C1.p5.gm
QQQRRPRRRNHGGGGQRRGPPQERPSAAPPPPPPQQQQRQQHAAPAPTRAAAPAPARVAATKAAAGGDGAVPQLVQEIQDKLARGAVECMICYDMVRRSAPVWSCGSCFSIFHLPCIRKWARSPASAADASDPDSSWRCPGCQSVHAVPARELAYTCFCGRRREPPNDLFLTPHSCGEPCSKPLEKADPAVKADDAAATRCPHVCVLQCHPGPCPPCKAFAPDRLCPCGKQTIVRRCADRTTPVTCGQRCDRLLPCRRHRCEKVCHTGPCGDCNVLISARCFCGKKTETLLCGEMELKGNLSEKDGVFSCSEACSHMLSCGNHACQDICHPGPCGECELMPGKVTACHCGKTRLLEKRASCLDPIPTCDKVCDKKLPCGVHRCKVTCHEGDCPPCVVRVEQRCRCGSSGQMVECYKVLEEEFRCNKPYATNLVERTGNVECTLATGLAILPLVIHHLQMEMLAQVLVVELHVDSAGGTANGDNMFEVSIIQKLPMPLQPVESDGRRVPLGQRKLSCDEDCAKMERKRVLAEAFDITPPNLDALHFGENSNASDLLSDLFRREPKWVMAIEERCKFLVLGKTRGNSSGNLKVHVFCHMTKDKRDAIRVIADRWKLSVQAAGWEPKRFITIHPTPKSKAPARILGSKPGVFVAASHPFFDPLVDMDPRLVVAMLDLPRDADVSALVLRFGGECELVWLNDKNAVAVFNDPARAATALRRLDYGSAYQGAAVFLPSSSAQPGNVWVAGQKDGVAATKSSANPWKKATASEPDPSSGDWTGVLGQAPGSVWRRGGDTVAQVMGTSNRWNALESDAATSSRPVEESKPAPRTDAVSSAGPSTAPPVSKMQPEVEVDDWEEACE

SEQ ID NO: 20733 - protein, 827 aa, Oryza sativa
  Clone ID: TF_OSC401685j.C1.p89.fg
MPFSYAAAASGSASSSRKPVPVAAAAARRPAPSPAAAAAPAPSPSNPSAVSDSDPSSYSSSGEETDLTASDPAAASVISSYLSVAGDGADLSKVGIFLSSAARRRSPPCLICFDPIRPSDPVWSCSASCFALLHLHCIQSWAHQSSSAAPSPTWGCPKCRFPYPKSQTPTSYLCFCSKTVDPAPDPWILPHSCGDVCGRRLNADRDSGCEHNCLLLCHPGPCPPCPAIVPNAMCFCGSHRETRRCSHQRYSCSGKCNKRLGCGIHRCPVDCHDGPCPPCAVRGKHKCECGETMEERLCSERVFQCKRECGGMLQCGKHSCERGCHAGKCGGCPLQGRRTCPCGKKDYPSLDCDAEAATCGSTCEKVLGCGRHKCPERCHRGSCVETCRLVITKSCRCGGLKKEVPCYQELTCERKCQRLRNCGRHACRRRCCEGDCAPCPEVCDKRLRCGNHKCLSPCHRCHGPIAPPNPEFTLKPIKRKKGKHIDSTPGTPCPPCQEVVLVPCFGHHLGQERAILCSKRRQFPCQNLCGNPLNCGNHYCTKACHVLQIPLSQPEGDQSAILSLASASAFAEPCEECNLPCQRVREPPCSHPCPLPCHLNDCPPCKALVKRPCHCGAMVHAFECMYYNNLNATKQQKVRSCGGPCHRKLPNCPHLCSEICHPGQCPSVDQCMKKVNVRCACNNLKKEWICQDVLKEYRQSGRDPKQIPKNQYAVGLLACGEDCVKKVKAADSELHLRKIQEIKTPAVEVENVPKRRKRRNRGQESVESSKFQEIKAVALKFLLVIFLCIIVVAGLYLLWKGVYRLSDWMNDMEEQRARQRHLKPGRL

SEQ ID NO: 20734 - protein, 848 aa, Oryza sativa
  Clone ID: TF_OSC101038j.C1.p1.fg
MALSASAAASAGRGARAEKVGRIFERFDANGDGGLDRDEMAALVVAVNPRVKFSEDQISAILDEVFRTYAEFILPGGRGLSLPGLLRTYDDGAGDVDRDFLALSLPPLESGESSPEIAAGDPAAASSPPSGAAAAASLLDDHIKPLGAAGGAPSSSSRAAAAAPAWATSPSHGIAFDSSWALLDDLEILVKRLRSKQLRRTSSIDTINGSGGAGNNNFDSFSEAGWSREISGQADSASTAAPWDETSRDYLTFVKELAVLRTRADASRSREEAFDNHMVIGRALSEHRLFRDALSSFRRACELQPTDVRPHFRAGNCLYALGRHSEAKEEYLLALEAAEAGGSQSADILPQIHVNLGIAMEAEGMVLGACEHYREAAILCPSHARALKLLGSALFGVGEYRAAEKALEEAIFLKPDYADAHCDLGSALHAIGDDDRAVQEFQKAIDLKPGHVDALYNLGGLNMDAGRFVRAAEMYTRVLSIRPNHWRAQLNKAVALLGQGESEEAKKALKEAFKMTQRVEVYDAISHLKTLQKKKPKPPKGKDDSQGEEAFVVVEPSKFKRVGRKTTLRQDLANALDIRAFEKTTKLGRCDAELLRKEMNETDVPISYSGAGNPEKSIRKAALEVILHRLLSFLKPDTFQGSVKAINERILSVLDASGSGRVDLGMFFAIIAPICSGPVDKRKRVVFDALLWRPASEGSRGQIRRSDALSYIKLLRAVYIPTHGASDMLEMHGESDPTMVSYTEFLEMFNDPDWGFGILSTLVKLEDSDHIRHGRHTCSICRYPIIGSRFKETKHSFSLCNRCYSEGKVPSAFKLDEYRFKEYGNESEALIDKCMCFNLHSKKLEADT

SEQ ID NO: 20735 - protein, 956 aa, Oryza sativa
  Clone ID: TF_OSC100588j.C1.p12.fg
MLPSGLAVAPPPISLHAAASRTGRQRCLIVLDNVWTVSTWNVVRHALQEDCCSRIVVTTEINDVAQAWSFYKSQHNASHVIKKHILKMEPLNDDFSRDLLVSRVFGDKDKCPEELNEVSYEIARKCGGLPLATIAAASLLLSRPDKPDEWIYVQKSLIPDLRIQPTSEGMAQLLNNSFNNLPHHLKACMLYLSIYKEDHIINPDDLVKQWVAEDFVSATEGKSLDEAARNHFYELVHRGILETEHISCSDEVVSCTVHDMVLNFIKRKAMEENFVTAIDHSQSGIRLADKVRRLSLHFGYSKDAKAPACIRLSQLRSLVFSGFWKCGPSISEFHLLRVLFLHGKHGEFLDLTRIRELFLLTYLQIEGNVCIDLPSELQGLKYLRTLHIGAMVTFLRSEVVHLPPLLHFRLPPNLGYFVDAGSVQSIEELTNLQDLQLACPQIATSDHIKHNMKLLGSIIGILKSLKSLTVVPVCFSEDSNDNENSSIAIFLDFLDKVPPPCSLLQRLELFPRVCVFHRLPSWIITIEKLCILKVAVMELLRKDIETLSMLNALTVFSLYVRTTPAEPIIFDKSGFHVLKYFKFKCSTVSSLRFDEGAMPNLQRLKMEFNGSTVEQYNLENVGFKHLSGVKVSAKICIAGTSEANRMAIASVLNNAIRQNTRISSVIIRFINRVIKDLPIVPTPHTDHMHENLRLDKSVRSWPTQCDGCKELGAGHRFKCEQCNSKVYYDMCCATAPHTLKHPLFPGSVFRFLRKPLASECGRACDACGDLMHGFVYHCFERGLDLHPRCARLPVRTANVKGYVMELRRVSACSRCCICMCGKEGYRNKFWSYRSSQEGQDINVHMACLKDLASKSHETLTKLYEILMGESQWTPTEVLGEDTSDQLVVSSAEDGDRTPLRQDEITEEFQHKDEVCNVLEHGREELRKKETDTRVKIAKTNSMWFSYHTVDNLTCAF

SEQ ID NO: 20736 - protein, 807 aa, Oryza sativa
  Clone ID: TF_OSC102172j.C1.p5.fg
MLPSGLAVAPPPISLHAAASRTGRQRCLIVLDNVWTVSTWNVVRHALQEDCCSRIVVTTEINDVAQAWSFYKSQHNASHVIKKHILKMEPLNDDFSRDLLVSRVFGDKDKCPEELNEVSYEIARKCGGLPLATIAAASLLLSRPDKPDEWIYVQKSLIPDLRIQPTSEGMAQLLNNSFNNLPHHLKACMLYLSIYKEDHIINPDDLVKQWVAEDFIEGNVCIDLPSELQGLKYLRTLHIGAMVTFLRSEVVHLPPLLHFRLPPNLGYFVDAGSVQSIEELTNLQDLQLACPQIATSDHIKHNMKLLGSIIGILKSLKSLTVVPVCFSEDSNDNENSSIAIFLDFLDKVPPPCSLLQRLELFPRVCVFHRLPSWIITIEKLCILKVAVMELLRKDIETLSMLNALTVFSLYVRTTPAEPIIFDKSGFHVLKYFKFKCSTVSSLRFDEGAMPNLQRLKMEFNGSTVEQYNLENVGFKHLSGVKVSAKICIAGTSEANRMAIASVLNNAIRQNTRISSVIIRFINRVIKDLPIVPTPHTDHMHENLRLDKSVRSWPTQCDGCKELGAGHRFKCEQCNSKVYYDMCCATAPHTLKHPLFPGSVFRFLRKPLASECGRACDACGDLMHGFVYHCFERGLDLHPRCARLPVRTANVKGYVMELRRVSACSRCCICMCGKEGYRNKFWSYRSSQEGQDINVHMACLKDLASKSHETLTKLYEILMGESQWTPTEVLGEDTSDQLVVSSAEDGDRTPLRQDEITEEFQHKDEVCNVLEHGREELRKKETDTRVKIAKTNSMWFSYHTVDNLTCAF

SEQ ID NO: 20737 - protein, 576 aa, Oryza sativa
  Clone ID: TF_OSC100588j.C1.p17.fg
MLRTPDLGDPPVAEITHPFHPHKLRLADNVTDGHWPFRCGGCKELAAGRRRYRCEPCDLTLYTCCATAPLTLEHPLLPGRHFRLLERPPPPPPWLAADDRGGGGWRPACDACGDLLRGDGFAYHCADGHGLVGLNLHPRCARLRLPVAAARGAAAVKLCRRAAPRRRCGVCMSGEDGYRHGFWTCRFRRSGGDELVDVHLSCLKELMSHSHETLTNLYEILMEDGTPTNDCGEGASAQDNSSYSGESNGDAEEFENQNGTNNGMVPEMKTITHPSHPEHKLRMVTTTGEAPFKCDACKEPGDGPRYHCLTCEDLNMHKFCAHAPSTLYHHLFGRTFELLAKPPQGRPEKPHPAATGGGRGESGGRWCDTCGDHVFGLVYHCSGANLDLHPCCASLQELPVQNRETLDQPKESLATPQKLVKEGLAKITIDGVAFDIAAFSKCSLCSRQEEEGPDHCCRRLRRQEQWCYYNSDVVDGGGEAVSLHVSCIKQIARRRWQAARDMKCGGQIMLAISEEMIGEGGPLHGIPSERDRNIVGAVVRVIIAVIFGDRTAMEGDISSWVALGLPWLTNLFTVQR

SEQ ID NO: 20738 - protein, 1258 aa, Oryza sativa
  Clone ID: TF_OSC100588j.C1.p21.gm
MADRNEEQILYDTIAEGSSQNWNEEEGNKDPNQYLNEEGSVERDAEGNQEGHVERDVEGNQEEEASGSQPSVGQKRGRGQRGATKKLEGRHIITEVDEDGRPSAPAEAAKNYVRHSGWVARDNVPVSTVYWRRTRARGDHESFVPDSEKEMLWTTMLETFTLPAGTEDKVKRWTLKKMAEQFRSFKGDLYQKYILKGQTPNFDTFPKLRDHWDEFVAYKTGEQGQAMMERNKENAAKKKYHHHLGSGGYSVAMPKWEEMEASLLERGIEPATANWPERSKFWYYAHGGMLNPADGSLTPEHPGRTRGKGVIPWKIGFKEDIHTYRSRMRSKRDTEAKIADLEFRVSSYELSMQEEVARKVDECMAAHRSHDPQPTIPPAMDESTCPVDDITQRTPCELHIPFKNLSIKVASGMAIPTDPSGTYHCRPIAAGYSKVEVELVEDAYEDLELDYPGGDGSSTVSSSCSSTVSTSGSCTDSSLGSCTDSSSGSCTDSSLGSSSGTFQVKGNPSSTACPHKGNKEGEKVNRQFKPRSPEKKIPIDPSVRNFFRGMSAPAKEAIKLSDYERTLKKASSGKSKPVPQLGEQPNQEIEPLVTGEDFGIQEFINDTGLTTDQLLGDAPIEKAEVKYMYELGKPLVKPELLQSLPTQMYKFHQLYMEMSATGREMIGARIRDTDFLQGDDILWINFKGIYELYQLDALDVRKENDNHMLRTPDLGDPPVAEITHPFHPHKLRLADNVTDGHWPFRCGGCKELAAGRRRYRCEPCDLTLYTCCATAPLTLEHPLLPGRHFRLLERPPPPPPWLAADDRGGGGWRPACDACGDLLRGDGFAYHCADGHGLVGLNLHPRCARLRLPVAAARGAAAVKLCRRAAPRRRCGVCMSGEDGYRHGFWTCRFRRSGGDELVDVHLSCLKELMSHSHETLTNLYEILMEDGTPTNDCGEGASAQDNSSGESNGDAEEFENQNGTNNGMVPEMKTITHPSHPEHKLRMVTTTGEAPFKCDACKEPGDGPRYHCLTCEDLNMHKFCAHAPSTLYHHLFGRTFELLAKPPQGRPEKPHPAATGGGRGESGGRWCDTCGDHVFGLVYHCSGANLDLHPCCASLQELPGLAKITIDGVAFDIAAFSKCSLCSRQEEEGPDHCCRRLRRQEQWCYYNSDVVDGGGEAVSLHVSCIKQIARRRWQAARDMKCGGQIMLAISEEMIGEGGPLHGIPSERDRNIVGAVVRVIIAVIFGDRTAMEGDISSWVALGLPWLTNLFTVQR

SEQ ID NO: 20739 - protein, 845 aa, Oryza sativa
  Clone ID: TF_OSC101306j.C1.p1.fg
MSGRSSPMYEGLASRPDEWDVVLKVKYGETLKRFGGYVQGPQFSLNLSALRSKIASAFKFGSDVDFILTYTDEDGDIVMLDDDDDLHDAAIHQKLNPLRINVQLNNSHTAAPQAKQQDSDNIPLRSTTTEDPLAHIKSVIDEVLKPISMKSIQEPVPETLAKLSHEVLEAASPQLAELIKPFVKLVTPSNNNPSNGHADGSCSSSTGLPQTQVDPKTNDEPKIDTSLGSQPLDTQNSKSSGARGLKTLSVEAPATSGVKSSQGQQASLYPSIEELLFSPFLPNSGDDKSASKGISDAQSKGKSVMTSATPPTPPAAPAFRPAPPIPSLNDWSQPPARGSTFYPSIWQSEADPKANSDSRWRVPLCRAGHPFQPHAPLSRPPPPMPAPMSYGPSPHFPYPGRLLSSGHLHGDLGNNIENSPARTFHRWIQCDGCGVQPIVGPRYKSKTKEDYDLCDACFHRMGNEVEYTRIDKPLLPQRLLRDPTLCRKIHSRAAMKSKREKLESRFILDVTVLDGTLMAPSTPFTKIWRMHNNGSIMWPLGTQLIWVGGDQFALQTYVPLEIPVDGFPVDQEIDVAVDFVAPARPGRYISYWRLASPSGQKFGQRVWVHIQVEDPSFVSNNRTAAINLNLPPESNITNTSNLIDVNIEPVDQVFNQHVNSTNKELLEHLIHHQIDEPKNPEPAPLPVPIVSSTTSLHPIIDVDVPSSSTAAAFVPVFDEPAPEPAVTPVPPTVNVPAGNAPASVGASSSDHHGIDNLTEEKLLKELEEMGFRQVDLNKEILRQNKYNLEQSVDDLCGVSEWDPLLEELQEMGFEDTEINKEMLEKNGGSIKRAVMDLIAREKKDQ

SEQ ID NO: 20740 - protein, 5033 aa, Oryza sativa
  Clone ID: TF_OSC900328j.C1.p15.fg
MRKNNQLPVSTSDPSIPFGFENNMKCEVSTVVELSVPPSFIEGRYTFVLVEQVESTVVEIVERSLEFCLLYLEKSSYACEDYGLLNEVAYFMECVLLRGTPSKVYSLEPSVVNDVIEQWSSVQVDSERISPQEKYFCYLKGLWNVGALFADCFLMAQPGFNCSNSGDDLQRFRLTLSPECLQQDYVIAENTESSHTASPNGMVSIAQHFAVVHLHCIPVLLTLVQKLCQSPALDVIEDTNFNMRLSFGQRILKLVHGLAMEFPCDASDAMMLCSVARCTDSLPVLFKLKFKFANHDRVFSGDGVGTVLLQILDEFLQLIHIIFCNSDICCTVQVCILASLLEIFSPEKWKYDRSAACLMPPLVYSPHIVQYVLKLLNDTKRWTSRVDRDRPGKDVLGYSCNSETDGLSCHARSKKVPLLKKYTSEEYLQLIFPSEEQWLDDLVHLIFFLHEEGVKSMPLLEKPQMSCTKQVTLSELESVASHEEEALFGNLFAEARSTGVADSVEQPISLGSGPSSSQHGPIQLAADLICFMKMSIFSPEWCTAIYVDACRKFHSNHLEQFLSILQCPAFCSDESIATTSLSEVNSLHINTACFELLQMFLISHECPASLREDLVDKVFNAENGMYTYNNYTLALVARAIISGASSIYNLGRKVFVQYVGYLLEKANDKSSSSLDLNNFCRILPCAFHLEILLVAFHSTTGPEKADLINIVLSSLEKMRQPPLGVNASGLTRWALLLSRLLLVLRHMLLYPVTHPSWLLMRLRSRMRDILLKEGQSRSMNDYLPSFTAEVVEGIFADTVKEYASTSSLFPQLIDVTPAHAEIYFDKSALEALGLNFANLGSNISEILGVWKGRKAEVAEDLIAERYLFLICWSTLSGIGYSGGYEGLLNPDFADVNFFISFALSVSDDASSLLDANLPSVIFGFLKLLQSEILCGPSVLESWDFLRKGAWLSLILSLINTGFWGHQTSGKPDVDLQGKQVVQDAEIFGKSLLTFISENSGHCLHVLSSLLETYLHAFKEAFISFVVEKGRVCEDHCYPSWLLKHSAFDKSKHPLLFEKVGSNIGMLEPICDLSSRIDRVATKLGDGRKEYFLLKCLLHGFPVNSASNNSAILSCVLVINEIIYMLNGCIKIMQPNDRDLVDVGVISKLLSMIMTIKSDGMFTSIHKLCDSIFMSLIDQKDDLAGYSDLFVLKQLEGYLADINSKEIMDNEVKEIIVFTIVDLVEDLRSKTNVFKFFLGEAEGAPERANSLFALEQADMSVFIDVLDKCQSEQVNLKILNLFTDILGDGLCPDLKQKLQHKFIGMDVSCFSSWLEFRTLGHSMKIESTNSTTSGPTALRELTMDFLMRLTCPSSETLAKELQHHLFDSMLLLLDKAFMSCDLQIVKAHFHFIAQLSTDESHFKELFEKTLKLMENMVGNEGLLHTLKFLFTCVESVFGDAGSNRSALKRLSSKSSGNSFGSGSLIPKQLKNSDSLVLRTNQESNSTVDCDASSGEEDEDDGTSDGELVSIDRDEEEDGNSERALATKVCTFTSSGSNFMEQHWYFCYTCDLTVSKGCCSVCAKVCHQGHRVVYSRSSRFFCDCGAGGVRGSSCQCLKPRKFTGTSSVSPPVTSSFQPILPYHEDVEPVADSGSDFEDDISTEAENCIKLSVPKGFSDELPVFLKNLDVEVRMLELCKKLLPMILSQRELNLLKDRKVFLGGEMPMSQASDIFQLKKAFKSGSLDLKIKADYPNSRELKSHLANGSLTKSLLSISIRGKLAVGEGDKVAIFDVGQIIGQPTAAPITADKTNVKPLSRNIVRFEIVHLIFNPLVEHYLSVAGYEDCQVLTLNSRGEVTDRLAIELALQGAYIRCVEWVPGSQVQLMVVTNKFVKIYDLSQDNISPLHYFTVADDIIVDATLVPSSMGKLVLLVLSEGGLLYRLNVALAGDVGAKTLTDTVLVKDAVSMHKGLSLYFSSTYRLLFVSHQDGTTYMGRLDGDSSSITELSYICENDQDGKSKPAGLYRWRELIAGSGALACLSKFKSNSPLAVSLGPHELFAHNMRHASGSNAPVVGIAAYKPLSKDKAHCLLLYDDGSLNIYSHTPNGSDSSTTLTAEQTKKLGSSILSSRAYAGTKPEFPLDFFEKTTCITCDVKFNSDTTKSSDSESIKQRLSSDDGYLESLTSAGFKVTISNPNPDIVMVGCRIHVGNTSASNIPSEITIFHRVIKLDEGMRSWYDIPFTTAESLLADEEFTIVVGRTFDGSSIPRIDSIEVYGRAKDEFGWKEKMDAALDMEAHVLGGSSASGKSGKKAQTMQAAPIQEQVLADALRILSRIYLLCQPGFCTDTIDADMELNNLKCRSLLETIFQSDREPLLHSAACRVLQAVFPKKEIYYHVKDTMRLLGVIKSLPSITSRIGVGGAASSWVTKEFIAQIHTVSKVAVHRKSNLASFLETHAVAILNVTRKLGYAECLALHSNEKSGVSVAPAVALLKKLLFAPYEAVQTSSSLAISSRFLQVPFPKQTMIANDDAPDNHAKASAASNSTTGNAQVMIEEDPATSSVQYCCDGCSTVPILRRRWHCNICPDFDLCETCYEILDADRLPAPHSRDHPMSAIPIELDTFGGEGNEIHFSVDELTDSSVLQAPADRTIQTSPSSIHVLDASESVDFHGSMTEQRTVSISASKRAINSLLLSRLIEELSGWMETTAGTRAIPIMQLFYRLSSAVGGPFMDSTKPENLDLEKFVKWLIDEINISKPFPAKTRCSFGEVSILVFMFFTLMFRNWHQPGTDGSHSKSGGSSDLTEKGPVHVQVSTTTLQSSNDDHDKNEFASQLIRACSALRQQSFLNYLMDILQQLVHVFKSSSINGEGGSSSSGCGSLLTVRRELPAGNFSPFFSDSYAKSHPTDLFMDYYKLLLENTFRLVYSMVRPEKEKSADKDKSCKVPNTKDLKLDGYQDVLCSYISNAHTTFVRRYARRLFLHLCGSKTHYYSVRDSWQYSHEVKKLHKIINKSGGFRNPVPYERSVKLIKCLSTLCDVAASRPRNWQKFCLKHTDLLPFLMDNFYYFSEECIVQTLKLLNLAFYSGKDANHNAQKTESGDIGSSTRTGSQSSDSKKKRKGDDSSEGSSEKSCMDMEQAVVVFTGKDGDVLKRFVDTFLLEWNSTSVRHEAKSVLFGLWYHAKSSFKENMLTTLLQKVKYLPMYGQNIIEYTDLMTCLLGKANDSTAKQSDTELLNKCLTSDVVSCIFDTLHSQNELLANHPNSRIYNTLSCLVEFDGYYLESEPCVTCSCPDVPYSRMKLESLKSETKFTDNRIIVKCTGSFTIQSVTMNVYDARKSKSVKVLNLYYNNRPVTDLSELKNNWSLWKRAKSCHLTFNQTELKVEFPIPITACNFMIELDSFYENLQASSLESLQCPRCSRSVTDKHGICSNCHENAYQCRQCRNINYENLDSFLCNECGYSKYGRFEFHFMAKPSFSFDNMENDDDMRKGLTAIESESENAHRRYQQLMGFKKPLIKLVSSIGEQEIDSQQKDAVQQMMVSLPGPTGKVNRKIALLGVLYGEKCKAAFDSVSKSVQTLQGLRRVLMTYLHQKNSNDTDALPACSIPRSPSSCYGCSTTFVTQCLELLQVLSKHATSRKQLVSAGILSELFENNIHQGPRTARTLARAVLSSFSEGDADAVQELNNLIQKKVMYCLEHHRSMDISQSTREELLLLSETCALVDEFWEARLRVAFQLLFSSIKVGAKHPAISEHIILPCLRIISQACTPPKSDSGEKEPGMGKSSLMQAKNDDTVGHSVTNLSTSKTQSELSGKIPDGSRRRQDISLLSYSEWESGASYLDFVRRQYKVSQAVKGLQKTRHDSQKSDYLVLKYGLRWKRRACRKSSKGDFSKFALGSWVSDLILSSCSQSIRSEICTLISLLCPSNSSRQFQLLNLLMSLLPRTLSAGESAAEYFELLGTMIDTEASRLFLTVRGCLTTLCSLITKEVSNVESQERSLSIDISQGFILHKLVELLNKFLEIPNIRARFMSDNLLSDVLEAFLVIRGLVVQKTKLINDCNRLLKDLLDSLLVESTANKRQFIRACISGLQKHVKEKKRRTSLFILEQLCNLICPVKPEPVYLLILNKAHTQEEFIRGSMTRNPYSSAEIGPLMRDVKNKICHQLDLIGLLEDDYGMELLVAGNIISLDLSISQVYEQVWRKHHGQTQHSLSNASQLSAAASSVRDCPPMTVTYRLQGLDGEATEPMIKELEDEREESQDPEVEFAIAGAVRECGGLEIILSMIQSLREDELRSNQEELGSVLNLLKYCCKIRENRCALLRLGALGLLLETARRAFSVDAMEPAEGILLIVESLTMEANESDISIAQSVFTTTTEETGAGEEAKKIVLMFLERLCPPDGAKKSNKQQRNEEMVARILPNLTYGEPAAMEALVLHFEPYLMNWSEFDQLQKQHEENPKDETLSKNASMQRSAVENFVRVSESLKTSSCGERLKEIILEKGITKAAVGHLRESFASAGQASFRTSAEWTVGLKLPSIPLILSMLKGLAKGDLPTQKCVDEEDILPLLHALEGVPGENEIGARAENLLDTLANKENNGDGFLAEKIQELRHATRDEMRRRALKKREMLLQGLGMRQEFASDGGRRIVVSQPIIEGLDDVEEEEDGLACMVCREGYTLRPTDMLGVYAFSKRVNLGATSSGSGRGDCVYTTVSHFNIIHYQCHQEAKRADAALKNPKKEWDGATLRNNETLCNCIFPLRGPSVPPGQYTRCLDQYWDQLNSLGRADGSRLRLLTYDIVLMLARFATGASFSTDCKGGGRESNSRFLPFMIQMASHLVDGSANQQRHVMAKAVTSYLSSSPSTPESPVRLSALSGARGGSGSSEETVQFMMVNSLLSESYESWLQHRPAFLQRGIYHAYMQHKHGRSTLKLSADTSSSAVRSDEGSSADSNDSKRLFAIVQPMLVYTGLIEQLQQFFKKGKSSGTQKVGEKDGSSGGNLEAWEIMMKEKLGNMKEMLGFSKDVLSWLEDMTSSEDLQEAFDVMGALPDVFSGGHTTCEDFVRAIIHGAKS

SEQ ID NO: 20741 - protein, 881 aa, Oryza sativa
  Clone ID: TF_OSC401213j.C1.p57.fg
MSRRRDAAPTAREGERDLVVKVKFGGTLKRFTAFVNGPHFDLNLAALRSKIASAFKFNPDTEFVLTYTDEDGDVVILDDDSDLCDAAISQRLNPLRINVELKSSSDGVHQTKQQVLDSISVMSTALEDQLAQVKLAIDEALKFVPEQVPTVLAKISHDLRSKAASSAPSLADLLDRLAKLMAPKSKMQSSSGSADGSSGSSSGRGQTLGSLNIKNDTELMAVSASNPLDMHNSGSTKSLGLKGVLLDDIKAQAEHVSGYPYYVDTLSGWVKVDNKGSTNAQSKGKSVTSSAVPQVTSIGHGAPTVHSAPASDCGEGLRSDLFWTQLGLSSESFGPNGQIGGDLNSTCPPPPLFPRYPLQSLRADKSSIKGGCSYPPCICKSSTSKPENLSHYPVQSLQADRSLKGGHYFPPCTCKSNTSKPDNLSPVGLYGPYSEGSSCNRCPYRDLSDKHESMAQHTLHRWIQCDGCGVTPIAGSRYKSNIKDDYDLCNTCFSRMGNVNEYTRIDRPSFGSRRCRDLNQNQMLFPHLRQLHDCRFIKDVTVPDGTVMAPSTPFTKIWRIHNNGSSMWPYGTCLTWVGGHLFARNSSVKLGISVDGFPIDQEIDVGVDFVTPAKPGGYVSYWRLASPTGQMFGQRVWVFIQVEHPVKTSSNKQSAAINLNMPPEGSNTEWKHSVDANIQSADIVGKYSGSTITDPLAHALYHEATKPMEPELVSSAVPSVPRAFESVLVPATDLLTSSAGAEKASKPAATPGPAPQAVPLPKPVSIPASGPAPAPVSATTAAPVGAAAAPISEPTAPAAAIGMPSATARAASCLPTEPSSDHISAVEDNMLRELGQMGFGQVDLNKEIIRRNEYNLEQSIDELCGILEWDALHDELHELGI

SEQ ID NO: 20742 - protein, 152 aa, Oryza sativa
  Clone ID: TF_OSC100588j.C1.p14.gm
MPNLQRLKMEFNGSTVEQYNLENVGFKHLSGVKGYKRSWPTQCDGCKELGAGHRFKCEQCNSKPLASECGRACDACGDLMHGFVYHCFERGLDLHPRCARLPVRTANVKGYVMELRRVSACSRCCICMCGKEGYRNKFWSYRSSQEGQDINE

SEQ ID NO: 20743 - DNA, 4613 bp, Oryza sativa
  Clone ID: TF_OsC259_1
atggtggtttcccccaccgtttgcaatgtgaagttggggcgtgtcctcatagacgggggtgcaacccccccctcccctccacagccgcgttcgcatccgccgccgcagccgcagccgccgccgccgacgccgacgaggagaggaggagagggaaggcgagagggaggtaggtaggtaggcagttagccatgtcgccggcggagccgacgagggaggagagcgtgtacaaggcgaagctggcggagcaggcggagcggtacgaggagatggtggagtacatggagcgcgtggcgcgcgcggcggggggcgcctccggcggggaggagctcacggtggaggagcggaacctgctgtccgtggcgtacaagaacgtcatcggcgcccgccgcgcgtcgtggcggatcatctcgtcgatcgagcagaaggaggagggccgcgggaacgacgcccacgccgccaccatccgctcctacaggggcaagatcgaggccgagctcgcccgcatctgcgacggcatcctggccctgctcgactcccacctcgtcccctccgccggcgccgccgagtccaaggtcttctacctcaagatgaagggcgactaccacaggtaccttgcggagtttaagtctggcgacgagaggaagcaggctgcggagagcaccatgaatgcatacaaggctgctcaggacattgctctcgcagatttggctccgacccaccccataaggcttgggcttgcactcaacttttcagtgttctactatgagatcttgaactcccctgaccgtgcctgcaacctcgcgaagcaggcgtttgatgaggccatatcagaactggacagccttggtgaagaatcctacaaggacagcactttgatcatgcagctcctgcgtgacaacttgactctgtggacttcagatgccaatgatgatggtggtgacgaaatcaaggaagccgcagctccaaaagagcctggggatcagtgagatgaattcggacgccagtctgatgcaccatctgttgttgttggggcaatggacattgatgtcttcggctttcagtagctatcttctagtacacgaactgtcgtcgcaccatcgcggaggagacgatgatgttcttaaattacttaagtagttctgggtcacgcttttgttcagttgataaatgatggctggatcctggttttcttgttccacgatgccagccacaggaaaaaccctactattctgcactgttagaatgctgttatattaaccatgtttgacaagacattttcagtatgtttgtatgaccgtcttggaagtgtttggttgaacctgtctcagggtctttggtccaagacattattcacctggcttgcttaactcgttttagagaacaaaaagcgcgacgaggacaaccctcactccgcgcatccccaccctgtgtcgactcgacccgggagagagcagggaggagaggcccccgagccgaacggcggcccgaggcccccgacggtcagagctggccctctgcccgcttgtccgacggtgccaggcgcccccgacccccaggatggccccggggccactgcgggaaggccgcgcctgtcgccctctgaccccgaggtcgtcggcacagaagtcgagtgcgcccctggtggcctctcggacgaagagcgccctggagatgcggcccctggcgaagaggatcggccccgccgaaaggtgcagcggcccgtctacttcgttagtgaggccctccgggacgccaagacccgataccctcaggcccagaagatgctttacgctattctgatggcttcgaggaagttgcgccattatttcctggcgcatcgggtctcggtggttacgtcttaccccctcggccaaatcttgcataaccgagagggtactggacaggtggtgaaatgggcaatcaaactctctgagttcgatttgcactttgaaccacgccacgcgatcaagagccaggccctcgccgactttgtggcagagtggaccccagctcccgagcccgtctccgtcctcgaggccagctcgggcccctcgcagctgcctcacaccgcctactgggtgatgcagttcgacggctccctatctcttcagggcgccggtgcgggggtcacgttgacctcgctgaacggagacgtcctcagatacctggttcgcctcgactttcgggcgaccaataatatggcggagtacgagggactccttgcgggactcagggtggcagctggactggggatccgccgcctgctggtgttaggcgactcccagctggtcgttaaccaggtctgtaaggagtaccgacccccaccgggcgcctttgaagaaaggcttgcccagccgtcggcgcgacccgaccccctaggggagacggacgcgcctgaacggcccccgaggcccgtcggagtccaggcctcgggacccgatgggagcgttcccagctcccttagattgattgcttggatcgctgagatccaggcgtacctcgcagataagactctacccgaggaccgcgaagggagtgaacgcgtccagcgcatctccaagcgctacgtgctggccttgcagaccatacctctttcgtggctgtttgctgtctgggggctcgatatcctgggtccgtttaggcgggccccgggcgggttcgagtatctgtatgtcgctgtcgacaagttcactaagtggcccgaggcttatccggtcatcaagatcgataagcactccgcgcttaaattcatcaggggcatcactgctcggtttggggtgcctaaccgtatcattacggataacggcacccagttcactagtgagctcttcggtgactactgcgaagacatgggcatcaagctctgcttcacctcccccgcccaccccagaagcaatggccaagtggagcgcgccaacgcggaaatcctcaagggcctcaaaaccaagaccttcaacatcctcaagaagcacggcgactcatggatcgaggagctgccagcggtgctctgggcgaaccgaaccacgccaagccgagcaaccggggaaacgcctttcttcctcgtctacggcgcggaggcggttctcccatctgagctcaccctgaggtcccctcgggccaccatgtattgcgaggctgatcaagatcagcttcgcagagacgacctcgactacttggaagagcgaaggcggcgcgcggccctccgagccgcgcgctaccagcagagcctgcggcgctaccatcagcgccacgtccgggcccgatcactctgcgtcgacgacctcgtcctacgccgcgtccaaacgcgtgctggactgagcaagctctcaccaatgtgggagggtccgtatcgagtgatcggtgtcccccggccgggctccgttcggctggccatgggcgacggcacagagctgcctaacccgtggaacatcgaacaccttcgtcgcttctacccctatggaaccatgaatagagtacccaccagttggggttttgtttattctagggtgaacaaggttaccactttggctccggcgtttatgttgtgggtcttgtgcgggtaccgtgtgcccacgggatccgtgtgggcccagggttccccaagaggggaaggctctcggtcgctttttggagcgcaaagggccggcacgcggttgcattggcggaacggcccggttgccgtggaccgccaacgggtccgggcgagtggacatgcggggcaccaaccggtccagcaacggcgcttcgtcgtcgtcgtcaaaagattccccacgttccccgtccccaccaaagccgcgttcgcatccgccaccacaaccgcaacccgccgccgccgacgccgacgaggagaggaggagagggaaggcgagagggaggcggagcggtacgaggagatggtggagtacatggagcgcgtggcgcgcgcggcggggggcgcctccggcggggaggagctcacggtggaggagcggaacctgctgtccgtggcgtacaagaacgtcatcggcgcccgccgcgcgtcgtggcggatcatctcgtcgatcgagcagaaggaggagggccgcgggaacgacgcccacgccgccaccatccgctcctacaggggcaagatcgaggccgagctcgcccgcatctgcgacggcatcctggccctgctcgactcccacctcgtcccctccgccggcgccgccgagtccaaggtcttctacctcaagatgaagggcgactaccacaggtaccttgcggagtttaagtctggcgacgagaggaagcaggctgcggagagcaccatgaatgcatacaaggctgctcaggacattgctctcgcagatttggctccgacccaccccataaggcttgggcttgcactcaacttttcagtgttctactatgagatcttgaactcccctgaccgtgcctgcaacctcgcgaagcaggcgtttgatgaggccatatcagaactggacagccttggtgaagaatcctacaaggacagcactttgatcatgcagctcctgcgtgacaacttgactctgtggacttcagatgccaatgatgatggtggtgacgaaatcaaggaagccgcagctccaaaagagcctggggatcagtga

SEQ ID NO: 20744 - DNA, 589 bp, Oryza sativa
  Clone ID: TF_LIB3434-064-P1-K1-F6
aacttctttgtgacaatctgactctctggacctctgacaatgcgcaggattgtggggacggggtcaatgaagcggtgagttctgaatgtgacggccattaatctgttctgaatcctatttctgactccacttatcttatttctctgctggattactggatcataagtattattacgattaatcgttatgtgtttttataacatttcggttttgtacttctaaatgctgtctgttctatcacctcatgctcatccctttatctcattatattctttttgtgattcttctatcttctatcctttactcttccacctcttcctcgctcttctcccatttttttccttttcttcttccttactttctttttctcctcccttcattccttctttccctcttgccttcttccttcttctccactccccttccttttcttccctctttttcctaccttattccttttctctttccttcatcctttccttcctcccccttcactcctcttcccttcttctccctcttccctttttccttccacctctttttatctttcccttttttctcttcattcttttacttctcttcttcttcc

SEQ ID NO: 20745 - DNA, 461 bp, Oryza sativa
  unsure (1)..(461): unsure at all n locations
  Clone ID: TF_4879985
ctccctccgctcctccgctcctcgcctcttttacccgctcttccccccgatctccccggactcccacagccgcagcgaacaaatcccgcgcgggttgggaagagcgagctcgtgaggagagcagagggaaagcgcgagggggaaggaggaggaaaggtgcacaaggtcagactaagtttgcgttgaagaacaaaggagaggaaaaatgtcgcctgctgaggcatcgcgtgaggagaatgtgtacatggcaaagcttgccgagcaggcttgagcgttacgaggaaatggtcgaattcatggagaaggtggcaaagaccacttgatgtttggtgagctcaaccgtttgaggaggccgggaanccttgcttttttcttgtgggcttttaccaaagggaaccggtgatttnggtgcttccgggaggggcaattcgttgggaggggttccancctctttctatttt

SEQ ID NO: 20746 - DNA, 551 bp, Oryza sativa
  Clone ID: TF_uC-osroM202032b04b1
ttatttggcttctaacacaccaattcgtcgaacacttccgatcgtcttctctgtctccgtgtgagtattgacctcaggcgccgcgacgtctgcaagagtagtcagattcaggagatgctcgttgggtagagcggatcggagagtcactgtcacagtagcgcttctgctcttgcttctcggatcccaccacccaagaagagctttgctttgctcccgttccactgccagtgccagccatggcgccactcccaagctccagctcaacgcgggccacctctctcgtggcgatcccgggcgcctcctgcccccatggccaggcgcaacgcctgctcgccttccgttccccacgacgcgggtcacagtggcgcgggctttgcgtgtcccgggggcgccaaggtgcgaccgttgccatggcaatgacaggtcgagacgtcgtacctgcaacatgaaacgcgactactatcagtacctcgacactttaagactggagctgagaggaaggatgctgctgagaacaccatggtggcatacaaagccgctcatgatattgc

SEQ ID NO: 20747 - DNA, 704 bp, Oryza sativa
  Clone ID: TF_OsC20576_1
gaagggtgactactaccgttacttggctgaatttagcactggaactgaaaagaaggctgctactgatcagtcccttatggcctatcaggcttggccttgcgctcaacttttcagtcttcttgagataatgaactctcctgagagagctagccaagtggcaaaacaagcacttgatgaggctactgctgagattaactctgctggtgtggagggttacaaggacagcatgcttatgatgcagctcctgaaggagaacctggcattgtggacatcagaactaactggaggtgaaacatctaaggacgatgatgttgttatggagggctaactgtctgaaatgttctaaaggccccagcatgtgagcaaaacaatcagtaacattgtaacaatactgctactgaacttgcgacatttatcatgggagccgtggaaatcacctttatttttccctttcttctgtagtttctttttttttggccctcgcttgggtcttggtgtgacccccaaagtattttcagagtttggatttgataaccatgcaccagctttggttatattttgagatcttggagtggtcaccaacccagctttaatattagtttgagagtacttttttttccaatgcttgttaagcatctttgtataccaacgggatgatgaactatatatctcttaatgatgacgaaataaacgtctcttttgtt

SEQ ID NO: 20748 - DNA, 360 bp, Oryza sativa
  unsure (1)..(360): unsure at all n locations
  Clone ID: TF_11118254
gcatccgccgccgcagccgcagccgccgccgccgacgccgacgaggagaggaggagagggaaggcgagagggaggtaggtaggtaggcagttagccatgtcgccggcggagcancgagggaggagagcgtgtacaaggcgaantggcgganaggcggagcggtacgaggagatggtggagtacatggagcgcgtggcggcncggncgggggncgcctccggcggggaggagctcacggtggaggagcggaacctnctgtccgtngcgtacaagaacgtcatcggcgcccgccgcgcgttcgttagcggatcatctcgtcgatcgagcagaaggaaggaagggccncgggaacgacggcca

SEQ ID NO: 20749 - DNA, 265 bp, Oryza sativa
  unsure (1)..(265): unsure at all n locations
  Clone ID: TF_2442689
ctggtcgcccccanccactcacaggctcaactcaactccacccgaatccgcaagagagatagaganatacgatggcggcggcggcgggaggagggacgagggaggagatggtgtacatggcgaactggcggacaggcggagaggtacgaggagatggtggagttcatggagaangtggtgacggcggcggcggcgggccggggttgggagctcacggttgaggagangaacctnctgtcgtggcgtanaaaaacgttatcggcgc

SEQ ID NO: 20750 - DNA, 328 bp, Oryza sativa
  Clone ID: TF_uC-osroM202039c12b1
tctatttgcttttgcatccacaagaccactcgaacgggctctctatatccgccgacgggtctcgactaatcacttaggtggtcacaacgccccccgaggagattgtgtacatggtcaagttcgccaaccacgctcaaaggattgaggtgatccgtgagtacgtgctgcacggtggcaacactgtaggtgcccacaagctcactgtcatggaccgcacccttttggctgttgcctacatgaatgagattagggcccggcaggcctcctggctcatgagactaattctacagacacacagggtggccggcaacctggcctgaagaacatg

SEQ ID NO: 20751 - DNA, 337 bp, Oryza sativa
  Clone ID: TF_LIB4370-040-R1-K1-G5
ggtcgcccccacccactcacaggctcaactcaactccacccgaatccgcaagagagagagagagagacgatggcggcggcggcgggaggagggacgagggaggagatggtgtacatggcgaagctggcggagcaggcggagaggtacgaggagatggtggagttcatggagaaggtggtgacggcgggggccctgtgcggacctcgccagctcactgcgccggacatggagctgctgtcttctgcctacggccacgcgactgtgacgaccctttcctcggtttgcgtgctccgcgtccttgctcgccatgggtgccgccgcttaccagttctctagg

SEQ ID NO: 20752 - DNA, 314 bp, Oryza sativa
  Clone ID: TF_uC-osflcyp073d07b1
cacaaatcccgcgcgggttgggaagagcgagctcgtgaggagagcagagggaaagcgcgagggggaaggaggtggaaaggtgcacaaggtcagactaagtttgcgttgaagaacaaaggagaggaaaaatgtcgcctgctgaggcatcgcgtgaggagaatgtgtacatggcaaagcttgccgagcaggctgagcgttccgaggaaacggtcgaattcatggagaaggtggcaatagaaccacctgatcggttgtgtgagcctcaacccgttagagcgaagccgggaaacctttgccttttcttgatgggcttt

SEQ ID NO: 20753 - DNA, 149 bp, Oryza sativa
  Clone ID: TF_LIB3434-001-P1-K1-E7
tactcataacggactaccggaccgcgagctagacttacctcactacgaggtgggacggtattctaaagctgctggaatcccagcttgttccctcaaacagaggggctgcgtccacaggttcctacctcaaaatgaaaggtgactactac

SEQ ID NO: 20754 - DNA, 653 bp, Oryza sativa
  Clone ID: TF_OsC20576_2
atgaaggagagggagaaggtggtgcgactggccaagctcgccgagcaggcggagagatacgacgatatggtggaatttatgaagacacttgctaggatggatgtggatatgagtgctgaagagaggcttttattttcagttggttttaagaaaactattggtgccaggagagcatcatggagaatccttgaatcacttgagcagaaggtgacagctggtgaccaaccaggtgtaacaataaatggctacaaaaagaaagtagaggatgaactaagggcagtttgcaatgaagtattatcaattattgctattcattgccttccattggccaattcgggtgaaaatgtcgtgttcttttataagatgtaggtgcaggttttaccaaatgatgctgaggtttcatatggaactgaaaagaaggctgctactgatcagtcccttatggcctatcagcacgccatggttggtgcctgcagtgagctttctcctgcccatcaattgaggcttggccttgcgctcaactttggagacttcttgagataatgaactctgctgagagagctagccaagtggcgaaacaagcactagatgaggctactgctgagattaactctgctggtgtggtaggttacaagggcagtgtgcttatgatg

SEQ ID NO: 20755 - DNA, 741 bp, Oryza sativa
  Clone ID: TF_LIB4309-008-Q1-K1-A8
gccaatctggagaaggtggtgacggcggcggcggcgggcgggggtggggagctcacggtggaggagaggaacctgctgtccgtggcgtacaagaacgtcatcggcgcgcgcagggcgtcgtggcgcatcgtgtcctcaagatgaagggcgactaccaccgctacctcgccgagttcaagaccggagccgagcgcaaggacgccgccgacgccaccctcgccgcctaccaggccgcgcaggacatagccatgaaggagctgtcgccgacgcaccccatcagactgggccttgcgctcaacttctccgtgttctactacgagatcctcaactcgcccgaccgcgcgtgcacgctcgccaagcaggccttcgatgaagctatttcggaactggatacccttggggaagaatcctacaaggacagcaccctgatcatgcagcttcttcgcgacaatctcactttgtggacttctgatatgcaggacgatggaggtgatgaaatgagggatgcaaccaagcctgaggatgagcactagctaaagatcctagtgacagtcgtctgtctcttaaccgctgggggtagttatgatgcttgtacaaggaccattttcttgtgtcctttcgtcgggtctttgcttaccctttgtttacttatattgctatcgccatcctcatgtattatttggtactttcctgctggaatctgctcgtgtgtgggagagtgccctcagccctttactagga

SEQ ID NO: 20756 - DNA, 625 bp, Oryza sativa
  Clone ID: TF_OsC327859_1
gattttgtttatttgtattcaatcatgttcgaagattgaaatattatatacatccttttttaggggttacaggttaaattaggtttagattcgaatttcgcaagaccaagaatttactcgtccttgtcgtccttgtcgtcaccaccgtccttgtcgttgtcaccttgaccgtcgctggtccacaaagtcaagttgtctcggagcaattgcataatgactgtggagtccttgtaagagtcttcggtgaggttgtcgagctcagcaatggcgtcgtcaaaagcttgtttagcaagttggcaagccttgtccgggctgttcataatttcgtagtagaaaacagagaagttaagagcaaggcccaatcggatggggtgagtagaggccaactccttggtggcaatatcagaagcagattggtaagcacccaaagacttgtcagcggcgtccttgcggaggtctccagccttgaactcagccaatatctgtagtagtcacccttcattttgtagtagaaaaccttagcctcgttggattgagcggcggggatgaggtgcttgtcgaggacgttcaaaacgtcttggcaaatgccggaaagctccggtcttcaaccttggttctgtttgag

SEQ ID NO: 20757 - DNA, 227 bp, Oryza sativa
  Clone ID: TF_LIB3431-002-P1-K1-B6
gctgtgacgagcacacgcgtgcgcacacacatccgggtatgaagtgatggtggagtacatgtaaatggttgcgaacactgcctatgtggaagagctcactggagtggaacgcaacctcttggctgctgctgacaagaatgttaatgcagcccacagagcgtgctggcgtattgccttatccatcgtacaaactgaggaagggcgtgccaatgaagaacatgttactc

SEQ ID NO: 20758 - DNA, 290 bp, Oryza sativa
  Clone ID: TF_uC-osflcyp002e09b1
tcgttaaaatgtagactgctgaggcatgacgagaggagaatgtgtccatggcacagcttgacgagcatggtgagcgctgcaaggaaatggacgagttcattgctaacgtggcacttaccactgatgttcgtgagctcacgctggtggaccggaacctgctttttgtgtcttacaagaacgacattggggctcaggacgcattgcacaagagcatctcttctattgaccagaaggaggacagcacgtggaacgaggcctatgtggcatcaattaacgacctccagctcagg

SEQ ID NO: 20759 - DNA, 723 bp, Oryza sativa
  Clone ID: TF_14571301
tcgatttcgagcgccgcccgggcaggtacatggcaaagcttgccgagcaggctgagcgttacgaggaaatggtcgaattcatggagaaggtggcaaagaccactgatgttggtgagctcaccgttgaggagcggaacctgctttctgtggcttacaagaacgtgattggtgctcggagggcatcgtggaggatcatctcttctattgagcagaaggaggagagccgtgggaatgaggcatatgttgcatcaattaaggagtttaagtcaggagctgaggggaaggaagcagctgagaacactcttgtggcatacaagtctgcccaggatattgcactcgctgacctgcctacaactcacccgataaggcttggacttgcactgaacttctcagtgttctactatgagatactgaactcaccagaccgtgcttgcaaccttgcaaagcaggcgttcgacgatgctattgctgaactggacactcttggcgaggagtcttacaaggacagcaccttgatcatgcaacttcttcgtgacaatctgactctctggacctctgacaatgcggaggatggtggtgacgagatcaaggaagcagcgaagcctgaaggagagggccactaatctgtcctgaagtctatttctgagtccatttactcagctacctgctgtattactggatcataagatgtacctcggccgcgaccacgctaatcactagtga

SEQ ID NO: 20760 - DNA, 463 bp, Oryza sativa
  Clone ID: TF_uC-osflcyp077e11b1
gttctacctgaaggagaatgacgtcttccacaggggcattgatgtggccaagatgggacttgaactgaaggatctggttgacatcactgtagagacatacaattctgccgatgcatttgggcttactaacctgactgcaacttacatgctaaggcatgtactaacactatactactcagtgtacgactatgatatgctgaactctccagacctggattgtatacttgaacagcaagcgtccgactattgtattggtgttcttgacactgttcaaaatatggcctacttggacagctcctcgaacatacaggctatgtccatcaagctttctctatggaccgctcgcatttctgaagatgtgcgtgtcaagaccaggtgagcagagaccacattctgagatgatcaatagtctagactgacacttatgtacgcgatcgttgactcaggttcattgcagatcact

SEQ ID NO: 20761 - DNA, 279 bp, Oryza sativa
  Clone ID: TF_LIB3431-007-P1-K1-B4
cccacgcgtccgcccacgcgtccgcccacgcgttcgcccacgcgtccgcccacgcgtccgcccacgcgtccgcccacgcgtccgacctgctgtccgtggcgtacaagaacgtcatcggcgcgcgcagggcgtcgtggcgcatcgtgtcctccatcgagcagaaggaggaaggccgcggcgccgctggccacgccgtcgtcgcgcgctcctaccgcgcccgcgtcgaggccgatctctccaacttctgcgcggggatactccgcctccttgacgagcgcc

SEQ ID NO: 20762 - DNA, 334 bp, Oryza sativa
  Clone ID: TF_LIB3431-058-P1-K1-E2
ggaaggcggaggaacggtgcacaccgtcatcactaagtttgcattgaccaacatacgtatcaggaaaagcgtcgcctgctaacgcatcctgtgaggagaacgcgtacatggcatagcttgcctacccggctgagcgttacataggaaatgcgtcaattcatggatatggcggcaaacaccactgatgtgctcgagctcaccgttcaggagcggaacctgctttctcgggcttacaagaacatgacttgtgctcggatggcattgtggaggatcatatcttctattgagcaaaaggaggacagccctaggcatgcagcatctgttgcatcaatta

SEQ ID NO: 20763 - DNA, 278 bp, Oryza sativa
  Clone ID: TF_uC-osrocyp028c02b1
gcgttttcgagcccgacccgcctgggcttcgccggcaacaaagtgactcataactaggcaaaaatgcatcggcaggagaatgtttacatgggcaagctggtccagcaggttgaagggcatgaggtgatggccgtgaacatggagatggttgcatagactgtacattaagaagagctcactgcagtggaatgcaacctctcctctgttgcttagaagaatgtgattggggcccaccacgcctccagagatgtcgatttattcagtgcacactatgagga

SEQ ID NO: 20764 - DNA, 490 bp, Oryza sativa
  Clone ID: TF_LIB4309-032-R1-K1-D2
cgcccttttcgcgaggagacccacgccgaaacgcgaggtgacgcacacagagacatggatttagaggagatatgtacagctctagagaggctttatcggtgaggcagagtggggccatggccagaggagattgggaacccgggcgggccgactggacgggccgagaggtgcgaagagagggccaaactgatgactaagagaccttttttttttttctgcagacctcagcgtggtggataccagactgcgtaggggaggcctacgagcctgcgagtgcagcccgtcctgcgttgtgcagcatgatgacctccgtggtgccgaaggacgaaagccacggatacgaggacagcgtggcacgtatgagagacagccgagcaagaatcgagactgagctctccagctgttgggatggcaccttgaacctgcttgcactgcaccttggtcccatgtcctctgcccctgagtgcaaggtgtcttccctcggaacgat

SEQ ID NO: 20765 - DNA, 2207 bp, Oryza sativa
  unsure (1)..(2207): unsure at all n locations
  Clone ID: TF_OsC2845_1
ttttttttttttaaaatnttgctgatatggccgggcttaaccaatacgaagttcagaatagcagaccagataagacactaaagacaaattcaaccatgaatattgatccctgcatgtttcttgacattcgacatcagtcacctgcagctcgtcgaaatcttcaaatctcccactcatccttcctgttagatcagaaggtatcatcacaccaagtattgccctttcaatgatttcagctatgccgccgcatttcggcctttcttcgacttactcttgttttcttgtgtcttctttttcttctcttctggtgtcgtccacacataatcagcagggatgacaaatgggtcctggatgtcctctacacggctgctggggcctggagctgttgagaagttctgatggtaaggagccttgatccattgaatccaagaacttgaggaagactgcgccactgggctcttgctattgtcagggctggatggcggtgtggtgaactcctctaatggctgtagctcttcaaactttgtgaatgtcacaagtaccctgattgtgggtacaactgggatggcaaccttgactggaaaagttcctggtggcagttttgttgtaaggagatctctcaagcgacggatcgccttcaccttgttcgcaagaatatcaagcagtggcaagagctcctcagtccgaagagggaagttaggagaaagccagagaacaggccttagacctttcttgtactcgctttctttgctaccttctttgcgcctatgtccacactccgacgaagcagcaggtctccgataatccctttccttgccccttctgctctcatcccctcttactacatctaccgaatgccttcctggcctagtttgtacattcgatggagattcaataaggatatcgctcaccttctcatctacacagagcgaactccttggaggtgccatcttcttcgtcccctctagcttgctactctgaaccctctttccccaatgaccaaaccaacctttcttatcatgtttactatccccatttccggagatgctcaaatcctcaattggtatctctctctccctcggctcaacacagctatgtcgaggaccaacaaacgtgtcggactggccttcaccaccagcaccatcaggagagtccatcttaagcgcggcttccaactgcttcttctcctcttcagtcaaaacatcgtcgaagccctcgctctcggtatcgttctcgttgcaagccgagaagaattcctcgtccgtcatcgcgccggggaccctccttgatttgacactgaccatcacatggtgcatgtcatacaccttggccttccatggcccaaccgactcggtcctctcctggcgccgccatgtgagctgcgggagcagcacggcctgcgtgacgtctattccggggcggaagatgttggtctgcgacatggcggtgacctcctgctgcacctcggcctcggaggcgggcgcgccagagccttccagggcgttcatcacctccttgtccttgtggttgatcatgcagagggagcccgggggcaccttgccgtcgtcggagccctcgccgaggaagagtatggtctggtcggagcgctggatcttgaagccgtcgaagccggcgagggtcatgtcggcgcggaggttggcgccgcgcttccagacccggtaggtgtcggagggggcgatgcgggagatgaaggggatgacggagctctcgaagtggaaggtgatctccatgtagaagtcgcgcatgcggcgcatggcggcgacgacgcgggggaggcggcggcaccacttggcccaggcgagcggctggtagtggcggacgatgacgcgggcgagcgcctcctcgcgggcgcagatggcctcctggagcgcgctccacccttgctcgttttgcaggctccagtccgcgcccgccgccatcagcatctccgccgccgccgcgtcgcccaggcggacggcgaggtggagcggcgtctcccgcccggggacgtcgcgccggtcgatgaccgccgacgccgcctccgcgcgcgcctcctccgccacggagtcggcctccgtccggatctcctccggcctccgcgccctcggcagcgcgtccagcacccgccgcagcgccgcgtggtccctcgtcgccaccgcgtggtgcgcctcgctgtgcgcgtacctcgccgcgtccacaccggccat

SEQ ID NO: 20766 - DNA, 728 bp, Oryza sativa
  Clone ID: TF_jC-osroLIB3475P018b07b1
gttgtcaccttgcaatggcgatggcgtcgagcagtggagactggagagccatgttctagctcggccacgcccacgcccacacccacggcagcaaccatggatgccaaactgacggtggcaactagctagcttagctgtggtgattgccagcaactattgagcaatcaagactctaattcttcgatggtggcgtcgggcaacaacacggcagcaccgctggcgaatacgctcccggcggtcattaatcccctactgctagcaacggcctgcactggctctcccaagggactggatcttcttctcaacagcaaggttgcagcaggtgatcaacgagtgctaccattcgcacttggaagccagagatttcgtgacctgatatcagcatatacctccagcgacagatcctccttagcgacgccgacgcagcgaatccctcctcatgacgacccagaagcacttttggcagagatgctgatgctggaaggggtcgcagttgatggggacaccgtgcttcacgcggtggccacctatggcgagaatgatgactttcagaagtgtgctcaaactatgtgcagcaaggcgaggcagctcctcttcaagcaaaacaagaacggtgacacgcccctgcactgcgctgcacgggcaggtaaaatccaaatggtctcttgcctcattgatctggccagaggcggtggcggcgacggcaacagcagcagcagcagcagcaa

SEQ ID NO: 20767 - DNA, 1494 bp, Oryza sativa
  Clone ID: TF_OsC311016_1
ggcacgaggattggaggagggtagggaagcttcggtctcttcgttcgtcgtcagtggcgattcccgcaccccccctccctccggccgcaaaagtcaatgccaatgcaaacaaccgacaaaactgatgctgtgaaatctatgctttccggagagaatagtgaaggctcagatggatcaaagtcatcggacacagttgagtgggacccatgggaccctccgcatcctccttgtcctactttgccacccacagcaagccttatgagccaagtggaaatggtcaaacagcatcattttcaagtactggccgtacttgctgcttccagggccacaaatataattgccccagaccgtactcctcaggaggtgcgccgtaaatttgctgaaatatgcaatgaactggcggacatccttgaaaaggacagtgttcggagattcctcaacttgtacagaagaaatatgcgtatcatgggttggggtctggtcatcacatctcaaacaatgaacttcattgtttcattcaatgccctgcgttgtgctaaggttgtcttggagggcaaggcacctaagctttgtcagatccgtgccaaccccaactacatgactagctatgggtacttccccctccacaaagctgctgaaaaattctcagttgacatgattaagttgctgctttgttatggtgcatcggcgaatttacgcacatcaggccaaaaggtcatcgagggcctcctcccactccatgttgccattgagaacacttgcatgcacaagtatctggaggacaatctattaactgaccggaagctcaagcaagtggatcttgacttcatctacaagctcatccatctgctttgtctgcctgagatgaagattttcttggacacgacaagactgcttgcagataacacagataatattgttgatgagctatggaactacatcaaggaggggaggcttgtccatgctgctattttgctccttgcagctcaacgaaaaattcgtacctgtgcttcctctaatagaaacatcagctgtaacctgaatggatttgatattatcagggatcgtgttatgggatccatagtttccatagaaagggaagggcgtggattaacaagtggtaaaaatagcaaggcacataagcagctggaggagaagcggaaattttttcataattcattgatgctcatttttgtaatttcgaaaaccggtgaagctcttgatgagtatatccagtctcattcagaggtctctcatcaggaggtgcttgagggtgtttcatcaattctcgatgatcatggttttgctcctactggaaaagggatcagcataggagacctggaatgccgtccctatgactgcaatgcgtcgaatagtgtgccgaagtgcaactatgaagattctggtacgaccaaggcagttggagaatctcctaatctgaatgttaaagctaaaaaatctgcaccagtagttatgctttatggatttggctga

SEQ ID NO: 20768 - DNA, 1395 bp, Oryza sativa
  Clone ID: TF_OsC180673_2
atggcccgcaatgctcgctcccataattgcactgtcctggagcccagggatggcgccgccgctcggcggctacccccggtgactccacgcgtcggttcctccagggacgcggagaccggcgtctacgccttcttcgaggaggatgcgggcgagcttgatgtcgcttaggcaggtcgccgtcattctatatcgagggtgtgtgatctaacgttcctggacgactgttcatagccctgcgatgacggcttgttagcaatgagatcataaccgacggaggcgctcagcttgcacttgaaggtcgccgactattccaacgtttgaattcatgattatgcagttagtcgtcttttcatggacagtgtgaaggacctttttgcagatgtttatgttcccgaatagcctgagggtagtggatatattgcaatatagctaacagatttttgagaaaacttggctggaaaaaaaccatcgttggcttgagtgtcgccattccaagcattaaaatatgattatcaacactgtcccatggtataggaccagtggttcattcacaaccgggccagagctacccatatttattttgtgttagtacttagttgttcagtcgagtgttagtttcgggaaaagttaaaaatggacccctacttatactatggatgctatgtattgtaaaaaaaaaaaaaaaacgggaggaccgcgatgtgcgcgtacatggtcgaggagctccaggtggacatcgacgccgccgatgagttaggcataacgcaactcgatgaggctggtgctgatgttaagggtgttggtacttttacccccttaatagttgctgcaactgaaggcttaactgatttctataagtgcttactggagggtggtgctgatcctgatgtgcctgataaagttgaccctttcttcaaaataagaccagctgatctgaagttggaaggaaatagggcatacatgagaaaagactatcttactgccgcaaaactctacaatatggccgatgggcggcggcagcaggcagcggcagcgacagcagcagcactaagcggcgtcggcggcagcagcagcaacaacagcagcaccagcaccattaccaggaggcggcaccggctacaccatcggcagcatgtgacggcggtagcatgtagcagcaacactacatcaacagcagcagcaacaaccagcaaggaagactgtggaactaggatattgcgccctgattggcccaagggctgctacagggaagggaccgctcacatgttcatgaaggactatgaaaaggcctgcaatgcatttcttgatggtttcaaactggacccagcgaatattgagattgaaaatgcgctacgggaggctttgaaatcattgaaggcgtctcgtgctgcttga

SEQ ID NO: 20769 - DNA, 1389 bp, Oryza sativa; identical to SEQ ID NO: 10871
  Clone ID: TF_OsC335757_1

SEQ ID NO: 20770 - DNA, 2274 bp, Oryza sativa
  Clone ID: TF_OsC77260_1
aagcaagcatgtgcattgagcttcctctttgcgagaaaatcactgccagattcgagggttttcgtacaacaggaggggaagtgctacagctaaaaagccccccacaaaacacatctttaacaacaacagggccgtatcatcatgatcatcaaacatacatccagctggaagaagaaaataagggggcaaaaaatagaattgaattacagattagcggggtatatagccatcctgtacttcctcgaggagatccaatcaactacgcgttctccagagcacattatcaatctatgctgtcaggtgcgcagcacagctgacatcaacatctaacatctctgaatgaaaggtgacctgctatgtggcgaaacttttttactcctcaaagccatccatcatcgggtgacctccttccgacgaggtgcttttcgatgattgtttccgagttgagccccgcctgttcttggctttctttgccttcatcctccgtttcttctcgttggcatcaacccaggtgtagtcagaaggtatttggaatggatcaacctcatctttccagttacggctatcaccactatcactggactgtgcaccacgcccccctctaacccacgaataccatgagcctgatccttctgattctttgcccttggcatcctggaattgcgttgggcttgagggtggggtagcaaactcatccaaaggttgtaattcctcaaactttgtgaatgtcacgatgactcgtattgttggaacaataggtatcgcaatcttcaccggaaatgtgcctggaggcagtttagtagtcaagagttccctaagccttctgacagctttcactttgtttgctaagacatcaagcagagggatcagttcatccgtcttcaaagggaaatctggtgtcagccacaacactggtcttaaccccttcttgtattcactttcatgtttagtagaatcccctgatgatgcacccttcttcttcttgctgctgttcttctcctttccctttcctaggtcacctgattcatccttactcccttgattcgccttggatggtttctcgtcattcttggtgcctttcttgccaccccaaccaaaccatcccttcttatcttttgccacgccatttgcatccaaatgatcagccccgccatcaccttcctcgcacctctcctcaaattcttcttcctggttccccattctcaacgcagaatcaagctgtttcctctcttcggctgtcaacacttcatccagctccgcgtcaagttcagtgcccctcccattcttctcctccccctccatcgcaaacagctcctcatctgtcatcgcccccggcacacgccttgacttcacagtcaccagaacgtttaacatatcataaaccttagctttccaatgtccaacggcttccgtcctctcctgccggcgccaattcaaatgaggcacaagctctgcctgcgtcacgtcgatcccgggacgatacatgttcgtctttgacatcaacgccacctcatgtgcgacctcggcctccgttggttgcacccctgctccctccaatgcatctgtgatctccttgtccttatgagccagcactatgagagaacctgggtgcaactctttgcccccagcatcctcaggacgagcaccatccccgagaaacaagaaggtctggtccgaacgctggatgcggaagccgtcgaagccggcaagcgtcatgtcggcacgcagcgcagctccacgcttccaaatgcggtaagtgtcggagggggcgatgcggccgatgaagggtatgacggaggactcgaagtggaaggagatctccatgtagaagtctcggatgcggttgatggaggcgaggacgcgcgggaggcggcggcaccacttggcccaggcgaggggctggtagtggcgcgcgatgatggtggcgatggcgtcctcccgcgtgcagacggcctcctggagcgcggaccacccgtcggcgttctggagcgaccagtcggcgccggcggacatgaggatgtcggcggcgacggggtcgcggagccgcacggcgaggtggagcggggtctccctccgcggcacgtcgcggcggtcgatggcggcggagaccgcgtcggccacggcctcgccggcgatggactcctcctcggtggccacctccccggcgcgcgggaggcgcgggagccccgcgaccaggcggcggagcgaggcgtggtcccgccgcaccacggcgaggtgggccgggctgtgcgcgtacttggacgcgtcctccat

SEQ ID NO: 20771 - DNA, 2439 bp, Oryza sativa
  Clone ID: TF_OsC3800_1
gcttccgggttgccctctgggcccccatcgctggccctcggggtgctttggctggtgggcgttcgttcctgatgaacaacatgaatcttgcatggttaataacataagacagactttttttttttttttttttttttgatgcccaaagatatatatgaatatatatcgagtaaaataaaaactcttgttggaattcttgtatacaactattttataaaacccaaagagaggggcaaaaattaatagagtaaatatcagctgttcttcatcaatctagagctccctttgggtatacatgcttctttgttgatgaacaatattatttgcgaacagcttaaatatgtactaaaaaaccatctcatttgaatcaaattaagcaaacgaaggggaaaaattaattgaaagaaagaacttcttttttttttggttagctaggttgctatgagcctctgatgatcatgccaccatctgctcctgctccggccactgcgcgaatatgtcgccggcggcgtggccgtccttgacaagagagttcacccatgacacgtccggctccgccgccgcggcgtgcgtcgccaccggcatggcggattggccgcggaacgcgaacgacgccgacttgcggagcttgtgcagctcgtcgccctggacgccccagtccagcttgccgtccggcgagccccagtccgagagaatggacggcgcgccggtcgtcgccggcgacatgagcgaacgcgccgccggggcgcggcctccgcggtcgatgaagctctggctgcgcttggcgaacgccgaggcgcgggagctcatgatcgccttcgccatggagtggtccagcccgaacgcggtgttcgcgccgcccaccatcggcgaggtcggcatgtgcatctgcgtggtgtccgccatggagctgtacgcgggcatgtcgccggcctgcttgagggacagcgcgtggagctgggacagcatggccgggtcgacggagccgagcaggtcggtgtagtccggcacggccctcgccggcgacgcggtggcgaggccgttcgccgcggcgccccagctcgccctcggcgacggcgcgccggacaccttgtcgaacagcttctgctggtactggtccagcgcgagcatctcgaggtcgaagtcgagctcccgcgcgccgagcgccgtcttgaggcggctcgctggggacgacggccaggcggggctcatcatcgccgccgccgccgccgccatgtcgagcccgttgggcggcgaggagcgcggcgacgatacggtgggctgcatgccgacggacacggcggaggggttgacggcgcggagctcgtcgggcttgtgggcgaagaagcagatgcggcgcgcgcagccgacctcgtccttgcagaggcgcgtcctgtactgcgccgggtggagccagcactcgaacacgccatgggcgtactcgcacgcgtcgcccttgcggcacgagccgcccttgcggaactccgggcaaggcacgcagctgtaggagtagcggcgagggtcgcggcggcgcgcgttctcgccggggtggacgaaggggcactcggtccagtcatgggagtaggcgcgggagcacggcttcaccttgaagctgtacatgcggaactcgtcggtgctgaacagtccgctcttgaggtcgggcagcgtcaggtcaggcgggtactccttcttcgcctcctgcggcggcggcggcgacggcggcgaggccgacttcttcggcgacgacgacggcgacacggccggcgacttgagcagcagccggatggccttctccgccgcggtggcgcgcgggaggaggtcaccggcgcggagccccgaagccgagagcgcgtcgaccgacgcccccgcggcgagcaacaggcgcgtggccgcgaccgcgttcgccgcgccaccggcagccgccatgtgcagcggcgtggccccatccgtctccgacgcgcgcgcggcctccgccggcgccgccgccacgacatacccaagcacccccgtgctcccgtacagcgccgccaccatcgccgccgtcctccgctccatcccgagcctcgccacgccgctcgccgaaggcccataccacaacccagccacgccaagagacaccttctcctcctccacgaccctcctcaccgccgccacgtcgtccgctgccgccagctcaagaagcaaggacgccgccatcaccgtcgcctccttctgctgctgcggcagcggcggtgtggacggcttgcgcggcccagagcacatgacacacacaaacaaacacgcacgcagagtgttcgaccgagttcttgttagtcaaaacaaacacctagttcttgatttcttgttaaattcagagaggagaagaagaacaagaagagggagaagaggaattctcgatcgatggatggatttggagagtggtgcgggcgcgtgggtcct

SEQ ID NO: 20772 - DNA, 1233 bp, Oryza sativa
  Clone ID: TF_OsC140365_1
cccacgcgtttttccattatggaccgcccgcggcagcagcacgagccggagcatctcggcggcggcggcatcgacgtcgaggtcgagctcgacccggaggacctccagccgtcggtgcccctcaagaaggtccccgcgggggacctcttcgaggcggcccgcgcgggggactgcgcccgcctcgccctcctcctcggcggcggcgccaacgtcaacgagcgcgaccgctgggactccgtcgcgctctactacgcctgcctcgccggccacgccgacgccgcccggatgctgctcgaggccggggccgtctgcgccgagcgcaccttcgacggcgaccgctgccactacgccgcgctcaacctccgcctccggaggctgctcaaggcgttcgaggccaggcccccgccgctgccgccgctccccgccgcgctcagggccacgttcctcgcctgccccgccaaccgcgccgccttcctcgagatgctccagtggaccgccggctccgaagccgccgccctcgccgctgctgctggatttgggccaacggacaatccatcaagtactagcctattccctccggacattacattctacgtggatggaaaaccaattgaagctcatcgggtcattctttgtgcccggtcatccttctttcggaggaaattcaatacagactggaaagacaggaaggaagtgagattttctagccagaagttatcttttggtgccttgtacagccttgtccatttcttctattctgatagactcgaagtggatgtggatgatatggaaaatttggcgcgggcgtgcaaagtttgtaagtgtgagggtttgcaaaagatattgattaaagaagctactctccagagatatgcagaacacaagtcaccgagagatttggacagttcacagaagaggttcattttacatgggcaatccttgccagaggaggatcgccttccatcagccctgcggcatatttttgaggaatgtctagctaactcaagagaacaagaatgttataacgatgaatcaaatgaaatgagcagagactctggtgtagatgctgctgctgatctttatataaaagtgattttagcctcaagatcagagtactttaaagctaggctatctagaaacatggattttcttgaagtcaagagtgggcttcaatcaactcagagccttccttttcttgaagagcatgacatgagtacagaagcatttgaaaag

SEQ ID NO: 20773 - DNA, 531 bp, Oryza sativa
  Clone ID: TF_uC-osflcyp015c11b1
ttttgatcattcatattgctgttccgagaaacagcggagggtattttggccatgtccttgcaaagcttgaacctagcattgacatgaaagataatcttggattaacaccgcttcagctatctattcttcttggcaaatatgctgcgatgcaaaaattgatagactttggggctgacattcatatccattctctttatggaggaccaattcacgcagcagtagcactggatgatgaaattgctcttgaagctcttatgagaaagaccaatacacgtcttttgctatgatgtgttttcacataatatgaatctagtgttttcacataatgtgtctttattaataggtggatgatattattgatggaggtataacacccttagcatgtgcggcatacaatggttcagttacaagcatgaaaacgttgttgcaggctggagctaatgttcagatttcaaagccaatcggcaaagctatagtagctgacctcacttcatctgaatctatggttcaaattctacttgatctggtgct

SEQ ID NO: 20774 - DNA, 461 bp, Oryza sativa
  Clone ID: TF_uC-osroM202020g09b1
tgtaacccaagaggttatactgttcttcacattgctgcgaggcgaagagagcctaaaatcattgtctcccttttaaccaagggggctcggccagcagatgttacattcgatgggagaaaagcggttcaaatctcaaaaagactaacaaaacaaggggattactttggggttaccgaagaaggaaaaccttctccaaaagataggttatgtattgaaatactggagcaagctgaaagaagggacccacaactcggagaagcatcagtttctcttgcaatggcaggtgagagtctacgaggaaggttgctgtatcttgaaaaccgagttgctttggcgaggattatgtttccgatggaagcaagagtagcaatggatattgctcaagtggatggaactttggaatttaacctgggttcttgtgcaaatccaccttcttgaagacaacggacaactgttgatct

SEQ ID NO: 20775 - DNA, 2140 bp, Oryza sativa
  Clone ID: TF_OsC4142_1
cccccctttgattttgagaaaatttgtttaaaaattcttgtcataggagcataggtagaagagattgctgataaagaaaaatggcattttgcaacacatttaacttgttcagtgttcaagctaacgttgaacctggtacaagtacaacatgctggcacgcatgtccacatctcgcgggtcgagggttcaagccgaatacaacacacggcatgttgcatttcatcataatttaaagtacttagcatcactttgaacaaggttttggtggtcacatgtatattcgcaaccttcttaaggtgtccgcaaaagacgtgcgcagcataatactttgcagacctatggttatcaacagcaacatgccactaggcacctttttgctcatgtctttagcaccttcgtgagcatttactgaattacggaactgtggacgatgaagcattgacttctcatctgctgctccattggatacagacagctgggcccctaatactgatctccagtaggggaaaaaatttctctttatgaatgttggatcccatcctttaagtgccttttttctcgcagcctttttttctgcagcaggcagagaagtagacatttgtgcaacagccttggttacatctttgtgaactatgtcgctgtaagaaatcttgttatatggacagaggatcatggtgtcaatgtattcttcgttagggcaaaacccgaattccttaagaatatatgaaacacgcgcaaggacctccacattgggcactaaatcatatttcatggtggacaacatgatagtggttctcgctaacatgaacttcatcaggtcagtttcattgttgtggacctctgaatgtgcttgaatgtagttatccaaaacctcaccagcttgcgaaattatagtgacaatcagacatttacatttcaaaagtgctcttctttcctccagcagcttctgcccctctgcagtatcacctttatcacacactagggaatcatagtcctcatatatacgttgcgcgataatgtcgaacccatcaggtttgccctcacggatatgttttcgggctgccaggagtaaaactgcggattctacaagcttgtcattcttcatgtaattccagagctcatcagctagattatctgttttttcagcaagcagtctaactgtatccaaaaaaaccttcatctcaggtagacacagcagatgaatgagcttgtagatataatcctcatgatactgcacaggagatagattgtcctccagatatttatgcaagcaagtatttccaactgcaacatggagcgggagtagtccgggaatgccagcatcattgactgtgtgtaaattggctgaagcaccatggcagaacagcaacttgatcatgtcaacagagaaccgttcagcagcttcatggagtggaaaaattccatatgggttaatgcagtttggattggcatgcatacaactgagctgaggtgccttgccctccaatacagttttcgcacatcgcaaggcattatgcctgacaatgcaggataaggtttctgaggtgatgttacacttaaatgccatggccgcagtacattccgcgaacaaacggaagaagcaccggacactgtcctttctcaagacggagtccaagcggggagatatatcaaagaaggcatcccgcaccacctgaggggtagggtctgggatgattatatcatttgttaaggacttggccatccaagcatattttattttaacccactcatcagccttatccaaatcagacttcttgataactagaaaagggcgggacgggtccatgttatctacggttgctccatcttctttacctttaccaacactttctcctatgaaagcatctggcagaacatgatcgggaattttcaccactatatgtttgtcgagggccgattccgacatgacctccttgctatgataaagattggggctttcctggatgagtagaaccagatctccagatgagatgaagggctggcttataaaatagtggtgggatgtaggaaagggggcggtggagagttcgccggaggcgatggcggtggaatgagcacctagggtttctttatgggaagatatttgctcgtgcggccggccgcccggggatccactatt

SEQ ID NO: 20776 - DNA, 371 bp, Oryza sativa
  Clone ID: TF_rsiceh_7309.y1.abd
cttcgcccccctacacatggctgccgagaacttcagcgtcgacatggtcaaactcctcttccgttacggcgcatcggcgaacatccgcaccaagggcgagtatgtcattgagggcctcctccctctccatgttgctgtcgagaggggccagcatgcacaagtacattgaggatcattgggctcatggggaccatatcatcaacctcatcttcctcctttgtcttcctgagatggtttcttcttcattcaattcctatccctattatattactgccagagcatttagcctatttcaaatactagcttggaccaataattaatttcagccaccactgacatgcagaaaatgttcttggacacgactagattaa

SEQ ID NO: 20777 - DNA, 550 bp, Oryza sativa
  Clone ID: TF_uC-osflcyp039a01b1
gtgattagtggccaacatagcacgatgaagatcttattggagcatcatgctgatcctaacagggttttcaatcttgatggtaccccgttgattatgtccatagtttctggatcattggaatgcgtgaagctattaatcaaagttggtgctgacatgaattttagagactccaatggcgttacttgtgtaatggttgcagcaaatcatggctcttctgtcatcatgaagtgcttactagatgctggtgctaatccaaacattccagatgaagtgagtaatattctttcctctatagcctgtgactggatgttgttgcgacaggctgtatggtcttgagagattaggataatctactcacttattctttttatcaactgtaccaatggataagtctgcatgagaagaaggcagtgcttctatgctgctctaaaggaatgcaattgttgaaatgtcatctcaaaggaaattgctcacattccactccaaagggtggatatatggttggattttcaatactgtttgaagcttcttgatataggaatgatgagaa

SEQ ID NO: 20778 - DNA, 1360 bp, Oryza sativa
  Clone ID: TF_OsC115542_1
atggaggctgtcctacgacacccatccctttcccgcctcaaaccccccaaccccaatgctcagagaactccagccctctccatcaccgtccctttccggcttcgtctccccaaccggcggctcaccgccgcggcggtgttccaggaccagaccaacccaagaaacccagcgagcaagggaggcgacgacgatgaggcgtacggcgaggtggaccgtattgtgtccagccgcaccatcaagaatccggtgttcgcggaggacggctcggccaccacggtcaccgccacggagtacctcgtcgagtggaaggacgggcacgagccttcgtggatcccggcggaggccatagcggcggacgtggtggcggagtacgagacgccgtggtggacggccgccaagaaggcggacgcggcggagatcactgcgctactcgcggacgagacgctgcggcgtgaccccgacgcggaggatgcgcaggggcgcacggcgatgcacttcgccgcggggcttggatccgaggagtgcgtgcgcgcgctcgccgaggccggggccgacgtggggcgacccgagcgcgccggcggcgggctcacgccgctgcacatcgcggtcgggtacgggcgcccggcggccgtgcgcgcgctgctggagctgggcgccgagccggaggcccccgacgggcagggccggacgccgctggagctggtccaggacgtgctcgcgaagacgcccaagggcaacccggcgacgttcgagcggcggctggcgctggaggcggcggcgaaggagctggagaaggccgtgtacgagtggggcgaagtggagaaggtggtggacggccgcggcgagggcaagtggcgggagtacttggtggagtggcgcgacggcggcgacagggagtgggtgagggcggcgtgggtggcggaggacctggtgaaggacttcgacgccgggctggagtacgccgtcgcggaggccgtcgtcaacaagagggaggcggcggaaggggaggggaaatgggagtaccttgtcaagtgggtggacatcgaggaggcgacgtgggagcccgcggagaacgtcgacgccgaactcctccaggagttcgagcagcggcaatctggggtggctgctggcggtgatgctccgccgccgccgccggtcgccgggtgacagcgtgtcgccgtcgacggagggtgttcgattcttcctggttttgctgtgtataacagaacgggataaaatgtttgtgctgctgcaaaatgtatcattagcgctttgataatttttgagttgaccagaactttagcctcagattgcaatttgagaaatgtgaagagtttcagaaaaaaaaaaaaaaaaaaaa

SEQ ID NO: 20779 - DNA, 1847 bp, Oryza sativa
  Clone ID: TF_OsC46535_1
acgggcctttctttttttttttttttagcttcaaactgcataggtgctcttcattgttaagtgctaatactagtacacattagcaggtaccaagtatccaagtacacaaaccatcaagatggtgcagaaaaaggtctgcttgggccacctcaccacagacctaaaacagctgagcaactatatacagggatgattgttttcatccaattacatgttcttaagtgttacatgcagctaaagcaagaccttttacaatctacagggcataaattctcttctcatgatcagagaatgcttccaggtctgatatcccctcatggatagaccaggagaaggacttgctgccacttgcccttttgatgcgccgctgtctatcttcaccaaacttgaagcgagggcgcaacaacagataggccaggaacaagagagtaccaatcatgattggccctccgatggctgatatggtgaaagccatccaggcattctgggggccaactaccacataggccaatgagataaaagccgcacatgtactaaggcatgctgaccacatcagcttatttacaatcttgataacccgcttttgagcaccggtttcccaggcaaccaaggtgatctgaactacgaccactgcaagggaaatgaaaagggcggtagcattcagcagacaaaaaactcggaaaccagtaaggttggctatgtgggcttcaccaatgtctcccccactatccctatcaacatagtactggcctggcaaattgaatatggctacgaatgcgatggaggcaatcagggttgctaccatagtaactgaattgatggtgttctgaacagcttctctgtgtagtttccggagctctttggctattcctgtcactcttttatttgtcttggcattctcattgagctgtgcttgaacattgtgcttgatatcactcacggttctcctaagctctgatgcctcatcaattttccccacattccgtgcattctttgcgccagcttctgtcagccactcaattatttccattttagactcaccataaggaactttctcagccaaatccatagctgtttcattctgattattgatagcattgacttcaagcgcctcgtagctaagcagaagttgtaccatctggggcctccattttcgtgtagctatgtgcaaagctgtatttgccttcttgtcacgcacatcgagtatggaaacatcagccatcagtaactcttcaactacatctgtatttttaccttttacagccatgtgaagtgcagtctgtcccttcctatctctgattggaacaatccccggatccctttctataagtgctttgacaatacgatggtaaccgattcttgcagcagtgtgtagtgatgtcttcccatttttccgcacaatccttatgcagctgtcatcagtgtccagtatggcgttaactacatccaagtgatcttttactgctgcagagtaaagagggctagtattggaagagtcacagattgaacatagctccggccaccgccccaagaactccttcacagccccggtgtggccttgcttggcggcgacgtggaaggcgtcgaggtcgaggcgggagcggacggtggcggcctcgaggtcgtagagcgggatgaggaggcggacgatctcctcggagccggcctccgccgcgacgtacagcgccgtctccccggcgtccgtctgcgcggcggcgagcgcctgggtggtgggcccggacgccccggcgtcggccaggaggccggcgacggcggcggcgtccgcggatcggacggcggcgaagagcgcctggtgggagagcggcgggagatccatcgtcgccggc

SEQ ID NO: 20780 - DNA, 2221 bp, Oryza sativa
  Clone ID: TF_OsC99825_1
ccagggataatcccactactggctactgcattcgcttatctcgctcgcgatgtcgctcgaaatccatgaagaggagggaggaggtacggcggcggcggcggcggtgaaggtgatgacggtgtcggggagcgggaagcgggggcggtacgtgcggcaggtgacggggcggcacaacgacaccgacctgcacgtggcggcccgcggaggggacgccggggcgctgcgccgcgcgctggacgaggcggcggcggccgtggccaccggggaggggagggaggcgctggaggaggtgcggcgggccgtggcggcggagcccaacgaggccggggagacgccgctcgtcgccgcggcggagagggggcacctggaggtggtaagggagctgctcaggcacctcgacgccgagggggtcgccgcgaagaacaggtcggggtacgacgcgctgcacgtcgcggcgagagaaggccgtcatgctgttgtgcaggaaatgttacttcacaataggttgcttgccaagacctttgggcctgcgaatactagtccacttatttcagcagctacgaggggtcacaccgaagttgtcaaattgttactagaactagatgattttggattggtggaaatggctaaagataatgggaaaaattccttgcattttgctgctcgacaagggcacgttgaaattgttaaagcattactcgagaaagatcctcagctagcaagaagaaatgacaagaaaggtcaaacagccttgcatatggctgtaaaaggaacaaactgtgatgtgcttagagcacttgtcgacgctgatccagcaattgtaatgctgccagacaaaaatggaaacaccgccttgcatgtagcaacaaggaaaaagcgagcagagatagttgctgttctcttgcgattaccagatacccatgtcaatgcactaaccagagaccacaagactgcgtatgatatagctgaagccttgccactctgtgaggagtcttctgaaataaaggatattttatctcagcatggcgcactcagatctagggagctgaatcagcctcgagatgagctccgaaaaacagtgacagagatcaagaaagatgtccacacacagctggaacagacaagaaaaacgaacaaaaatgtgcatgggattgctaaggaactcagaaagttgcacagagaaggcatcaataatgcaacgaactctgtaactgttgttgcagtactttttgccacggtagcctttgcagccatattcactgtgcctggtggaaatgccaacaatggagttgcggttgttgttcaggcagcctcctttagaattttcttcatcttcaatgctatagctctgtttacatcattggcggtggtcgtagttcagataacggttgtcaggggagaaactaagtctgagaggaaggttgttgaggtgatcaacaagcttatgtggctggcatcagtttgcactaccatttctttcattgcctcttgctatattgtgctaggccgccatttccaatgggcagcactactagttagtttgataggtggcatcacaatggctggtgttctgggtacaatgacatactatgtggtgaaatcaaagcgcatgaggaagataagaaaaaaagagaagatgtcaagaagaagtggatctagctcctggtatgataatactgagctctcagagactgagcttaaccaagtgtatgccttgtaagagaaaaggtctcctagattcagtctctgtctctgggattgatatgtacatgaaaattccagatatacacattaacagataacatagctcacagtatttcttgatttttacaattccttcctgtatcaaccaaccactcagaactaaatggaatacccattgtcccattgtgcaaggctccttcagctgcagaattttatggcaccaacgagctcaacctattgtacagtgagttgcatgtttttttgtttttgattttcattctattgccaactttcatgagaaaggatttttttttcttattctttctgtgcctacttatagtttgtgatgcgctcttcagttttcataatgtaacacagaacctgacacgttttagttccctttatgctattggtcatcttattcttacatgttgccctttgatgtaatttttacatactgattttatgttgtttcataaataaaattttactgtggatctaaaaaaaaaaaaaaaaa

SEQ ID NO: 20781 - DNA, 504 bp, Oryza sativa
  Clone ID: TF_LIB3434-005-P1-K1-C10
cgacaaggggcttgtggcgaggacgtcgctgatcctgtggcacacgcaccagaacgacgccggcgccgtgcggaagctgctggaggaggacgccgcgctcgtcaacgcccgcgactacgacagccgcacgccgctccacgtcgctgcgctccacgggtggcacgacgtcgccgagtgcctcatcgccaacggcgccgacgtcaacgcccaggatcgctggcagaacacgccacttgctgatgcggagggtgcaaagaggcatgctatgatcgagctactcaaggaacatggtggattgacatatgggaaaactggaagtcattttgaaccaaagacaattccaccacccctaacaaacaaggctgactgggagattaaccctcttgagttggatttctcaaaagctgttatcatcggaaagggctcttttggtgaaattctgaaagccaactggcgaggaacacctaatgctgtcaagcgcattcttccatctctatctgatga

SEQ ID NO: 20782 - DNA, 1556 bp, Oryza sativa
  Clone ID: TF_OsC54254_1
atgagcggggcggaggaggaggcggcggcggcgaggggagggggaagcgggagcgagagcggggggagcggaggaggtggacggggagggggagggggaggggcggggtcgtcggggagcagcggggcgcggcggcggttcgacgacaaggggcttgtggcgaggacgtcgctgatcctgtggcacacgcaccagaacgacgccggcgccgtgcggaagctgctggaggaggacgccgcgctcgtcaacgcccgcgactacgacagccgcacgccgctccacgtcgctgcgctccacgggtggcacgacgtcgccgagtgcctcatcgccaacggcgccgacgtcaacgcccaggatcgctggcagaacacgccacttgctgatgcggagggtgcaaagaggcatgctatgatcgagctactcaaggaacatggtggattgacatatgggaaaactggaagtcattttgaaccaaagacaattccaccacccctaacaaacaaggctgactgggagattaaccctcttgagttggatttctcaaaagctgttatcatcggaaaggatgatctttttagatgttatatgcaaatagagatagttgggtgttcaaaacttgccattatattagctggctcttttggtgaaattctgaaagccaactggcgaggaacacctattgctgtcaagcgcattcttccatctctatctgatgacaggctggtgattttttttggggtatgcagacaagatttcaagcatgaagtcaacttgctaataaagctgagacatccaaatattgtgcagttccttggagcagtcacagaaaccaagcctttaatgctcgttactgagtttttacgaggaggcgaccttcatcaatacctgaaggagaaaggtgcacttgccccagcaactgctgttaatttcgcactagacattgccaggggcatggcctatcttcataatgaacctaatgttgtaattcaccgggacttaaaaccaagaaacattcttctagtaaattctgctgccaatcacttgaaagttggagattttggtcttagcaagattatcaaagcccagcatgccaatgatgtgtacaagatgactggggagactggaagctaccggtacatggctcctgaagtattcaaacaccggaaatatgacaagaaagttgatgtcttctcgtttgctatgatactttacgagatgcttgaaggggatccacctttctctaactatgaaccttatgaagccgcaaagttaattgagctatgctggtccggggatatccatctgaggccatctttcctagagatcctcaagaggctcgagaagatcaaggagtacttagctgcgcacgatcaccattggcatttgttctcccagttccctgctctttttatgtttcttgagaatcagtacagtggatacaggaagtaaatgtgccatgtaatctgtttaaaagcacttcttttacggggattaaaaaaaagctagttctttgtgaactttgtaaacagaaaaaaaaaaaaaaaaaaaaaaaaaaa

SEQ ID NO: 20783 - DNA, 1906 bp, Oryza sativa
  Clone ID: TF_OsC4338_1
gcggctctccttctcttggtacactacaaaacgcgctccactggttcgtcctcctaccgccgcaaagaacgagctgttatccgggtacacgcacgaagcaatatctttttctttatgagtttgttgatgttgatagtcaaatattaaaatgtttaccttaggacaaaactagaacacaagtagttcgaaacagagggattacttgattttctgcaggtcactggctggaaactacactacctcatgggcactgtctttattacactatactgctatctaccaaagtggaactagctaaaagaattaggtgcaatccttgcttttaccaatgtgtgtcaatgtccatcattttaggtcattgattgtaatagctgattgccgacagaattgataatattaagtaatggttcaagttctcccattgcccaagatactagcatatcagcatcacaagtgacacagacagtaatacacagtaccagaaaagataagaacaaggttatatgtcatccattgtcaaggagaggaccgttcagaaggagtaccaagtccttttaggagacagtgacaccatcgagttctgcttgagctactgctgcaccgattgcatcgatcacctccatcttgcccttcgtcactgcttcatccataggggttttctcatggctgttcagtgcactgacactagccccagcgcatatcaacgctttaattacctcgatatgtccattgaggcatgcccaatggaggggtgtgttcttctctgagtttgtagcattaacattcgctccattttggatcaagtactgcaccacagcgagatgtccattggcagaggccatatgaagtgccgttcgtccttgcgaatccgcggagtctagggaaacaccggcggtgaacagcgcgacgacgtcctccaggtcatcgtacctagcggcgtcgatgagatcctgcgcctgctcggcggtcgccgccgccgccgttggttgctccgattccgcgcccatcgccgccgccgccgccgcctcagtcccagtagaaatctttcatggtcaggggcaagacgctttagctttagagggattgttttatgctttggtgccaaaagcaagctagtgcattcatcaacactaggcaaaaaatcaccatatagctgccaaaagttgtcttctacatcaaatgcatagagaagaaggcaagctaaccttagatcccaatctgtctcaggatctgttgattcaatgatgtcaaatatgggatggcctagtggaataatgtcggggaaaaacatccaagggcgtttttgagttatagtcagcatcagctccaatggaatctccataatcacaccatatttgattatttgcatagcattataaaaggcagcagaagatatgtaagcgtaaagtactctagctctgcggagtgggtcgacgtcccgggaggcatagacggccatcccatcggggccttccaagaactcaaccccgtacgcccgcatcatccgcgcgtaccctatccggtagaagtcggggtcggccggctccatctgcacacgacgacattgttcatcatgcatgcatgcgcgcgagcagaagagatgtgagcaacggaagcaactaggcgggaagagattgagcacctcgggcgggaaggggtcgtcctcctggggcggttcgaggagcctgagcgggggggcatcgtcgtcctcttcctcctcgccgacctcctccgccgccggtgggggtgccgcgggaggcgggtcccggaggcgagggcgtccggcgcggggaggccgcaagacgaggcggcgggcgcagggaacggcgcggcgaggcgggaaggtggaggccgggagggggagggggagcggcagcaggagaggggaagcggcgggagtcgccat

SEQ ID NO: 20784 - DNA, 1099 bp, Oryza sativa
  Clone ID: TF_OsC58045_1
cactgtccagatgctccctattgcgacagaaatggttggacatgccttcatgaagctgtaaaggaaggtcagacagagtttgtggaatttatcctaaggacaccacaacttcgtaagctcatcaacatgcgaaataacaaggacggacaaactgctctgcatgcagctgtccggatgtgcaatcctaaaattgttgcctcgttgttgtctcataaagacacagacttcacactgaatgatcacaaaactggccagtcagtaatttggcaattatgtttgggttcagagcgtgccaagactttaaactggaatgaagtgtccatgcttatgactaaagctgatcctgaagctgcaaccacgcttcacccgtcagttcgcaagggaaacgactaactgatgaattagcaaggaatgttaagtcactcactcaaacatacacaagcaacacttcgctagtggctattctcatggcgacgataacctttgccgcagccttcaccctgcctgggggatacagcaacgattctggaagcgagggacttcctgtcatggcaaagaagttagcgtttcaagcattcttgatctctgacaccgtagcaatgtgctcctcgcttgccgtcgcattcatatgcatcctagcaaggtgggaggatcttgaattcttgctttactacagatcctttacgaagaagcttatgtggtttgcatacatggcgaccactatagcgtttgcaacgggtttatacaccgtgttggccccacgaatgctgtggttagctgttggaatttgtttcctttcggttttactgcccattctcactaagctgctaggtgagtggcctgtcgtgaagctcagatttcgtttgggtaagactttcaagactgatctccttgatatggtatgacgtcatcaaatttatattatttgttctgctttccaacactacatataagttcatgcaaaatgtatgttgtaatatatacattttattttggtgatatgtctagaagatatcatggagagttggagacgattaaaccagaggcaatatttatgagttactccctctatctcaaaatataagacataattattttt

SEQ ID NO: 20785 - DNA, 1155 bp, Oryza sativa; identical to SEQ ID NO: 10941
  Clone ID: TF_OsC340376_1

SEQ ID NO: 20786 - DNA, 1345 bp, Oryza sativa
  Clone ID: TF_OsC506_2
atgggtcacggtgtcagctgcgcccgcaccggcgacgagcacgacttcttccgggcggcgcagctcggcgacctcgacgccctggccgccctcctcgccgccgacccttccctcgctcgccgcgccaccctctacgaccgcctctccgtcctccacatcgccgccgccaatggccgcatcgaggtgctctccatgttcttggatcgcggggcgccgccggacgcggtgaatcggcacaagcagacgccgctgatgctcgcggccatgcacggcaagatcgactgcgtgctcaagctcctccaggccgacgcaaatatcttgatgttcgactcggtgcacgcgaggacctgcctccaccacgcggcgtactacggccacgtcgactgcctgcaggccatcctcgccgccgcgcagaccacgccggtggccgactcatgcttccctggaagcacgtcgcttcatttggctgctcgtagcgggaacttggattgcatcaggaagctgcttgcctggggagctgatcggctccaaagggattcggctgggagaattccctattctgttgcgctgaaacggaaccatggagcatgtgcagctttgctgaaccctacatcagcagagcccatggtgtggccatccccacttaagttcatcagtgagcttgaaccagaagctaaggctctcctggaagcagctctgatggaagccaacagggagagggagaagaaaatcctgaatggcacaaagtactccctgccatccccttcgcccggtgatgacagtgccgatgacgatgcatgctcagaggtgagcgacacggagctttgctgcatctgcttcgaccaggcttgcaccattgaggtgcaagactgtggacatcaaatgtgtgcaccgtgcacgctggcactgtgctgtcacaacaaacccaatccgacgaccctgacaccgccctcaccggcctgcccattctgccggggcagcatctcacggctggtggtggcccaaacaaggtctgcttgtgatcctgacaagccgtcatccctgcagctcacccggaagcggtcgcgtcgatctcacaacctcagtgagggcagcagcagcttcaaagggctaccttcggccatgggctccttctcaaagcttggccgtggctcgagccgcatggcggacagtgacagcagcaacctggacaagcctgagcacgatctatgaaagcagaacaacgcacggacaatcgccgcatcatcctgagactgaggaccaactctgattaacactgaagtctgccgtgtggattgggtttagattgaaaccaattcatggagataacccccctttttgtggc

SEQ ID NO: 20787 - DNA, 1236 bp, Oryza sativa; identical to SEQ ID NO: 10948
  Clone ID: TF_OsC180673_1

SEQ ID NO: 20788 - DNA, 2882 bp, Oryza sativa
  Clone ID: TF_OsC14877_1
atgaacggcacgccgatctccgcgtccgccgcggccggcgtcgacggagtcggcgcggcggtggcgctggcggccgcgaccaagaagagtgccgccgcggcggccgccgtcgccgagatggcgaaaaccctcaccgtcgacacggacgacgccttcgcggggctcctcgagctcgccgcggacgacgacgcggagggcctgcgccgcgcgctggagcgcgccccgcccgccgccgcggacgaggcgggcctctggtacggccgccgcaaggtcctcgagcaccgcacgccgctgatggtcgcggccacctatggcagcctcgcggtgcttcgcctgctgctgtccctcccgtccgtcgatgtcaatcgccgctgtggctccgacggcaccaccgccctccactgtgcggcgtctggtggctcgccgtcttgtgtggaggccgtcaagctgctgcttgctgctggggctgatgctgatgccacggatgcttccggatatcgtccagctgatgtgatctctgttcctccaaagatgtttgacgccaagattgccctccaagatcttcttggatgcccaaaggctgggcatggcgttctccgggtggtgacaagggccgcaaactctatgttgtcacctgtatcatcccctacagcagaagatgcacgatctccatctgctgctgtgatgatgacgacaaagtttgcagatcttccaagggttgtgacatcggaaaagaaagaatatccagtggatccgtcccttcccgatatcaagaacagcatctatgcttccgatgagttccgcatgtactcatttaagatcaggccatgctcgcgggcgtactcacatgattggactgagtgcccgtttgttcacccaggggagaacgcacggcgtcgggaccctcgcaagtatcactacagctgtgtgccatgccccgactttagaaagggagtttgccggcgtggtgacatgtgtgaatatgctcatggcgtgttcgagtgttggctccatccagcacagtaccgtactcgcctttgcaaggatggcacaagctgtaatcgccgtgtctgtttctttgcgcatacaactgatgagctccgaccactatatgtttccactggatctgcagtaccatccccaagagcctcggcaacagctacaatggagatggctgcagcaatgggcttgatgcctggttctccatcatcagtttcagcagtcatgtccccatttacaccaccaatgtccccttcaggcaatgggatgcccccttcattgggctggcagcagccaaatgttccgacactacaccttccaggcagcagccttcagtcgagccggctccgtacctcacttagtgcaagggatatgcctgctgatgattactccctgatgcaggatattgattcacagcttataaatgatttgtgctattcacgtattggttcatcaacaggaaaccacacgtctcggaccaagtccctaaatccgtcaaacttggatgatctcttctctgctgagatggtctcttccccgaggtatagtaatgctgatcagggtggtatgttttcaccatctcacaaggctgctttccttaatcagttccagcaacagcagcaggcacttctttcaccaatcaacacagtcttctccccgaagtctgtggacaaccagcagttgccttcacactcatctctgttgcaagcatcacttggtatatcctcccctggccgcatgtctcctcgatgtgttgaatctgggtcccctatgaactctcaccttgctgctgctcttgctcagcgtgagaagcaacagcagacaatgagaagtctcagttctcgtgatcttgggccgagtgctgcaagagcatcaggtgttgttggctcccctctaagctcatcatggtcaaagtggggatcaccttcagggacacctgactggggtgttaatggtgaagaattgggcaagcttcgccggtcatcatcgtttgagctgagatctggtggtgatgatccagatctctcttgggtacacacactggttaaggaatctccaccagagaagcaagtcactactgctgaatccataaactctgttggaccttcaccactgatgcctcccagtgtaagcaacggtgaaggtcctagtctgaatgccccgctggatgggcatgaccaagctgctgttattggagcattgcttgaacagatgcagcttgatcagcatattggtagtctagcaacataagcgctgaatgagcctggaaagtgcaaggagttattattcttagttaatgaatttggagtaatttttttcctgttcattaagatggtcagcaagcaaaaggatggatagctgatggtggtgattcagagattggttttctttactttattgaggtaaatcatatacattattgaggttccagtaggttgaaagattgaagtaccttgattggggtcgtttcaagaccgacccaggtagaatcgcaccccggcagcttcaattcatcggtcaaaaatatttccctgttttgttaattaaccccgttaaaaaagaagactcgtttggtgtttcggaattcttttctttaccttagcggtgtttattttgtttattatgatattgatacttgatgtactgatgggtataaggttggttaccaggcatgctatagtggtatatcaagtcccaaagtattctttttctccctttcaccatttgtcgaggatcatactatggccttgttttggtcagatcttgaggcctgtataatccttggatttgtaataatgtaatattgtcattgaacttacattgctattgttttgcaatcgcaaatctcgctcaaaaaaaaaaaaaaaaaaaaaaaaaaaaaa

SEQ ID NO: 20789 - DNA, 1023 bp, Oryza sativa
  Clone ID: TF_OsC359_7584
ctttagaaacatgaaagctgccccttgtcgatagcatgctttgggccaactgggccgcaacattctgcacatgttagcatcagcaagagccccattgccggttgacaaacgcaaccagcacaggctcctgtttgctagcagggttgccttatcatgagcattagtggtaagttctattgcattagtgtagtgttgtcctgcaagcatatattcctctctctcgaaagcctctctagcttgtaatttcagttcagcacttttccttttagacagatcattatcccttggcttcaaaccaaaagtttgcacatgagaaataactccatcgatactccaatcaggcagtgttgaaattggtgaagttaaaggaaacaacattttaacaatgtcccttctgcctcgattagcggcaacttcaattggagtcctattaaattcatctggaatatttgaattagcaccagcatctagtaagcacttcatgatgacaggagagccatgatttgctgcgaccatcacacaagtaacaccattgggatctctaaaattcacatcagcaccaacatcagcgtgatgctccaataaaatcttcatcgtgctatattggccattcatcgcagctgtcagcaatggggtcccagtgatagaatctaaatccacatcaactcctcttgaaagaaacaactctactatttcgcagtgtcctgccaagaaaaatatggcataaggaccatagggaacccgtatggtcatatggatcgagccttcaacaatacaaactttggcattgaactggttgacgctgaggtggaggtcctccacgaggtacctgaggacatccatgcttcctcgggcggccgccaggtggagagcgcggttcccgtcggccctgcccgccaccgccgccacgacggcagcctcgccctgcccggtgtccagccctcgcgccatcttcctgaggaggcggaggttgtcatcgtaggcggcctggaggagcatcttctcctgctcctgcttccccat

SEQ ID NO: 20790 - DNA, 482 bp, Oryza sativa
  Clone ID: TF_uC-osflM202091b10b1
tcgcaccaacatggcctcccagaacgctctgcgttgtgccagggtcgcactccagggcacctctcctctcttgcgttgccgccgccgcgctgaccccaacacccgccaccgctacggcttcgcccccctgcacatggccgccgagaacttcagcgtcgacatggtcaagctcctcttccgctgcggcgcgtccgccaacatccgcaccaagggcgacaacgtcattgagggcctcctccctctccatgttgctgtggagaatgccagcatgcacaagtacattgaggatcattgggctcatggggaccatatcatcaacctcatcttcctcctttgtcttcctgagatgaaaatgttcttggacacgactagattaattgccaaacagacggacaacattgtcgacgaggtatggaattacattcagcatgaagagaagcatgtccaggcagcaattttgctgctcgctgctgaaaagcagc

SEQ ID NO: 20791 - DNA, 3351 bp, Oryza sativa
  Clone ID: TF_OsC64079_1
atggcggaggggcggcgctacgcgatcgcgccgcagctagatattgagcagatactgaaggaggctcaacgccgatggttacgtccgactgaaatttgtgaaatacttaagaattacaggagtttccgtattgctcctgaacctccaaataggcctccaagtggttcacttttcttgtttgatcggaaggtcctgagatatttcaggaaggacggtcataattggaggaagaaaagagatggaaagacagtcaaagaagcccatgaaaggttaaagtctggaagcattgatgtgcttcattgctactatgctcatggggaggagaatataaatttccaaaggaggagttattggatgttggaggaggattacatgcacattgtacttgtacattatctggaagtcaagctgaagtttcatttcctgcacatatatgggtatgaccatcaggctggaaaattaagctctcgtagtacgggacatgatgatgtactgcaagcatctcatgcggatagccctttaagtcaattgccttcacaaactaccgaaggagaaagctcagttagcggacaggcctctgaatatgatgaaacagaatcaggcagttatcaaggattacaggctacagcacctaatacaggcttctattctcatggtcaagataacttacccgtggttcttaacgagtcagaccttgggactgcatttaatggccctaatagtcagtttgatctatcattatggattgaagcaatgaaacctgacaaagggacccatcaaattcctctttaccaagctcctgttccctccgaacagtctccttttacaggaggcccaggaattgaatctttcacatttgatgaagtatacaacaatggactgagtatcaaggatgtagatggtgatgatacagatggagaaactccatggcagattccaaatgcaagtggtacatttgctacagcggacagctttcaacaaaatgataaaactttggaggaagccattaattaccctctcttgaaaactcaatcatctagtctttctgatatcataaaggacagttttaagaaaaatgacagtttcactagatggatgagcaaagagcttgctgaagtagatgattctcaaatcacatctagttctggagtgtactggaacagtgaagaagctgacaatatcattgaagcatcaagcagtgatcagtatactctgggaccagtgcttgcacaagatcagctgtttactatagttgatttttctccaacctggacatatgcaggttcaaagactagggtatttattaaaggtaatttcttaagttctgatgaagttaagagattaaaatggtcatgcatgtttggagaatttgaagtcccagctgagattatagcagatgatactcttgtatgtcattctccctcacacaagcctggcagggtccctttctatgtgacttgctccaatagattggcctgcagtgaagtacgggagtttgatttccgacctcagtacatggatgctccaagtccacttggttctacaaacaaaatatatctccagaagcgtcttgataaactattgtctgtggagcaggatgagatccagacaactctgtctaaccccacgaaggagattattgatttgagcaagaagataagttcattgatgatgaacaatgatgattggtctgagttgctaaagttggctgatgataatgagcctgccacagatgataagcaagatcagttccttcaaaaccgcattaaggaaaaattgcatatctggcttctccataaagtaggggatggaggcaaaggtcccagtatgttagatgaggaggggcagggtgtgcttcatttggcagctgccctagggtacgattgggcaataagaccaacaatagctgctggtgtgaatataaacttcagagatgctcatggatggactgcactccactgggctgcattttgtggaagagagcggacagtcgttgcacttatagcactaggtgcagctcctggagctgtaacagacccaacaccaagtttcccttcaggaagcacaccagctgatcttgcatcagccaacggacacaagggaatctctggtttcctagcagagtcttctttaacaagtcatctgcagactctcaatctaaaggaagccatgcgtagcagtgcaggagaaatatctggtctacctggcattgtaaatgttgctgatagaagcgcctcgcctttggcagttgaaggccatcagactggatctatgggagattcactaggtgctgttcgtaatgccgcccaagctgctgcccggatataccaagtttttaggatgcaatccttccagagaaaacaagcagttcagtatgaggatgaaaatggtgcgatatcagatgagcgtgccatgtcactcttgtctgctaaaccatccaaacctgcacagcttgatcctctgcatgctgctgcgactcgaatacaaaacaagttccgtggatggaagggaagaaaagaatttctgcttattagacagcgaatcgtcaagatccaggcgcatgtgcgaggtcaccaagtgagaaagcattatcgcaaaataatttggtctgttgggatagtggagaaggttatattgcgctggaggcgacgaggtgctgggttgcgtgggtttcgacccacagaaaatgcagtcacagagagtactagcagcagcagtggcaacgtgacccaaaacagacctgccgagaatgactatgatttcttacaagaaggacggaagcagactgaagaaaggctacagaaagctcttgccagagtgaaatccatggttcaatacccagatgccagggatcagtaccagaggattttgacggtggtaactaaaatgcaggaatcccaggctatgcaagaaaagatgctcgaggagtcgacagagatggatgaaggccttttgatgagcgaattcaaagaactgtgggatgacgacatgccaacgcctggatatttctaggatctaacgtcttgtgtatgcgcttgtaaattacttccaggtctttgtacatagcattaccaaatcgataacctgtagttgcattgctaaatttttgtatgttttgaagtttggttggtacaataatttttgtatgcgttttgtacagtaattcttctgtaaaatgtatcaaaatgatgtagctcgtgaaaagcttcagatagttggagaagctaggtctagaatctgcagatagtttgtgtaaggaaaaatgtttaatccttgctatgttttgactacggtgtctcgagttccaacggttgtccaggctgacagcgtcaaaaaaaaaaaaaaaaaaaa

SEQ ID NO: 20792 - DNA, 2250 bp, Oryza sativa
  Clone ID: TF_OsC1713_5567
agacacgaatcaccgtgatgttcatcagtcaccaccccggttagctactttgcttcaatataaaaaggagataaaccattctggttctgggtatcgaagtctccaggcaaaatgtgagaacatctgtggactcagggaaccagaggctctttgcaaaaagtgagacgccttggacaaaacgtgtaggagaggaccagggcgccttgcccaccttgcaaacacccatgctgttcacctagcctccgtgcttgcagatgccttcaaggacgccagagcttcccgtaatgcatcctccatctcagagttccctggatccaacttgaatccatcgtaaagtgtttcgcaagcactctcatagtccttcagtagcatcagagcagcaccctgtcggtagtaggccttcagccagtcaggccgcaatttcctgcattcataagcatccaacaaagccttgtgtccatcacccatgtgatgccagcaaaggcttctatttgagaacaaggttgcatcatcagggtaaaggtacagtgccttactgtagaatcctgttgcagatagataatcctttttctcgaccgccttattacccagtgactttaaatctgttgctttccttttattgacaggctcaccattatcagaaatgttacagttggcaccagtctcttccattaagtaattgaagcactctgtagaaccactgttttcagcagttaacatgcgatcttcactgacaacagcaccaaccttaatcaggagatttatgcattttaattcaccagaatccatagcagtatcaagaggtgtcagaccatctaccatcttgttaaaatctgcattgtggtccaataaaatcttcatagcaccatctcgcccttcagtagcagcaacatgaagtggtgtcccacagtaagctactgggtccacacaagctccttttgcaagtaatagctgtaccattccacattctcctaaacaaatggcgaaatgtataggggtgaggccgttatggctggctttgtttgcgtcggcaccacgatcaagaagatactcgacagtgcttacatgattgaagactattgcaataatcagaggagtcctacctgtcaagcacacagaaaagcttattgaagcaaagtaactctgtattacattaaaagaaacaatatcagtttttattttctttgaaatatatcgccataaaaagttataatggtaacaccattttctgagagcatggcatctaaaagttgctcctcaagataataaagtatgagaaaaataaaattttaggtatcataggaagtagaaatgtctgactgagtgcacgagataacattgggcagcctagttattatggaacatattgagtattataaccatgggaacataacagaatatggaaatgaacccattcattttgcaagttaggtgaaaattgatgcctattaaacattgcttcacagtgccatgcataatcttatcaaacacaagacaatttgagtacaacctaccatgaagttatcattgagacacattgatcaacaaaacaagctactcaacaagctagtgccccgcaccaatgtttttttagaaaaaaaaggcacattgtagattgtttaaaaatggtgtttttttttataacgctgaaaaggattaataagaacttaagagtacgtgcacgtgatcattcataacggtgcaaaaaggaggggttttgtatcgggcgagagaatgagagatggacttcctggtcagcgtcatccacgtccagccgcagctcctcgacgaggtagcggcacacctccagcctccctttgccggcggcgaggtgcagcgcccccatcccgcccatcggcgcacctctcaccctggccgcctgcaccgcctccccgattcgacccctcccatcatccagcaacgtcgccatccccctgacgatgtagaggtccccgttgtgagccgcgtcgaagagcaacttctccaccattccgtcggctgcacgggggagcgaggagcagatcgaattagtcgagttagggtttggtaagggaggcgcttaccgtagccggtgggggcggaatccgatgccatggaggctggctggtggagagcagagtgggtggtaccgtggtagggttttggggctggaggagagaagggagaaggggaaagagagagggggagagaggaggcgtacgcgggaagccaagggaagtcacggggagaagtatagtgtgtcatcagttc

SEQ ID NO: 20793 - DNA, 4180 bp, Oryza sativa
  Clone ID: TF_OsC3235_1
gaagggcaatactgaaatgaatgaaaaaattagcaagtaaatgagtgcaaatgcaccacagttttttgagcttttgattgcatcaaccaaagagattttggcaggaaaaaaaggcattgccagaagttaaggcaagcagggggtgatctcatacaacctatacatccatctgccacagctatagatgagatcacttctgcgaaaacggaagcaaagaaaggtttgagctttattctgactaaaggaacctagtgttgggtgaaactgactgtacatttgaatgtacattgaaccactgaaaatgtgatggtgagcctaagagagatcagtaactcttgagagatggctgccatggtcatggtcatcactggacctgtggcttgacaatcctcacgttgctatagaagcgcttgaagtccttcatcgcctgctcttcaatctggatcgagcgaatcgaggacggagcgtcggcctctggcttgaaccagcggttgggaacattgtccttgatgccaccaacctcaggtgatgtgccctgggaaggtatagcgaagcccgatgtcctggtttttggactgtgggagatgccagtttgccgtttctcctgttgcatctgtatgtccctgagagaaggccgcaatacattaggtgaggtagcagaagacgaccaggatagtgtgctcttatccccttcagaagcaggcacgacacgagcaggtgtgacagttatcggtgtagagcgtgcatcaggtataaacgaagaaagtcgcatgcgcccagcactgtcaggtgagtcctcaaagcggtcttttgccttggccgtgatcggctcgtttgttttcctctgctcgctttgaatatctcgaagggaagcagatccctttgttaccttagcaccaccccaggcaggaccttcatgctttggtgtgacagtcacaacaggggtaggcgggcttggttttggggtgtcatcaagagcaccactcagaaacaacgataagccacctttcctattcttcttctttgacgaagttggctgggaagctttgttttccaatggacaagagatagcctttgtgttaatgaaagtgacatgctctgagggtttgattgaatcagcaacgcttgcttccttttctgcagaaatatggactggtaagacttcctgaagatccttgacatagatttggtccctgtcctcccttttcaccaagggagtatcagaatgtgctgcctgcttgtttttccgcttctgtttcttagaaacactcgatttcttgtttgtcttttcttctgtaacacagactggagttcttaaatctgtgggaatgccgagttctgcaagttcaccctcaagggcagcccttgactcaagctttgctagctgctgattatcaagctgatgaccatccagttgtttagcctcgagcatctcaatctgctgcagtttcttgcgaagtgccctgatctgtttagaggcagcttgtccagcattgctatctttctcaaggaagttcccataacttgatattccatatgacttcgatgcagacttctgactgtccctgagcctaagaaatcctcctgcttcatctccctcttcatcactatcaatgacagcaggataagtagctgtcactgtgggaaggcgacgatgactccatggctctgacgatttttcatccagcaatctctctaagtttgcaagagtttcaggagaagcattcataactgatggagctgccactgtgaaaatgtaatcaagattgcgaatagctatatcctcgcagtgcttcttgagctccttagcttccaaggactcggcaacttcaagaagttgtatagaattctttggctccagaatatgctcaatcgcaactttctcacataagctcttcaggctaggtgctcccttttttattacaccatcgcttccagatataccgctgtcaggctgtacatcattaaacatgatgtcttcatccaattcttccatcccaccattccattctaacatggctttcttgcattggattttaggtttgggtgggtactcaggatggtatatgctagaaagcacaagcatatgtgtttcaccaacacaaactgacgttgctcgcttaacaccatgcactcgagtaaacattgggagatcatccttatgtttctttgcatcccacataaaaacatcaccacctgcggtagccaatgcagtccagtattttccagctgagatgttcacaacattccttccacacatagagaatatctgtcggcatcttaaatcagggtccgatgaaacccagtagaaaatagcaccatctgcggttaaaacagtggtgtgcatcactccagcagccactgagatcacctgaagccgctccatacgatggaacttcaggtttgtatttccacccttcttaagacatctagatattacagcacgacgtggagtcacaagccgatgaccccaagtaaacacctcgccatcagttcctaatgctacagtatgatactttgctgcagacacacatttaaatgcttttcctttcaagtactcgaccattcttggaatgcagttggatgctgaattagaagtgccataacctagctggccctccttattgctaccccaggtgaacacttcaccagtatcagcaacagcagctgagtgcttgttggcagcagcgacagaaataatccttgctttcagggaactaacgcgccgtggtgttggttgggtatccacagaagggtaaccaagctggccctctctatttgatccccacgtaaacaactccccagcctctgtagcaatcacagtatgatgtttcgctgctgccacaacattcactcgtttacggcctaatcctactgttacttggcgaggagtaatcacagcagttgtctggccactatggatatctggatgaccaagacgaccacctcgaccaaatccccatgtgtataattcaccatcagaactaactgctacactgtggaactttgatgcagcaactgttttgatgtatgacccatgcaaggcatctactttgcatggtagtttttgtatgtgggcattgcctgttcccagctgataatttgtcccacttccccaactgaagacttccattgcaactgaatcaggagaatctccattggcctgtgatacagggcctgagagaagatcaacaggtgtacgtcccttggtgtcttccaaagcaagggatgctccaaactgtagaagaacactagcaacacacaggtggccaaaatgaagtgctctgtgcaggctgctccagccagattctccatcccttgcatctggatcagcaccagcatcgaggagcctcctcacaattggtagatgatttctccacgttgcaaggtggagagcacaaagaccaaacacatttctgccatcaatgcttccaccactctttttcaacaaagctaaagcagattctacttcagctattgatccttgcttggaaacaagacacagatccttaagagagtttccaggagaaggtctacgaagacctgcttgctttgatgagcctggtggagatatcgatgcctccatgagacctcaggaaatcacgagtatctgataaaagcaggtaggctactgaactgcttggggcaagtctttcacaacggcaatgctattctgggctgtttcacttctaatggcacagctaaagtttttcctaataagattacaagtctggtgtaattacaattctatctcctcatggagaattggggcatcatctctactatgtaagactgttttgctaacctaaagaaactgccaaaataacctaggacagcatgatgctagagcttcatcttgtaataaattgttcttgttagagttccatgaagctaggatgacaattccatctcaagataagattctatataaagagccatctatataatatagatcaatcttgggattggacccagccaagaagaactctcgtcaagaacacatgctgtcctacgccgtctctccctccctctctctctctgtggcacgtatatgctcgcgggggggaggggatccgggcggggaatatgctccgcgagcgcaagggacgaaccgcctccaagctctccacccgcctctcgttctctctctctctcctctcgctcgctcgcgtgcgtgccc

SEQ ID NO: 20794 - DNA, 2064 bp, Oryza sativa; identical to SEQ ID NO: 10962
  Clone ID: TF_OsC341728_1

SEQ ID NO: 20795 - DNA, 2313 bp, Oryza sativa
  Clone ID: TF_OsC43580_1
gcatatccattacctgtgtctcacagccaaaaaaaacacttgttctccgatacatagcgttggcgataagcaacgccggcctcgtctttcttttcttgctgcttcttctttctcttttttggctgtttgctgacgagacaattagctatatatctattgaaaagattttatcattacagccatcctgaacaaaacagaatgctacaaacatattcacgagagacactactttggagcctctaatcagctggttttcttttgccagtttcaccgcatgggtcccataaaccagctgagtgcagcccagaacagcactttctaatattcgaagaagcttcgatatctaattgttataccactgtaagactatacaggtctattgatcgatatctcttgtcccagtaacatcacgagcggaaatttgttacaaaacttctgtcatttctttgcaaccttgggaggtggcgaagatgacgatgaagatgacaagatagaaaacatgctattatcagctctgtctttgctgaatgccttgcgcacatcctcctttaactcacagaaccgcatccttttaacattttgctcatcagaagtgccattttggaggtcgagtgcatcaggactatcgggcaaatcatcctccagaaatttgtcgagcacctgcgagcagttagggaagtagcgacgtcccagctcaactgttttcatgagtgcatccacccttgaacggagccttttgttttgtgttactggtgtctcgttcagatcgacttccttcaattttccagaagtgctagctgcaggaacaatgccaaattctggtgtggtgtctgcttgtgcaatttgcattgcaacctttgcttctgcaggaaaaaataatcttgcaaatgcaactctgttttcaaggtagagaagcttcatgtgaagatcgtcagccaacaaaggcgaggtgacagaatcttccactgccataggtttccttatcatctccctatctaatatatcaatacataatctgtctttgtttgactcttggccttgctccatctttgtattgtagtctttcatccttgttaacctccggcagatactcattgcactctggccatcagcagtcaattgtgatacagctgctcctttgtttaggagacacatgataatagctggctctctcctcatagcagccagatggagtgccgtgtatccacgcgaattcttcaaattcaagttggcaagtctcaagtctaacaactccgaaacaactttcgaatcacagtaagcagcagcatagtgcaatgcattggcatcatccaaggtgatctcagattcgttaagaagcaacttcacaagctcaacatcatcagaatccagtgccctgtggattcttctgacccttttctcatgtacagggtctgaaatgacggtgtcaccctcatttggctgagatttttggcgaatctcttttatctgaacagcaacttctggaggaagttccttatccaacgatacattatcaagatttgatcttgcaattctccgaatacatttttcaagcactggagtcagctctgaatgaaaagcaacttgcagaattggaagaacatcttctactagagtcttatcgacgaagttaagaagccgtcgctggaacagcgagatgagctcggtgatcttgaacgcccacgccgcgtacatttgctcgacgttgaacctgatcgccggcgggcacgagtcgtgcgggcacatggggtcggcgcaggacaccacgtcatccggcgccggccggagcttgcccgtgtacaggtaacccagcagcgacaggaaggcatcgcgccccacgcggcctcccggcacgagctcctccatcttgtaccgcggcctccccccagtcctctcccctcccccaccaccgccgccgccgccgccgccggcagccccatcgccgccgcggccgcgcgccgcgaagaggttgtagaagaaggtgctgcgggcggcgaggatgcagcggtggactggcacgggcgggccaccgtcggccacgtcgacgtcggcgtcgctgcagtcgaggtcggaatcgaggaggagccgctcgaggttagcgctaagccgattcaggctcaccacctccacgctactactccctcctcctcctcctcctcctccgccgccgccgccctccccggcggcaaccggcgccgcctgcgccgccaccgcccctgcccccggcggcgcaagagagaccgagcacgggctagacccgttcgagaggtacgaggacgacgacgcgatggtgatggacgacgagggctccat

SEQ ID NO: 20796 - DNA, 2377 bp, Oryza sativa
  Clone ID: TF_OsC102369_1
atggaggaggaatcccaatcccaatcccatttcccgctccggtgggagagcaccggcgaccaatggtggtacgcgacgcccatcgactgggcggcggcgagcggccactacgacgtcgtccgggagctcctccgcctcgacgccaacctcctcatcaagctcacctcgctccgccgcatccgccgcctcgagtccgtctgggacgacgacatgcgcttcgccgacgccgccaggaaccgcgccgccgtcgcccgccgcctgctccacgactgcgagccccccaggggcgccgccgctggcggcggaagccggcccaaccggctcatccgcgcgggctacggcggctggctcctctacacggcggccgccgccggggacgcggccttcgtgcgggagctgctcgggaggcagccgctgctggtgttcggcgagggggagtacggcgtcaccgacgtgctctacgccgcggccaggagcgacagctccgaggtgttccggctgctgctcagcgcggtgctgtccccgcccgagtgctccgccgggggagaaggcgacggcggcaccgccgccattgctgggggtttcatgttccggtgcgagatgatgaaccgcgcgatgcacgccgcggcaaggggaggcaactggaggtcctcagggagctcctgcaggggtgctccgacgcgtcggcgttccgggacgctcagggatcgacgatcttgcacgccgcggccgcgagggggcagcttgagctgtcacgaatgtttggttgtgaaggatcttattgcctctttcgatatagtcaactccacagacgagcaagggaatacggcattgcatctagccgcctttcgaggtcatttgcccgtggtcaaagccctcatcactgcatccccatcacttatatcagctacaaatgaagttggcgacacgttccttcatatggcgctgactggctttaggaccccaggattccgaaggcttgatcgtcagatggagcttatgaagcaattgattggtggagtgatcatggatttaagcagcattatcaatatgcaaaacgacgatggaaggacagttcttcacttggctgtgattggcaatctgcactctagccttgttgagctcttgatgactgcaccgttgattgaccttaatgtccgggacaatgatggcatgactcctctggatttacttaggaaacagccaccaacagcatcgtctgagatactcatcaagcagcttattttggctggtggaattgcaaattcaatggaccatgagaccagatcagccattgcttctcagctaaagatgcactgtatcgtaggcagcccgggaacatccttcaagatcccagatgccgagatcttcctccatgcaggtatcgatgcgtcagacatcagcgaaagaacgaactcattctctagcgttggacagagtgagccagaatttccggaatccagtcgtaagaagctgaactctatgcaaaatgcagcgaaacatctcaagatcctactcagatggcccctccgcaaggagaagaaatcatcatccggtgcccgaaatgaactggacgacgacgcatcctctgtggattcagtcaagagctggagccacggggagaccccgacaccgctgaggcagaagtactccaggatgagctccctgttcaacaacaagcggaccatggcagccaggatcggctcaccgagtccatcgatgaagaagagcttcgcagatggcctcgcacatggcgtgatgcagcccgaatcgccttcaggctcgggctcctggtcgtcgtcgtccttggtcgacaggattgaagccgtccatctggacaagaatggccaagcatctcctgataccagtgtggtgatcaggcgtacacccaagaagcacgggtctttgaacagcaggctcatgaaccaatacttctgcatcggagcgcaggggatagctgtcgaggactcaaccacggggcagcgatcaagtcggatgttcagaagttcacttctgtcagctgcctgaattcgtaatttagacatggtttgctttccttgacttcactgcttacaagttacagctgatctgttagtatgtgcgagtgcatgtgagaagactgtcatatgttgtgtttgtattactgatgcaaaatggtgagatctactaatgtaatgtagtgctgttggtagtgtgtaatgattttgttgggagagtgagtacaatggaaggcatggttttcaaaaaaaaaaaaaaaaaaaaaaaacaagacaatacgagctcactgagcctcgtgcctgccgcccgaaattacattggtggtacacgaacttgttaagtgggtgcaatttagcctcgtgccgaattcctgcagccc

SEQ ID NO: 20797 - DNA, 1482 bp, Oryza sativa
  Clone ID: TF_OsC68848_1
tcaaactgcatagaggcggatgccaacgattaatcttacgcaaaatatatggcacgctgagatatattggtgcacaagttccaactaggaatcctccgtactaccgttggaaatctcacatgatgcacatgacacagaagatgtaatttttacaggacaattggcaggttgagaatgacccatgctggcaacgtcaggattgccacatgatggattttcatacccttgaagctcttgtttgtcaccatcacacaccggtagaacattgtcacgagtacttgttgctttgtcgaatagcgtcaaataaatagaggcctaattaatcgttggttcctcaagttgacatttccaaagtttaattacagcttgtggtttagaagcctgcaattcagggtatatcgtcagctcaagcttgagtggccgagtttgatttcgtgcttcacggggtaaaatcaccgcccaaattttcctagtcaggaattgtggagcaaatgcttccaaaaatccaggaccatagttctccctcatccatccacaaaaaagagaaatacgtccctctatggctcgtacgacattcacatgacccttttctctagccaaatcaagtgccgtgtggcaatcatcatttgttataaacggattagctccatgagatagaagcgaatggatggtcggctcaggacctttcttgtcctcctggctgggtgtggatatcactgaaggtaatggacggtaggcgttcacatttgcacccaattcaatcagcacctgaaccacattgatcagatcaggccgcatgctcgcgaccatcaggggcgtcttcccttccttgtcgatccactcaagacctgcgccctgcgcccggagcgcccgaatcccatcggcgttgccgtagttgaccaccgaaggattggcctgattaaactttggttcctcaagttgacatttccaaagtttaattacagcttgtggtttagaagcctgcaattcagggtatatcgtcagctcaagcttgagtggccgagtttgatttcgtgcttcacggggtaaaatcaccgcccaaattttcctagtcaggaattgtggagcaaatgcttccaaaaatccaggaccatagttctccctcatccatccacaaaaaagagaaatacgtccctctatggctcgtacgacattcacatgacccttttctctagccaaatcaagtgccgtgtggcaatcatcatttgttataaacggattagctccatgagatagaagcaaatggacagtctgctcaagacctttcttggcagcatggtgcaatgcagtcccacaatatgacccaggacggtaggcgttcacatttgcacccaattcaatcagcacctgaaccacattgatcagatcaggccgcatgctcgcgaccatcaggggcgtcttcccttccttgtcgatccactgctgatacaccagctcctccttggattgctgcagccccat

SEQ ID NO: 20798 - DNA, 724 bp, Oryza sativa
  Clone ID: TF_LIB4371-012-R1-K1-H5
gtcgcgttttactccacccacacatcccccccccccccgcgccccgccgccgagctcgccgggcggccggcgagagggcgtgcgcggcgatggggcagggcgccagctgcgggcggcccatcgaggaggtggacttcttcggcgcggcgcattcgggcgatctcgcccgcctcgccgccgccgggcggtggcgcccttcccttctttgtcgcaccacgctcttcgaccgcctctccgccctccacatcgccgccgcccacggccacctccaggtggtgtccatggcgttggatctttgcgtgcacccggacgtcgttaaccgccacaagcagacggcgctgatgctcgcggcgatgcacgggaggaccgagtgcgtgcggcggctgctcgacgccggcgccaatattgtgatgttcgattcgtcgcacgggcggacgtgcctgcactacgcggcgtactacggccacgccgactgcctacgggccatcctctcggcggcgcagtcggcgccggtgtcgcaatcctggggtttcgcgcggttcgtgaacgtgagggacgacaccggagcgacgccgctgcacctcgcggcgaggcagggctggcggcgctgcgtccacgtcctgctcgagacggcgccatcgtgtcagcctccagtagcgcctttggattccccgggagcacgccgctgcatttggccgcgcgcggcggcagcctcgactgcgtc

SEQ ID NO: 20799 - DNA, 2353 bp, Oryza sativa
  Clone ID: TF_OsC22761_1
ttttttttttttttttttttgtcaaacgaaagttgaattgtaagaacaggtgaaaatttctcagggtatttgtctacttgcacgaaagcatctaatgttacagattattatacatcagaagttcaaacctgcatttctcatctattggcactcgaaatcgaatacaacacgatatgtatggtaatagtgatgtaaccgccaaaaaagaatacatatatagcacatacacataatctacaaaatcaaaccattcccatgactcaaccttgtataaacacctggatgaagcagagtggctcaaaggggagatcgctttccgcacctgttgttgtccatccaagtcagaaaattgttcaaaccttctctcctggatcttatgaactgtgtgactgtataagactggtatttgctccagaaatttgtgactagcttcgttgcactgtttgttgaagcgttggccatgcagcctcctcgtcattactgtatccatttacaagaaaatcagcgcagttcctccggcatcctcgactgtaaggattcctgaagcgtccgtcaggcccccgaagatatgcatagcgtgactggtttgctgcttcattagttgtgagattgcgtgctatcatttgctcttccaagaacttacgccataggggagtaatagaaacatagaatactttaagctgtgttgcttgtgctcctgtcagaataagcgctccagtcaataaaaagacatccatgaacatgaacagtacagcaccaggatggtttgacagcatgaagttaatccatgactcagaagatgagagtataatgggctctgtccaaagtctgtggaacccaatcgcagcgcccagaaatgctgtagttgttcccatacaaaggaacacaaaaaagtcccacttatttctccttccaacacaatttgatatccaaggacagtgatggtcaaactgctcaacacagtgcttacaagttggacaatgtttggagcgcattgggcgaattatcttgcatgtggggcataactgagaccaattgcctgtccaagcagaagaattaaggtcaatctccataagtggttcctttggatcaagtcgcttggtattggcttggatgtagcctggattttttctgcttactctgtagaacatcaccaatgaagcaaaggcaagagaaatagcaccccatgaccaaataccaacagcggcagttattctagaaaaattcggtgcaaaaataattgagttcagaaaaagggtgataaggacaataagaaagcaaaacaggatagaagcatatccaatcttccgcgatctccctgagcagtacttgtcttcaaatgttacttttgtagcattggaaaggatataggaaagatgccgatgacctttgtcgtttgcaagttccacaggagtaaacccaccgctatccttcaatgtgagttcctccttggtaccagcatgtacaagaacagtgcacacctcataatttcctcttattgctgcccagtgtaatggagtacaaccatttttgtcttgccttacttgattagcatccataaacagcagtaacctaattgtatcagcatttcctttgtaggcagcccagtgcaatggactcctcccatcattgtccaaacactcaaagtctgcaccgtactttgagataatgtggtgcaagaatgctgtttgtccatactgagctgcaacatgaactgcccggtagccattcacatcggccgcctcgaccctcgcaccgttctccagcaacacgtccgccgcagctatggctccacgcaccgccgcccagtgcagggccgtctgctgcgcattgtccccggcgttgacgtcgcctccatgctcgatgatgtagagcgcgacgtgggggtagttgttgagcgtggcccactggagcgcgtggtagccgttgccgtcgggcgccgcgagcgacgcgccgccgtcccgctccacgaacccgcgcagacgctccaggtccccgtacgccgcggcggagtacacgtccaccacggggtccccctccccgccgttcgcccgcgcctccctcacctccaccaccccctgcttcacccctccacctccgccgccgccgccgccgtcgccgaccacctcgatctccgccatcccgcgcctccctcacctccaccaccccctgcttcacccctccacctccgccgccgccgccgccgtcgccgaccacctcgatctccgccatcgaggcgaagctaggttttcctctctctctctctctctctctttctctctctgttttttttttttttttttgcgcgcgcgagggggaggaggtgaggttggctaggtcaagatcctcgtgc

SEQ ID NO: 20800 - DNA, 2891 bp, Oryza sativa
  Clone ID: TF_OsC6747_1
ctgcaggaattcggcacgaggtcaagctcgcgttcgtctacaaactgccctccatgtctctcccccgccgctttggatcaatcgtcagcgactcaccattcggcgactcggccattgacagcgatagtcgcacgggttcttgcttatttggatccgttcttccggggagcgagctaaccgggcgagcgagatgcagcaccagcaagctaagtttggttctgagtaaccgggctggtgggttagggtttgggggaaatcaagaaggcgcaagtggtccatattttcttggtggtgcttggtttcttttcaaccgtagagttcttcggtacttcagaaatgatgggtatgaatggcgaaaaaagaagaatgggaagactattgctgaagcccatgagcgccttaaggttgataatgttgatgcactgaattgctactatgcacacgcagacaaaaactctacatttcagaggcgtatatattggatgcttgatccggcttatgatcacatagtttttgtccactacagagatgttcaagagggcagcatttcagtatcagcactgaatgattcatcaacatccaatcagaatggcagtggtagcagagctgaggctcaaagttcacccggattgactagcgagctatttgccccatgtcttaattcatgcagtccaggatctgcggaagaagttagttcccagattatggccataaacaacgaaacaaatagcgttagtcaacctgattgggttcaacattgtaatcaggcagcgctgcgaaaacttaaggtgcagctgagtctggaagatagggaagatcatgatgtcgatgccaaagatattccatcaaacagtgaacctatcactgtgtatgggattcagaatgaagaaccaggcacttgtagaaatcttgcagatgtttttagtggactggagttcagcaaagaaaatcatcctgaagaaaccggactccctttttccagcactattgatgtgctgaaaaattcagacacttggttggaggaggatcagattgaagcaattctgcattcagcatctatgatagtgactgaaaaccaatggttcaatattcgtgaggtttccccagaatggtcctattgttctgaaagtacaaaggttatcattgcaggagacttccttcgtgatccctctcatggttcatgggcaatagtatttggcgatgttaagttgcttttcgatggtcatgtttctgagcaatttttaaagtttggcttgccattcccaaatcttgaatgcggactccaagttagcccatctgaaattatgaagggggcatctgagcggctgaaccgtgacaccgcagtaaattgtgtcatggaagtactgcttaacaacaagtttgaagagtggctgttttctaaatatgaacaaaatagtgaagggaatcattttctccctaggcaataccatggtgttatacatacaattgctgccttggggtacaactgggctttgaaacttctgcttaattcaggtgtacttgtaaactaccgtgatgcaaatggatggactgctttacattgggctgcacgatttggcagggaagagacggtagtgctccttcttgatgcaggtgccgcagctggtgcactgtcagacccaacagcacaagatcctgctgccaaaacacctgcttcagtagcttctgcatatggtttcaagggcctttctgcgtatctttcagaagcagaactaatagctcatcttcattctctcgaatcaaaagaaaacgggtcttctggagatcaaatatcaagagttgtgggcagaatatcagacacatctgcccatgcacaaagtggtagcgatgatcagcttgcactgaaggaatccctaggagctatgcgatatgctgttcaagctgccgggcgcatacaaactgccttccgtattttttccttcaggaagaaacaacaagcaggtcttcagaatagaggtaaccacattatatccattcgtgaggtaggtgctgcttcacacggtatgcttgagaaagccgcgttatctatccagaagaacttcaggtgctggaagaaacgcaaagaatttctgaaaatacgcaaaaatgtcatcaagatacaggcgcgtgtcagagctcatcaacaacataacaagtacaaggagttacttcgaagtgtgggcatccttgagaaggtcatgcttagatggtaccgaaagggtgttggtttacgaggattccaccctggggcaatagcaatgccaatcgatgaagaggacgaagatgacgtagccaaggttttccggaagcaaagagtggaaacagctctcaacaaagctgtttcaagggtatcatcgatcatcgacagtcctgtcgcgagacagcaataccgaaggatgctcaaaatgcacaaacaaaacaaggatgatgatgaaaaagtagaagtttctccagcatctcatgtttatggcagtggcagtcatcacatgtgttggctaagctacaacaagcaaccaatgttctaggcagtgcagtcatcacatgtgttggctaagccacaacaacaagcaatgcactagctggccagtattgccatgtccgaccttgttaaatgatctgacgagcagttggccttatgaagaacagtaaatccttggcgattcactgtgcagcgaatcctgaaaaaccagaggaatttatcgatgatccagtaccatcactggttcttcttgcccttgctctgaaaaaatgtgttttaccttttgtacataagaaaaatcatgtgcaaagctgactcttggccaatattcagaaaaggtgtaccctctttgcatttgttacccttgtgtatatgataatgaatgtgtggtgaatctttaaagtgaagctta

SEQ ID NO: 20801 - DNA, 1350 bp, Oryza sativa
  Clone ID: TF_OsC50757_1
ttcggcacgaggaagcgcgagggcttcactctctccacaacgacaaggacagagagaaaaaccccaaattccaatcccaaaccctaatccccgctcgccatgccgagggggcgcgtgcccggcggctcgaccgccaacttcagcgcccacctcatcgcggcccagctcgggatgcagtgccgcatgggtcccgcggcggcggagcagatgaggcgcgtcatcgcgtcgtcggactgcgacaccggccgcgtcatgaggatgtttggtgccatggaaggtggcgacagtgattctgattctgatgactctgcggagacggagaaagttgggccactgcatgaggcagcaagcgcagggaaaatggatacttgcaaacatttggtggagcagcttgggtttgacatcaatgctgaagcaagtgatgatttgggtatgacacctttggcttgtgcggtgtccaagggaaaagcaattgctgtgaggtattttcttgacaaaggtgctgatccaaataagcaagacaacatcggttttactcctctgcactatgctacaaaagaagggtatgatggactggcacgactactgctgtctaaaggggctagtgttgatgttatttcttctaaaggcacagccctgcatcttgctgcctccagttggaagtctggcatcatgaagattctattggagcacaatgcagatccaaacaaggtctccgcagattcagagacaccattagctgcaacacttattgcttctgatggactgaatgaacctgctgtgctgaagtgcataaagcttcttgttaaggctggtgctaatttgaaccgcgctattcctgatacaccactggtgatagcaactaacaaagactttgttgaatgtgttgagtacttgttggaggctggtgcaaacgccaatattccaactaataacggtggtaagacaccaatagaaatagccgcgaagtctggaagaaggaagcttgtggagattctatttccttgcacgttgccaattaaaggtgtgtcaaactggactgttgaaggaatcatcacccatgtgaaatcaaaaaaatcaaagaagaaagcatgcgctcaggataaggaaagtggtacagacaaaaaggctcagttgaaatcattgggtgcaagtgcagttcaggggaaggactatgttggtgcatccaaattctacagtgagatgagggtgagaggagtagcaactggcatttccttggtgaggttaaacatggaagaggatgaaaaagtgcctggaagttctaataccagttacatttagacttgcataggactgaaaccagattgggcaaaaggttactatcggaaa

SEQ ID NO: 20802 - DNA, 1674 bp, Oryza sativa; identical to SEQ ID NO: 10930
  Clone ID: TF_OsC75595_1

SEQ ID NO: 20803 - DNA, 1566 bp, Oryza sativa
  Clone ID: TF_OsC52071_1
tttatatcgcgagcgccgccctttttttttttggttgtttcgcatacctaacaaaaggggaacatcactgccaagaaaacaaagtttcggtgaaagttctctttcattggctacaggccacagccgataagcatctacaggagtagattagtagtcgattgcagtggaaacgtcacatgcccgatggaagttccagctccggagatggtgtatggaattcagaaacacgcttgaacaaacgtagcagcagccaaagcagccagccattgacgcttagcacaatttgctggccattgacgcttagcacaatttgctgacaatccattggattattgctccggttctgattctgcttggcaaactgggaggtggtaagtatccaattgccagtatttctgcttcaccccattccatatttcctctgaaagacaatctttgactgggagcgggatgaactgtgtcgagtagccaagatttgccaactctaacgctacgagctggcaatacacaacgtggaagaaggcattatcgccacagaggccattgaaatacgagtagatccctccaggcttcaatagcttaggaagatgttggtggaactctctcatatcctcgtagtattctccataggtgtcgaagaatataccatgctgttttgtaatgaaataaacatgaacaaacatttttggatagtaatgaataaggaggactgaattatccaatgcaatgattttattgagtatagcatcatatttatcactggctgcagaaatctgagacgaatccaaaaggtagaaatcctgctttgcaatcccttcaaaacaagagaccgacaactcatcataagagccgagctgcgggagcacgtcctgccaccgtccgaacacgaccttgacattcttcttctcgccccagccgagcttgagcatccgggcgtacacctccgggtgggcctcgacgatggtgtgctcctcgggctcgtacctctggatcgccgtgtccacgagccccatcccgaatcccacgttgagcaccttgccgccggagcacaccgcccgcgcgtgcgcctccatcagcggccgctcccactccatcatcacggccttgctatccgcgtccatcaccctctcctcgctgaatgaaaccctggattcgaggtagctctcggcgggggagtccgcgggccccgcttggcggcgagcgacggtgccgaggacgagctcggagcggagggcgtggtcgaggaggaggtcgaaggtggcggaatcggaggcgaggtctcccgcggagatccccgtgggggagagcgcgttccatggcgcgccggcgtcgaggagaagctgcacgacggcggcgtggccaccggtggccgcgtgcatcagcggggtcaacccggaggcatcgaagtgggtcgggtcggcgccttcggcgaggagcccggtgatggcctccgcgtcaccggactccgccgccgcgcagaggagctcctccggcgatttccccgccttgctctccgccgccgccgccattttcgccggccgcccggggatccactagtttagacgc

SEQ ID NO: 20804 - DNA, 649 bp, Oryza sativa
  unsure (1)..(649): unsure at all n locations
  Clone ID: TF_OsC55485_1
caaggatgtgctgacgctaaacaattctcttctcactgtcgcaaacatggatggtgagacaccactgctcactgccgtgacaaatggacacatgtctttggcctctattctacttgaatgctgctgcacactagggttcagtgaggcaatcttgcaacaagacagaaatggttgtaatgcactgcaccatgccattcattgtggtcacaaggaccttgcactggaattgatattaaaagagcctgccctatcaaaagctgtgaacaaatacagtgagtcaccaatgttcatcgcggtaatgagagattttacagatgtttctgagaaactgttgggaattcctggatctagccatgttggaacatatggccacaatgccttgcatgctactgtgagaaatggaaatgcagttatggctaaaaaaattttggagggtcgtccttggctggggaaagaacgaaccagagagaggaagaccccaatcctgatgacggtaatttgggacaagatagacgtgcttcgtgtgttgttggaacatgatgtgcttttagggtatgaatgctatgagatngtggtaatctgagccctcttcttgttgctgctgcatatcgaggtcatgttgatgttgctcaagagcttcttaaccact

SEQ ID NO: 20805 - DNA, 1040 bp, Oryza sativa
  unsure (1)..(1040): unsure at all n locations
  Clone ID: TF_OsC24838_1
gcacgaggcgaaaccgcgctgtacgtgtctgccgagaaggggcacactgaggttgtgagtgagatactgaagttttgtgatctgcagtcagcagggctcaaggctactaacagtttcgatgcgttccatattgcggcgaagcagggccatctggatgttttgaaggagctcttacaagcatttccagcattagctatgacaacaaattccgtaaatgccactgctgcgcgtgctgctgccactcagggccatattgatattgtcaatcttctgctggaaacagatgcaagcctagccagaatagctagaaataatggcaaaacagttttgcattcagcagcaagaatgggtcatgtggaggtggtaacagcattgttaaataaagatccagggattggttttagaacagataagaaaggacaaacagcactgcacatggcttcgaaaggccaaaatgctgaaattctgcttgaattgttgaagcctgatctctcagttatccatgtggaagataacaaagggaacagagcattgcatgttgcaactcggaagggcaacaccgttatagtccagactctaatatcagtcaaagagatcgtaatcaatgcagttaatagagcaggagagactgcttttgctattgcagagaaactaggtaatgaagaactttctaacatcctgagagaggttggtggtgaaactgcaaaagagcaagtaaaccctccgaattcagcaaagcagcttaagaagacagttagcgacattaggcatgacgtccaatctgggatcaagcaaacacgtcagaccaagatgcaattccaaaaaatcaagaagaggattcaaaagcttcacattggtgggctaaacaatgccatcaactccaatacttgttgttgcggtgcttattgccacagttgcctttgcagccatatttactatccctggtaattnntctggaagatatggaaagatccacatgatcccaacatgaccttagggcaagcatttgtagcaagcaatcccgcatttataatcttctg

SEQ ID NO: 20806 - DNA, 398 bp, Oryza sativa
  Clone ID: TF_OsC308714_1
cccccgatggaggagaaggggatggggaagcagcggtgggagaagatgctcctccaggccgccttcgacggcaaccttcgcctcctcaggaagatggcgcgcgggctggtcacgacggggcgcggccgcggcgaggcggacgtcctggcggccgtggcggacggcggcagcgggagccgcgcgctgcacctggcggccaccgaggggaggatggacgtcctcacgtacctcgtcgaggacctccgcctcgacgtcaaccaaaccaacgacagaggttctgatctctgattcctttctgcgttttttgggagaactgcatctacaagatatctgcttgatcatggtgctgatccaatgattgttggtaaatcaggatcacctcttcatgcggctgccgg

SEQ ID NO: 20807 - DNA, 1581 bp, Oryza sativa
  Clone ID: TF_OsC115270_1
atgcctccttccctctccctccaccaccacctcctcctcttccccttcccttcccatgtccaaaccctaaacccgctctccgcctctcctcgcctccacccacatagcaaatctctcctccccaggcgccgcccgctcgttacctctccctcctccttcgccgtcgccgccgtcgatgaattcgacgaggatttcgccatcggcgactgcgtcgtgttcgaggacgacgccttcgaggagcccgatgtcgacctcccctctccggcgccatcgaccacctcgcgccccaggcggaagccggccgcggaggccggcggcggaggggggagtagcctggtgccggagaggtggagggacgcggcggaggagataaacctgacgaagaaggagaagcgccgcatcgcgcacggcttgcgcttcgggagccgcctcgagcggcgggcgccccccgccgtggccgcgcccgatgagtaccgcgcgtaccgcgaggggaggctggacgcggagctcggacgcgtcgcgcgcgactaccccgagccgatcgagaggtcacccgtaccggatagagtggaggctccgccgcctcctgagcctggtgctcgtgtggcacctaggaatccgaggttggggctgggccgacggaagctgttcacagatgaggagaaggttcttctgaacaagagagtacctgatcttgaagctgctacttctagcaagtggcttccacttcacacaattgcagcatcaggagatttctatctgttggacaatcttctaaaacataatattaatgtgaatgcccttgataaggatggtttaccagctattcataaagcaattctttccaagaagcatgccattatcaactatctcctaaggaattcagcaaatccattcatccacgataaagatggtgcaaccctaatgcattatgcagtccaaacagcatgcagtcagaccataaagactctcttgctgtacaatgttgacattaatcggccagatgattatggatggacacctttgcatctagctgtgcaaacacagagaactgatatcgttaagctactcttaataaagggtgctgatagaactttgaaaactcaagatggatttacccctttggagttatgcctccggttgggtcatcatgcaaggacgtatgaacttatcaaattactcaagagctttcgtctaccaaagcaacatgacccagttcagcacttggatgatagaggttgctccttgaagggaatcaacaggttgtggtatgcccatgataattggaaggccaaagttccatgatatcaatgctgtataatcttaagaggttagccataaaaaactcaagatacccaaattattaatgccaaatataagtttagcgtgacctgcatacttttacatttccagtagtattattttctctttctaccccattaatcttagatattcctagcatcttggatacaaatattaatcaagaattattttgtttctccttcacgtcccgattgttagtgtaaattctcactgcatcggcagaacagatataatttttctcaccacatgtgaagtggt

SEQ ID NO: 20808 - DNA, 2080 bp, Oryza sativa
  Clone ID: TF_OsC1528_2374
ggtttttggtttatacatgtggcttcattatatgttttgaaacctgtaacaatgtttagtatgtttgttgtttgatcatgtgagggtcctaaatcctactagtaactcagtatttgctagtgaaagaagtcaggatatgctgttttctccccttctcatctatgaccaaaatacattctagaggcttattatagaaaaaaaagtgtttcaacaagcataccgccaaagattttctgtagtcaagtgcgcttaaacaccttccgggacattgaagcaacagtataaagcatccttctggactcacttgacaatgggggccagcccatcgaaccaagatttcccattgatttgattgggttacacgggtggtccatactcttggtccccttcgtgctcgcttcagcacttagcaagtccttcctgcttagttgacaggatggaactatctttagctgcaaccgtcgagacaacaccgatttccagtatgggaagaacatatctctcacttcgcgtatggctgatcctttaggtggttgctttcccaggatcattttactaacttcgcctatatcagaagatgacttgtccgcttcaatagtttccccatagcccactctttgtgaatctgacttgccaatcgacatccccccaccatgttggtagcattcaagttttccagtgtcaatgctttccccagaatgagcaatgccattgctttttagaattgatgaaacatgttcaacaatttcgtcatggcgcacctgtgaatgagtttgaatgtatccctcaagagcttcaccggctttgtgaacaatgccaactagtacaagtgctgtaagaagggcttccttcttgtctttcaatctctttagtgccctgccattctttccctccttaaccatatttaacccctcaagatgtatggtgttaagagcatcatcaatgtggcttttaacaatatcaaacccgttcagagaggctttgccactgctgttgttaaggcggccacggagctgcttttgagcagccagcagcaaaattgctgcctggacatgcttttcttcacgaatgtaattccatacctcgtcgacaatgttatctgtctgtttggcaattaatctagtcgtgtccaagaacattttcatctcaggaagacaaaggaggaagatgaggttgatgatatggtccccatgagcccaatgatcctcaatgtacttgtgcatgctggcattctcgacagcaacatggagagggaggaggccctcaatgacatactcgcccttggtgcagatgttcgccgatgcgccgtaacggaagaggagtttgaccatgtcgacgctgaagttctcggcagccatgtgtaggggggcgaagccatagcggtggcgggtgttggggtcagcgcggcggcgacgcaacagaggagaggtgccctggagtgcgaccctggcacaacgcagagcgttctcgttggccatgttggtgaggatatcaggtaaaaggaagtttccccgtcccatgaaacctgaccaacaattgtagacttgaaagaattgcttgacgctatccttctgaattgctggacgaagtttcggcaatacaacacggacgtacttacttaacttctcctggaacttttcctcgaaatatgctttatatttaggattttttggcacgataccatggataggatcacagttgacgagatcctcaatcttctgcttcagtgtccaagattcgtaatcttcggctccagcttcggcttcgctgggggtgactggtgaaggacagcttccatcttccatcgtcatgcagcaacgtccggggaaccggcggcggcggaaaccctagattgatcccctcccggccttgcccaggaaagggtatgaggcgaggggtcgccgctgctggagaggagagggtgcggttgcgctgggcacccgctggccgccgacggcagcaaggtagatcagtagtgcgagggtaggcggcggcgacggaaggcaggtatgggagcagtggaggaggctaggtttggggaagcctcgtgccgatcctgcagcccggggatccactagtt

SEQ ID NO: 20809 - DNA, 3458 bp, Oryza sativa
  Clone ID: TF_OsC29324_1
atggcggcggcggcggacgcgcggcgcttcgcggtcgtgccgcagctagatattgcgcagatactgaaggaggctcaacaacgatggttgcgtcctgctgaaatttgcgaaatacttaaaaactacaaaagtttccgtattgcaccagaaccaccaaacaggcctcaaagtggctcgcttttcctatttgatcggaaagtattgagatactttaggaaggacggccataattggaggaagaaaaaggatggaaagactgtcaaagaagcacatgaaaggctgaaatctggaagtattgatgtgcttcactgctactatgcacatggagaagagaatgagaacttccaaaggaggacttactggatgttggaagaggattttatgcacattgttcttgtacattatcttgagaccaagggtgggaaatctcgtactaggggcaacaatgacatgcatcaagcagctgttatggatagtccattaagtcaattaccttcacaaactatagatggtgaaagctcacttagtggacagttctctgaatatgaagaggcagaatcaggaggaaccggataccactctttcactcagatgcagcagcagcaaaatggaattggacctgtgactgatgcttctatgttcagttctcgtgtttctgcttcatccataggtaattatcagggacaacatgctatgggacatacaacaaacttctattctagtagtcaacatgattcacctcttgttctcagtgatccaaaccttgaacttgcaaataatggacatgagtcattgtggaatggggttatgaaacctgatgaagggactgttcaaatgactcatctacaacctcctgttcatcctgagcaaggcatgttcaccacagaaggccaaggggttgaatatttgacattcgatgaagtatattctgatggactcagtctgaaggatataggtgctgcaggtgctgatgtagaaccattctggcagttttcttcaaacagctatctaacagaagccattgcatttcagctctctagtgctactgctgatatatctgcaacagagaacagcgtccaacaaaatgatggatctctaggggcagctattggcttcccatttttgaaaactcagtcatccaatctatctgacatcctgaaagacagctttaagaaatctgacagttttacaagatggatgagcaaagagcttcttgatgttgaggattcgcaaattcagtctagctcaggggcatactggaacactgaagaggcagatagtatcatcgaagcatcaagccgtgagccactggatcagttcaccgtggcccctatggttttgcaagaccagctattcagtatagttgatttttcgccaagctggacatatgcaggctcgaagaccaaggttttagttactggtagattcttacatgctaatgaagtcacggagagatgcaagtggtcatgcatgtttggagaagttgaaattcaagcggagatttcagcagatgggactcttcgatgttattctcccccgcataaaccaggcagagtccctttctatgtcacctgttccaacaggttagcctgtagtgaagtacgtgagtttgaatttcgaccaagtgactctcaatacatggatgctcctagcccgcttggtgcaaccaacaaagtttatttccagatacgtcttgacaacctattgtccctggggccagatgtgtaccaagctactataactaaccccagtaaggagatgatcgacttgagcaagaagattagttcactgttggcaaacaatgatgagtggtccaagttacttaaattggctgatgataatgagcctcttagccatgatcagcaggatcagtatgctgaaaacttaattaaggaaaaattgcatgtctggcttctccataaagtaggcgatggtggcaaaggacccagtgtgttagatgatgaggggctgggtgttcttcatcttgcagctgcccttggttatgattgggccataaggccaactgttactgctggtgtgaacataaagttcagagattttcatggatggactgcattacattgggctgcattttgtggcagagaacggactgtagtagcacttattgcactgggagcagctcctggagctttgacagatccacatcctaattaccctgctgaaagcacaccagcagaccttgcatctgctaacggacataagggcatctctggtttcctggcagagtcctctctgacaagtcatcttcaagccctcaatctgaaggaagccaatatgtctgaaatatctggtctacctggtattggagatgtaactgagagaaatgcatctcagcctgcaattggagattccttaggtgctgttcgaaatgccgctcaagctgctgctcgaatatatcaagttttcagggtgcaatccttccagaggaaacaagcggtccaatatgagggtgacaaaggtggcatatcggacgaacacgcactttcactcctgtctatgaagccatccaagtcaggccagcttgatcccctgcatgctgcagcatctcgtatacaaaataaatataggggatggaaggggagaaaggaatttcttctcttcagacaacgaattgtgaagatccaggctcatgtgcgaggccaccaggtgaggaagcattatcggaaaatagtttggtctgttgggatagtggagaaagttatattgcgctggaggcgaagaagggctgggttacgtggttttaggcctacagaaggtgcaatagagagcagcagtggtggcacaagtagcaatttggtccccacgcgtccggctggagatgattatgatttcttgcaagaaggacggaagcaaactgaagaaaggctgcagaaagctcttgccagagtgaagtccatggttcaatacccagaagcaagggatcagtaccaaaggattttgaatgttgtttcgaaaatgcaagagtctcagaccgtgcaagaaaagattttagacgaatcaaccgagatggatgaaggtgatttcatgagtgaattcaaggagctgtgggatgatgatacaccactccctggttatttctagtgttctagactaactggtggtgtctctgtaaatctcttctcttcagttctgctgaattgacacctgccgataacccaaactctcaacatagcatgaatagcatgatcttaaaatcttgaatgcttggatttggattcagttgtggtattcttgcttttatgttatagcgttatgtacagtagaatcttattttatcattgaaggagccatgtatatgcagtatgaaactaatgcagaaagttggtggttgtatcatttgaattcaaagctgcatgtgtgctaagcaatttcttgcattagagaaattcgatgtagtgtggtaacttttattgaaaggatgcagtgtggtaattgat

SEQ ID NO: 20810 - DNA, 1582 bp, Oryza sativa
  Clone ID: TF_OsC180174_1
gtcgttggtagttacagtggaaagatgtgaagcagtctgacaggtgaggtgaggccaaaaggacgatgcagtagctgctcaagggttattcggatcttcagatcaagcagctctcttcagacactcgatcgcctcccttaacgcgttcttgacctcgtcgctcatggggtcaagtttcagtgcctccccgaatgcgtccactgctcctttgtagtccttcatgaaactgagagctgcgccctcacggtaccatgccttggaccaaccagggcgcagcatcctgcactgctgtgcatccagtaaagctctgtccccttctcgctgccgcagccagcaaaggctccggttggcaaacaaggtggcatcaagtggggatttatccattgccagggtgtagaagtagatggctgtaaggtagtcaccctttgcaaatgcttcctttcctttcgactttgcatcagacacttgttcttccacaggactacatacctgaggttcaatacgtgtggttctcatagttctaattatcccgtcaacattccaatctggcagacatggaataggttttgtccgaggaaatagaatttcaacaagctctcgttgaccacgagctgctgccaccatgataggaatcctcccttcctgctcgtcaggaatgttagggtcagctccagcccctaccaagaatttgacaacatcggttaaactgtcatcaaccgcttcagttaaaggggtaggtccattggtactattaccgttcacatcagcgccagcctcaacaagtagcttcacgcatttcaaggagtgcccgcagcatgccatcatgagtggtgaaaagatatgattgacaactgataacaacgagaaccaccacttacatcagcacgctgtgcaacccgaacattcatgggatgaacccgatcctctgatgcagacaagtacagtcgcaccacacgaaaattcagaggctccacaggaactcctttggacagcaatccccctacatcaggtatggctgggtcaccaccatgatcaagaaggtatattaaaacattaatgtcccccaatgcgcgagaaatcattgatgtgcacgcacctctgtgagagcctgagttgacatcaaggcccgattcctccaccaggaacttgcagatctccagatgcccatagcttgcagccaagtgaagcgcatttcgcccattcatgtccttgaatccccgcaggtccaacttcttggccatttcacacaggaggtggaggtcgccgtcgagggcggcctgcaggacgacggcggagggggaggaggccatttctgcggcggcgtcgccttcgcgggggcgagggttccagaaggttctagaaggagaggcgcccggcggtcaaacagaacgaaatcaacacccgattcgtcaatcgccacccagatttttgctatgagctaccgcgcagggaacatcgcagctgcaaccaccccagatttccccccacatccggttgcgtgcgttgcagtccactacgccacacgatcgcaccttgccgaatcaatgggagatgctcgcctccaaaaaaaaaaaaaaaaaaa

SEQ ID NO: 20811 - DNA, 2365 bp, Oryza sativa
  Clone ID: TF_OsC58329_1
cttatctctccccaactccgatccccacccccatggcgtcggagatcgaggtgctcgaggacaccaccaccacgatggccgcctccgccgcccccgtggcgcccgcgtccccatccccatcccccgccgccgctgccgacggcgaggagggggaggggccggcccctgcggcggaggacgactcgctgaagaacgacgtgtacacggcggcggcgtacggcgatctggagaagctgcagcggctagtggagggggagggccacccggtcacggagcccgacggtctcggctaccacgcgctccagtgggccaccctcaacaaccgcgttgccgccgcgcagtacatcctcgaggttgtcccccattgtgcttcgcgcccgagcgtggcgcgatttggctggccttcgagtagtcgttgtttgctagctagcgagggatttgggtgggggtttggtgtattcacttttagctcattggctggtgttttggataggctccattatttatttagctgcttgtgacatacccatggagcagatgtaaatgctgtggaccacactgggcaaacagcacttcactggagtgctgtacgtggacacatccaagttgctgagcttcttctgaaagaaggagctaaggtggatgttgctgatttatacggttatcaggcaacacatgttgcagcgcagtatggccagacagcatttatttatcatattgttgcgaagtggaatgctgatccagatgtccctgataatgatggaagaagcccactgcactgggggaacctggaggcatgcactgtgctagttcaggctggcaaaaaggatgacttgatggtgaaggataagactggtctaactccagcacagcttgctgctgataagagtcatcggcaagttgcattttttcttgacaatgctaaaagggtatatgatagaggatgtgatgggaataccaattttggaaagctatcgaaactggggctagctcctgtactttggtgtattattgttggcttgcttgctacatatatacactctgttatatcaggtcaatatatcatggatatgacagcaccatttgggctgtttgcatggtcaggagttttccttgcaactgctggcctagtcatgttctataaatgtagcaggaaagatcctggctacatcaaagcaaatatacgagattcacaaaatcaaagggatgatgaacctttgttgaagttggagttagacaatcccgcacttctgtctggtaactggtcacagctttgtataacatgcaaaattgtgagacctgttcgttcgaagcattgttctacatgtgatcgctgtgttgagcagtttgaccatcactgtccttgggtatctaattgcattggcaagaagaacaaatgggaattcttcatgttcatcactctagaagtttttgcaatgatcattactggttctgctgccattataaggatggtaagagatccggcttctccagcatcctttattccttggctcagctattctgcttttaaccatactggggcactttcctttttcataatggacctcttccttttcttcggtgttgcagttctagcagtagtccaggcatctcagatagcgaagaacattacaacaaacgagatggcaaattccatgagatacagttatctaagaggtccaggtggaagattcagaaacccatttgaccatggagcgcgcaagaactgctcagaattcttgttaaatggatacaatgaggacattgaacgtcttgatcatacgtcacacactgatgaggaaatgggaatgatacagatgacaaacgcagtctctcagaatggcgagggcccttcccaccatggtaacggcactggccattcttgtgctgaatcacatgctcactcaaaatctcacagtcaaattgtatgtgttcatgctgaggctccattatttatttagctgcttgtgacataccacataggtttcgctagcttacgttaatattgttggggtgctagctgtgtgaaaattcagatctattagatccagtattttttgtggtgaatacataggagatgaaggtagcaaggtgctcatgaatatccgctgatccgcagttcagaaatgtcttgtcgctcctgaaaagagggcaacaattttgtgcagatgcagcagcatgaaacatcttcattgctgtgtcccttggtgtcaatataactccagcattttagcttctggatcttacatctgtgggaaaatgtagttgtaaactaagataattgtaaatttattagcaaattctgaatttagatactcttgttgtgatctatagctgtactgacagtccagaaagttgtaataac

SEQ ID NO: 20812 - DNA, 2135 bp, Oryza sativa
  Clone ID: TF_OsC60113_1
tcagctttttgaaagtgccaagaaggcaccaacgtatgccaagatgtttgtgacaacgaagacagaatagttacgcgagtaagtgccggcaaacggatactgccgagcgacacgcctgtgatgtctctcaggcaataaactgctgaacataaacttcacgaagctgatccacgacgccggcttagtcaagatcatgatgctcaagaccaagacatagatcccattgattatgacttcgtatatcacaatattgattgtcctccttctcatgacggcgaccagagccgcccagaaagccacgatcatgccgatcatcgaaacccacatgaagtgcagagctaaaatgaagctcttccatgaaccagatgctttcccatacacaataagtatcactgcgacaacggaagtcgtcatggcgacgctgtcgaagacgatgaagaatttgtaggcggtcttcgcctggaggaccgccttgccatcgtccccgtagcccccgggcacgttgaacgtggcggagaaggcgacggtggcgacgagcacggccacgacagcgaggctgttggacgtcttccttatccaatctgttgtgtcattgcctctccattgattcaggtggtcttgcctctgcgggcaggattgtgccccgtaggcagacagtgtcaccacaaggcttattttagaccaggtatcttctctgcttgttctcatatctctcttcttcctctcctttttcccggattcagtctcaaggagaagatcagaagacatggagaggaagctagacgagttggcagcgagatcaaacggtgtgtacccatcgttgttcatgatgttgactcgtacgttgtctccggcggaaagtagtgcggctagtcccttacaggggacgcggctgcagccaccgcgaggtggagcgccgtgttgccatccttgtcctgcgcgttcatgatgccgcaaagcatcgggttcttgacggcgagcgagatgaccggcgcgtgccctttctcggccgcggcgtggaggaacgtcctgccgcggccgtcgcggagctcggcggcgtcgggccaggcagacatcagctcctcgacgacatggtggtggcccatccgcgcggcgacatggatggccgagaggccgtccgagtccttcaggaacgccgtggacggcggcgcggcgcgcacgatcgcgcttacgatggagcggtcgccgtcggacgacgcgagatggagcgggctgctgcctttgacgtcgcattgtccagacagagctggcttccatttcaataccaggtcgaccatttctgagatctggaagacggcagcgtgcagagcattctgcttgttcggcccaacgggcgatgcatcgctgcacgtggtaatgatcgctttcacggctgtaaccgacttactcatcaccgccaagtacagcggcgacacgccggcggcattcagctcggaggacagctccggcgccgccgccgagacaagggcctctaccgccgcgccatggccgttcctcgccgccaggtgaagggccgtatctccggcctcgttcttgcatcccaggatgctgtccagggccagcagctggacgatggccgtgacggccccggcgtgtccggctctcgccgcgcagtgcagcggcgtgtcctgcgacgagttccggcgagagaggaggctgctctccttgaacctgaggtacacctcccggatcagctcgtcgtgtccttgctccgcagccacgtgaaacacggtgttactctccgcgctcacctctgatatgttgcactggccatgccgctggtcagggggcccctgacttggcggggcccagggcgcttgcactgctcgccctgccccagggccgggcccttccacctctctaccattatgcggtaccatccaagtaccattgacttgatcaagatgtccctgcgcaacaccaccatgccgtggctgaagaaggagcgccatgacctcctcggctcgccctttggaggcagcgagatacagagccgggcacatctccaagccacctgcagaatcacctctcgccgtcaccgccgcctccgagccatggtgctgcgaagaacagcgcgcgagctggatgtcctgcatctgacgatgatgatccat

SEQ ID NO: 20813 - DNA, 1166 bp, Oryza sativa
  unsure (1)..(1166): unsure at all n locations
  Clone ID: TF_OsC20490_1
ggcccccccnttttttttttttttttttttttttttttttttttcgtggtgtttgggcttccctccgtttgcctgcctccttcggtgtttgttttttttttttttttttgagacaaaaacaccatcgagtactcaagctggtaatcagttatacttactgctagttcagtaagaaacacagttagtatcacgctcatacagttctgtccacatcccagcttgccatacgagaacaaaggatatataacaaaacgtagagggtgccatcaaattgcattctcgcgtcctacattagtctagtcagcttcttcctcttcctccatgtcatttgcacttattagatgcccaagtgaaactttggcttttttcagttccggtgacctcagtgcagcagcaatgccatcgcttttcctcttctcgccaaaccccgcttcatcttcgtcttttgtagcctcacccgaggacttgtcatcgtcaggcttctcagcaatcgttgacacagaatcatccttcttctccgatggaagctcacctcccttcttcaatgactgctcacattctttcaggaaatcacgaacatcatccttctctgcaacatgtagagccgtctgacccccttttgtctttgcggcgatgtctgcacctttcttgactaaatacttcacaagctccaggtgggagttctgcgaagcaaagtgcaacgcagtgaagcctttcctgttctttgctttcacagaggcaccagatgccagcagctcacggacaacctctacatggcctttctgagaggcaaaatggatcgcagcggtgtcatccatagctgcagctccaacatcagctttgtgcttgcaaaggcacttcacaagctcaacatgtccagcccatgctgccaaatggagtggggtgcgagagaggcgatctctggaattgagggcgagagggttggcctcgcacagagactccgccgccgccaaatctcccgaccgcgcggccttgtgcagatgcaagtcatcctcctcgcctcctccgcggcctcggcctccacggccacgaccgccgccgccgccgccgccgccgccgtgacgcctccccatctctacgctgcagccgctccggatcagagagcctgcagcccgggaattggatcgaaccctcgtgccgaattc

SEQ ID NO: 20814 - DNA, 1689 bp, Oryza sativa
  Clone ID: TF_OsC354856_1
tcacaatggcacgtagaacacctcccagcgcagtatgagtatgacgacggccggagtgcaggctccgatggcgatgaccaggtacgccagccaccgctccgtggggaggacggtgaggtagacggacgtcatgagggagacgatcatggcgaggcaggcgacgacggtgaggcggtgtccccaggtgagctggtcgagcttgaacttgacggggtccctccacgcccagatgaagcagaagacgacgacgatggcgctgcacatggcgacggtgttggacaccacgaagatcttgaacggcgccctgtcggcgtggatggcgagccccgtgttctggttgtagccgccgggcatggtgaatgtggcggcgaaggtgacggtggcgatgagggtggccacgagggtgtaggtgccgacgctgagctcgaagtactcgtcgttgctgccggagcccggccgccggctgcgcagcgactggtacgtcgccaccggcggcagctgctggttcttgcaccgccgcgactcgtacttcttgagcttctcccagaggtagacgacgtaggcgtccatctcgccgccggcgacgcgctcctccacgaggctgcgcgccgagtggccttcgcggttgaggaggcaggggtcgacgcgggggtccctgagcagcatcagcgccgacttgatgcgggccatcttcgcggcgaggtggagcggcgtgtcgccggagttgtcgccgcggttcaccacctcggcggggcggacgcggccgaggaggcaccggagcgcgtccaccttgccgctcgacaccgcgacgtgcacggcgttccggccctcccggtccagcatctccgccgcgtcggggctgtgccggagcagctccgccgccgctgccgtcgagccgtagtaggccgcgacgtggagcgccgactgctgccgctcgttgcggcggtgggcgaggtcgggcttgtggtcgagcagcatccgcaccatgcgcttgtcgttcttctgcgccgcgaagtgcagcgccgtgttgccgacggcgtccgtcaggtcgatcagccccggcgccgtcttcatcagcaatatctccaccacccgggtgtggccgccgaggacggcctggtggagggcggtgccgctgacgttgtcggcggtgacgaacttctcggggacccatggctggtcgaggatcttgtcgacgacgtcggcgaggccctcgcgggcggcgatgtgcagcggcgtctgcatgtccacgttgggcgtgtgcccgcagttgggctccgcctccagcagccgcagcgccaccgcgctccgccgctgcttcaccgcctcgtgcagcggcgtgttccgtgtcttgttcatcatcatcagtggctcctcctccggccaacaaggcccagccatggtgatgaaggtgatgagcatgtcggcgacggccatcttgccggccctggcggcgaggtgcagcggcgtgtccccctggtcgttcctggcgacgaggaggtcgccgtgctcggcggcggcggcctcggcgaacgcgacgcgcccgagcccggcggcgatgtgcagcgccgtgttcccctgcggcgtcgtcgagttgaggatcttgccgccgccctgctcctcccccagcagcgccgccaggctcgccgtgttcccctgcaccgccgccttgtgcagccgtggatccat

SEQ ID NO: 20815 - DNA, 1255 bp, Oryza sativa
  Clone ID: TF_OsC13066_3
attataggaagtccctggcttccagcatcactgctgtatcctccaggcagggtgaaagcagcagcaaaggtaattgttgcgatgaggatcgccactagcgaagtgttgcttgtgtatgtttgagtcagcgaccttgcatccttccttgacgcattgatcaacttttctttggcttcctcgtgaagattataaacggattttgcatttggaggatcagctttaatcataagcattgacacttcattccagtttaatgtcttcgcactatccaaggcatcccgtaattcccaagcggctgcattaccgtcactgccaagaattgtcaagtctattttcttgtcaagtaaagcagcaacaattttcggatcacacttctggatggcataatgtagagctgttttccccttgctgctacgcatgttcacgagtttctgaagtcgtggttccccaaggataaactcaacgaattccatattacctgatttgacagctttatgaagacatgtccacccatcttttttgcaatatggagcatctgggcaatatttgataatctctcgggcaacagcaacatgacctcgatgtgcagcagaaaggaggagaggataaccattttttctgttgataacatacccttgagatctgtcatgtttcaacaatacactcgtagcatgtcgatctttcccccacggtacagctagctgaattggagtattaccatcccttattttcttctgtggccagatttgggcgttcaacgaatgattcttttagcaatatctggatttccatttctaatagctgcatggagagcattgtagccataggttcctgaatgagaagaaccatcaattcccaacagtttctcaaaaatatctgtaaacttagaatccctcatcatcaacgcaatgtacatgggagactcgccgtatttgttgacatctttggacaaggcaggctgagtcgctatcaactccagtgccaggtccttgtggccgttgcaaatggcatggtgcagtgcattacatttgtgcttgtcctgtttcaagattacctcactgaatccttgttcatggcagtatttgagtagaaaagcagctaaagtaacatggccacttgttatggcagtaagcagtggcgtctcattcatcacattcacagtagtgagtagtttcttcttcacggttggatcctgtggaagtgaaagaacatctttgcaaaattccaaatggccacacaggaagcggacgcgtgg

SEQ ID NO: 20816 - DNA, 1758 bp, Oryza sativa
  unsure (1)..(1758): unsure at all n locations
  Clone ID: TF_OsC13066_1
tttttttttttttttttttttggaaaaaaaagatacaagtcattacataagctccacatgaataatgttcagagtacattatttagattatatacatgaagttaaagatttaacaatgtatgctattattgatcaaacaacacgtgacacatatatttgaacaataacgatataatatgctatcatttacaagatatatcgataatatcagaccatatcaaggaactctgatttgaaagcttggcccaaccgaattctgagctttaagacaggccattccccgagcaccttagtgagaattggcactaaaacagcaacagagcaaattccaacagctaaccatagcagccgaggggccaatactgtgtataaaccggttgcaaatgctgtagttgttgccatgtacgcgaaccacataagcttcttggtgaaggatctgtagtaaagcaagaaatcgagatcctcccatcttgctatgatgcatatgaacgcaacagcaagtgaggcgcacattgctaaggtatctgatatcaagaatgccttaaaggcaacgttccttgccattataggaagtccctggcttccagcatcactgctgtatcctccaggcagggtgaaagcagcagcaaaggtaattgttgcgatgaggatcgccactagcgaagtgttgcttgtgtatgtttgagtcagcgaccttgcatccttccttgacgcattgatcaacttttctttggcttcctcgtgaagattataaacggattttgcatttggaggatcagctttaatcataagcattgacacttcattccagtttaatgtcttcgcactatccaaggcatcccgtanttcccaagcggctgcattaccgtcactgccaagaattgtcaagtctattttcttgtcaagtaaagcagcaacaattttcggatcacacttctggatggcataatgtagagctgttttccccttgctgctacgcatgttcacgagtttctgatttgacagctttatgaagacatgtccacccatcttttttgcaatatggagcatagctagctgaattggagtattaccatccttattttcttctgtggccagatttgggcgttcaacgatgattcttttagcaatatctggatttccatttctaatagctgcatggagagcattgtagccataggttcctgaatgagaagaaccatcaattcccaacagtttctcaaaaatatctgtaaacttagaatccctcatcatcaacgcaatgtacatgggagactcgccgtatttgttgacatctttggacaaggcaggctgagtcgctatcaactccagtgccaggtccttgtggccgttgcaaatggcatggtgcagtgcattacatttgtgcttgtcctgtttcaagattacctcactgaatccttgttcatggcagtatttgagtagaaaagcagctaaagtaacatggccacttgttatggcagtaagcagtggcgtctcattcatcacattcacagtagtgagtagtttcttcttcacggttggatcctgtggaagtgaaagaacatctttgcaaaattccaaatggccacacatggaagatatatgaagacatgtgtttccttgtggattttttccaagcagaattgtaggatcatgtgaatccatgtacttcatcttcattgacctggtatcaccagatatggccgcttccaggagctcccaatctatggttgcagtactggctgcacaggctgccat

SEQ ID NO: 20817 - DNA, 1120 bp, Oryza sativa
  Clone ID: TF_OsC1713_4802
cttaatgatatagagtttatggaaactatgtgtagtgtcttgggttgggactggccttatgccatcccaatgcagcattgcacccacaccaccccaaacggcagttatagacgcgaaacaccgtgatgttcaacagtcaccaccccggttagctactttgcttcacttacaaaaaggacacccattatggttctgggtatcgaagtctctgggcaaaatgtgagaacacctgtggactcagggaaccaaaggctcttggacaaaaagtgaggcgccttggacaaaacgtgtaggagaggaccagagcgccttgcccaccttgcgaacacccatgctgttcacctagcctctgtgcttgcagatgccttcaaggacgccagagcttcccgtaatgcatcctccatctcagagttccctggatccaacttcaatccatcgtaaagtgtttcgcaagcactctcgtagtccttcagtagcatcagagcagcaccctgtcggtagtaggcctttggccagtcaggccgcaatttcctgcattcataagcatccaacaaagccttgcctccattacccatgtgatgccagcaaaggcttctatttgagaacaaggttgcatcatcagggtaaaggtccagtgccttactgtagaatcctgttgcagaaagataatcctttttctcgaccgccttattccccaatgactttaactctgttgctttccttttactgacaggctcaccattatcagaaatgttacggttggcaccagtctcttccattgagtaattgcactcatttgagccaccctttgcagcagttgagatgcagtctccactgacaacagcaccagcctcaatcaggaggtttacacatttcaattcaccagcagttatagcagtagctagaggtgtcagatgaccatctaccatcttgttaaatgatgacacaaaaatcagaacttctggaatctgaactcctgaatctgcattgtggtccaataaaatcttcatagcaccatctttccctttactagcagcaacatgaagtggtgtgccacggtttgcgactgtgtccacacaagctccttttgcaagcaatagctgtactgttccacaatctc

SEQ ID NO: 20818 - DNA, 2726 bp, Oryza sativa
  Clone ID: TF_OsC2195_1
gcacgagggagagaactagtccgagttttttttttttttttttagaggactaaccaaggaaggtaattccattgaacagagaaaaaattaagaatgtaacttacattgttttaacaaaatcattcattgataaatgaaaaatggacaattataatctctcttttgttaggaagagatcatggacataataaccatggggaacatatgaattttaacccactaaaataaagactcatctgagctaatcaaaagaatactagttaggaccccaagtaatgaggttgtttaccaatctctggaactgatttcagctaccaatctgtgaccaaatgttttgttgaacttgaccaccatctctgactttgcccaccaaaaatttcaagaattaaaaagaataaattattatttactaggaccaacaactattctttggtaaataaccttggcaaaataaaggcttcatccactttgggacttcatggcttcccttggaaatcacttctgatccaggtgcatctgctcaagccaagcaccgatcaccgtctggtccaacaagtcaccctgattgttcaggtcaggcctgttcatcaatgcagaagtaccaggcatgccttgtacttcgcccctcttgccattaagctcagcattgcttaccagtgactgcacccatgatacatctgtctcatcttctccaaaccctggttgtgcagggcgtctcaagcggactagctcctcgctatcgacaccccagtcaaccttacccatcggggaccccacggtgccccaagcactggaattccgtggtgaaccaacagaaggccgctgtgtggcaggggctcctacacgagcacttaggggtgatgtaggttccatggtacggggggaccggggagacatgccaccaaatggagaatgtgccaaagatgacggatcaagagcccttggggagtacattctgttggtgttaacaggtgataagaggcccttctgttgatgaagcttgttgaggagggctgatttgtgggctggtgagtagactgagtgaccttggtcattagggaacctcggagacattgccatgtctgaagcatacatgtcttcaagattggatggagcaattgttggcctgatactcagaccagctgaaaggcgtggttgggggcggctgctgggtggcaggcagagtgccccaaggtattgtgattcccattcgaggagcatgccaaggtcatcaacagcagcatcccttgcattgaaagaagaacgcagcctactgccttggagccaatgcgcagcagcagctcctccattgctcccagcagatggtgacacaggcggcggtgcaaagtgtctggtaggagaacctggaagaagcccgagcgcagctgcagcagtcatatcaatggatgaagaagcgcggggagacagcaggccggcaccactgttgtgaggcacatggcggagctcatcctcatcatgggcaaagaagcaaatgcgacgggcgcaagctgctccctccttgcagagccttgtgcgatactgtgatgggtgtagccagctctcaaacacgccatgcgagaactcacagctatcgccgctagggcagccaccaggccggcgaaagttggggcaaggcacagcagtgtatgggtgcttgcggggatcacggcggcgggcgttctcgccggggtgcacaaacgggcactcagtccagtcgtgtgagtaggcacgggagcagggccggaccttgaacgcaaacatgcggaactcatccgaagcatacacgctgctcttgatgtccggcagagttggatccaccggatactccttcttcccacgatccacagtgatgggagacagcgacgacgaacgcgacgagggcgacctgttgccctcatctggtgaggacgagagcggaggggatgacgaacctgaagccaccgaggtcgccacggcgagtgctcggcggcggccgaggagcacctcgagatcgccaagggcatctggcgaagccggaggagctaggatgacgtcggcggggaagcggccggcggaatcgggggtggccggatcggcgccagcggccaaaagcagcttgacaacagcgacggcgttgcgcgagccaccggaggcggcgcagtggagcgcggtggcgccgtcggctccagggcgacggttgacgtcgacgcaaccgccgaggcccaccagcagcgagaccaccccggcgctgccgtacgtcgccgccaccatcagcggcgtgcgcgcctcgtacgccttgctccgaccataccacagcccgaccccatcagccaactccgccgcctcctcgcctccctccgcgagcgcccccctgagcccatcaacatcatccgccgccgcgagctccagcagcgccgccagcctgtcccgccggccgccggcgagcggcggctgcgacggcacgacaacgagatcagcaagctcgcccattatctctcgccggatagattaaccaaagctcaacgcatctgtagcaaccgctagcgccctccggggttgatccaaaatcgaatccgacccaatccaatcaagcccggatccaccgctcctccctcccttccctcccctcccctgcgacgctcgccgcggcggctgcttctcgcccttggggaacaagtgagagagagagagagagagaaagcgagagtagcacggcgacgagaacctcgtgccgattcctgcagccc

SEQ ID NO: 20819 - DNA, 1535 bp, Oryza sativa
  unsure (1)..(1535): unsure at all n locations
  Clone ID: TF_OsC82589_1
gtaatccaagagagaggtactaggcaggtagcttcatggaggacatcgtcgcttaccatttcttggtttcaattgggtgatgctgtgttgcaggaagatgcctcgtttagttatattccccttcttccgactagatttggggaatttggctaaagaaaggtagacgcatcatggggctcttaggtatggtgggcgactcattcggntgctcagctactggtgagcggcttgtctctgctgcaagggatggagacatccaggaggctatggccctgttggagcttaacccccgccttgcgcgctctccccccccgcccccgtgctgcccgcgcccccccgccgccccctgacagcgactcgggcggcgccggctcaccgcttcacttggcagcccttcatgggcatgctgagtgcgtgcaattgctgttagaccttggagcctctgtttcagaggtcactatcaatgatggttcaactattgatctcataggttcaggaagcacacctctccactatgcggcctgtggtggaagtgctgtatgctgtcaacttcttgttgcagccggagcaaacatgagagctcaaaatactaacgggttgacccctttgatggtggctcgttcatggcacaaaagtagtgttgaaggtatcctaaccaaacggccagaagttccagtacgcattcttccatcatcatatctgtctctcccactgatgagcattgtcaaaattgccagggaatgtgggtggagaaaaacttctgtctcatctgtttgccatgacccatgcgccatatgtttggatacggaatgtacagtgtctgcagaagggtgtggccatgagttctgcaccaaatgtgcgctctacttgtgcgccaccgctagcagctcaacatctatccgtggtgttcctggctccataccttgccctttgtgccgccacacgattgtctcattcgttagactcacaagtacaaccccaataaaggagcttccgtggacgaacaaatcgttagctctatgtgcagcaggggcaagcaccggttccaaatatgctggtcctgcagcaatcactagttccaagtatgccggttctttgcaccgaaggtctgagatgcgcagcctgcgctcctcttcagttgatctaggctgctcatcgtttcgaaccgcgagctcagggaagctgtcgtcgataaagctgaattgcaccggagccgacgagacgatgccctgcctcgtcaattgcttcaggccggatgtgcagcggtcgtcttcgtatagggaaagaattaggagatattcacaattttcatagcattactgtctatttgtatttgtgcctcccatccattttgtgagtttccgggggtttggcagtacaaacttgtgcagtgtttgttcatgcttttctcttggcttcttcatacctgtagtctgttctgttcttctgcttgtggtcttgtaacatgacatgtgatcctcatggttaagatgtgtttgtgtacatgatctataaaaaaaaacttatctgaaacc

SEQ ID NO: 20820 - DNA, 1470 bp, Oryza sativa
  Clone ID: TF_OsC763_1
acggccgtccggccggcagctcgtggtcaagtcttatctgccttcctccctcctctcgccttccgcctcgcgtgcgctccaccaccgaaaaaaaggacaggttccacataaagaccaacgagtaaaagcttgatctgtccggtgccaaccaatcaacaaacaagtttcatgtctgatctcgacgttcagcttccatctgccttcgatccgtttgctgaggcaaatgctgaggactccggcgctggccctggagcaaaggattatgtgcatgtgcgcatccagcagcgcaacggcagaaagagtctaactactgttcagggcttaaagaaggagtacagttacaacaagatcctcaaggatctgaaaaaggagttctgctgcaatggtactgtagtccaagatccagagcttggccaggtcattcagcttcaaggtgatcagcgtaagaatgttgccacgttcctagttcaggctgggattgctaagaaggacaacatcaagattcacggtttctaagctgcctatagatgctcgtatgcaatatcgtgtgctgccagatattgggaagcctctgaagctaccagttactgttctctatatttgaagtcataagactatttgttgctattaaagcgattcttgcttgatgcaagttgtgtcctcattatgcactaccggcatattatgagtatggtttgtctgggatattgtcaatctaataaaagtacttgctatgggactgaaaaagaaaatgattagtaatggtactgtatcctactgatagtgtgtggcggcgcggtgattctgattaaagctttagaggatggaacagacatggatgaagaagacgctgagggaagaagggccttacattttgcgtgtggttacggtgagttgaaatgcgcagagatccttctggaggcaggtgctgctgtaaacgcactggataagaacaagaacaccccactgcattacgctgctggatatggtcggaaagaatgtgtggatcttctgctgaagcatggcgctgctgtcacgccccagaatctggacgggaagacccccatcgaggtggccaagctgaacaaccaggatgaggtcctcaaggtgctcgagatggacgctttcctataaagaaaccaatgccaaatctcacgctcatcatcaccggctcgtcgctttacagttcagatttttactgcatacccaaatcatcatcgactcttttagctttggttttggtgtggtggtggtacattcgttgaatcgttgctatgtttggtgctccgatttgtaatctgtttcacttccccgttacactgcatcactccgtttcatcctttgtattcctatgttgctgagtctggtgttgcagacgttgctcctgtttttctcaaaaaaatcgtgtcagattggtagtttatatagataagagatgcactgccccggtgtaaaaaaaaaacaaaaaaa

SEQ ID NO: 20821 - DNA, 1321 bp, Oryza sativa
  Clone ID: TF_OsC12078_1
tccaccccctgctactaccagtctctctgccttccaagaaatggccaccgcgaagccagcctctccctcgccgccgccgagcaccgccgtcgtcccggccgccaataccgcagcagccgcggacaagccggcggtcgagcagctcctggaggtggcggaggacgaggtcgtcatcgacttcaagcccaacgccaagtgccgcgctgacctccgcctccgctcgctgcacccgtccctccccgtcgccttcaaggtccagacctcctcccctctcaagttcctcgtcagccccccgcgcggcgccgtgcagccgctctcgtcggcctccctccgcgtcgtgctccgcccgcagcagcacgctcccgcgtccttcccgcgctcccgaggcgaccgcttcctcgtgctctcctccctctccgccgcgcacctcgactcctccgcctcctccagcgccgctaccggcggcaccaccgccatccgcctccgcgtgttcttcggcgggccgtacctgctccgcctcgcggcggaagccggggacgccgcggccgtgcgcctcatcctgcgccggcagccgcacctcctgccgctcctggagcccgaggcggcggtgcccgacggcgccgagcagtgggcgccactgcacgcggtggccgcgaggggggacaccggggaggtgaggcgcctggggccggactcgatgggagcgcgcgaccgtgaggggaggaccgccctccacgttgccgccgcggccggggaggcggaggcggcggcggcgctggtggacatgggcgccgacgccgcggcgaccgacgcgcgcgggaggactccactggacgtcgcgcgcgagaagggctatcaagaagtggtggacgtcctggaacggtgggaactggtcatgacggcggcgaggcgaggcgacctccagagcctcgagtccctcctcagcaagcgcgccggcgtccggggacgtgaccagtacggcctgacggcgctccaccttgctgccatcaaagggcactgcgacgtgatcgcgctgctcgccgggtcaggctgcatggacatcgagtgcgaggacgtggaagggcaccgcccgctgcacctcgccgtcgaaggcggcagcgccgaggccgtcgagctgctgctcgacatgggcgccgaagtgcacgccgccaccaggcggggcgcgacgccgctccagatggccgtgacgatggggtacgaggccatcgcgctgctgctgcgaggccgtggcgccgacgaggcggccgcgccggcgttgtgcatcgcgtcctcgtcttcctcctcgatatcgtgtgcgtag

SEQ ID NO: 20822 - DNA, 1726 bp, Oryza sativa
  Clone ID: TF_OsC306767_1
ggagagaacttgtctccacttgggttgtttttgcttttaggtcatcattccaaccagcagtttcttctccatctggagcaaataaaagccatcattcctgcggtctcgcatgctaaaatcaccacaagcttactgggacagtctgggctgaatgttgtaagaatccatatctcaaacaggatgtcaaagttgccattaacctatgcttcagttctaattcttccgaagaagacgccgttctccatactcccaccatgaattcaagcctaatgccaagtactagtactgcatatgcacaaaattgcagctgagctactagttaaactgtctctaaaccaacaaaaaagggcttcgggtcactcggcattactcagttcttcaggtccatcgcttaccagaacagtttgtccatctcatcactttcaggatccaactctataccatgggtcaacgccacgcaagctttctcataatccttctcaagcattagagcttctcctagccgatggtaggcctccgacaacttcgggtgatgttttgcgcatgtggttgcatctttcacagccttttttccctcacccatgcgaagccagcaaagacacctctttagaagagttgtggcatcacaaggatcaacttccagtgcctgtgtgtaccacactgatgctttttcataatcctgctcatcaaatgcttcattccctttttgtttcaggtcagacattttcgtgttaacgtaatcatcatcctctagcttcttgcgttccagattggcataagtaattaccccatcaacgctccagtcagcaacagttggaattgggttggtcaaaggaaatagaatctcaacatcttcccttgtaccatacacagcagccagctctattggcattctaccatgcgtgtcaggacaatttgggtttgctccagccttcaacaacaactttatagcttcagttaatccactccctgcagctctcgccagggggttgtttgtagcatttacatcagctccagcctggatcaatagcttcacacaaggtaaggaagtagtgaataacgccgcagataaaggtgttgcttgagaagaaggcataaccttgttgggatctgcttggtgctccaacaaaatcttcacagtactttcatatcctttaatagcagcaaaatgcagaggtgtcccatgatctgatttgccatcaacatgagctcctctagaaagcagcaattttactatttcagtcctcccagtcctaaataacacacaaaaagagcagttcactcttggaggaacatgtttcagtggagtattgtctgcatttttctccacattcaacgtaaggctgctcatcatgacagaatgcagattggatgtagcagggaatcctttctttgcagctgaatgaagaaaagtgatgtttccttcacgttcatgatggatatcagcaccatgatcaatgagatacctgacagagggcaggtccccaccggcaatggctcgctcgaggggagtcttcctacctggagtggtgtccggcttgttgacgtccatgttggccacctcgagcaagtagcggtagacgtgcaggcttctggcggcgtgcagcgcgttcatgccgtggaaggccgtgcgcgccacggtggccgcgatcccctccccgtcgtcgtccagcgtcgcggcgatctcgtcgccgagaagcttctcgaagaggtcgggcagcgacat

SEQ ID NO: 20823 - DNA, 2227 bp, Oryza sativa
  Clone ID: TF_OsC17869_1
atggctgaagagtatgagctgaacgagatagatgacaccctgcatggctctgtggggagcaggctctcgctgtttgcgagggagctcaagtcaaggagaagcagcagctggcatggcggcaccgccctgaggctgccaaaggatctgtatgaaagccttgtcatacaccccaatggcagatggtacaggatctgggcgaacatgatgttcctgtggtccatctactccaccttcttcaccccgttcgagttcagcttcttccgcggactccccgatcagctgctcgacctcgagtgcgtccagctcgtcttcctcgccgacgtcgccgtccacttcttcctcgcctaccgcgacccccacacctacaggatggtccacgacaagcgccacatcgccctccgctacatcaaaggcagctttgctctcgacgtgctcggctgcttcccctgggacgccatctacaaggtgacgggcagggtggaggcggtgaggtggctggtgtgggtgaggctgtacagggggaggaaggtgatggcgttcttcaagcgggtggagaaggacatccgggtgagctacctcctgacgaggatcgtgaagctcatcaccgtggagctctactgcacccacaccgccgcctgcggcttctactacctggccaccacgctcccgcccgcgcgcgagggcgggacgtggatcggcagcctctccctcggcgacgcccggtacatcaacttcagggaggtcgacctgctcacccgctacgtcacctccctctacctcgccatcgtcaccatggcaactgtcgggggttcaggctatggcgacatccacgcggtgaacacgagggagatggcgttcacggtggtgtacatctcgttcagcatcgtcctgagcgcgtacctgatcggcaacatgacggcgctgatcgtgaaggggtccaggacggagcggttcagggacaggatgaccgacctcatcaggtacatgaacaggaacaggctgggcagcgccatcaggtcccaggtgaaggatcacctgatgctgcagtacgagagcagctacacccgggaccgcgtaatcgtcgacgacatcccggtcgccgttcgatccaagatgtcacagacactgtacctggatatggtttcgagagttgggctgttcagaggttgctcggatgacttcctaagccagattgtgctgaaattgcatgaagagttcttcctcccaggagaagttatcttggagcaaggcaccgtggttgatcaaatttacatcgtggcacatggatgcctggaagaggtggccaatggggaagatgggtctgaagagatcatctcagaactgcggccttacggcatagttggcgatgtcgcggtgatctgcaacattccacagccatacacagttagagtctgtgagctttgcagccttctgagaattgacaagcaatccttgactagcatcttacaaatttacttcaaggataatagtcagatattgagcaaccttctaaaggggaaagaaacggagtcgaagcggaagcaattggaatcagatatcacatatctgctagcaaagcaagaatcagaactagtccttggagtaaacaatgctgcatatcatggggatatatttcgtttgaaaagcttaatcagtgcaggagcagatccgagtaaatcagattacgatggcaggactgcattgcatattgctgcactgagaggatacgaaaatattgtcaggttccttattcaacgaggagcgaatgtcaacagcatagacaggtttggaaactcaccactgctgcaggcagtaaaatcaggccatgacaggatcacgtcgctcctcgtggagcacggcgcgatcctgaacctggaggacgctggaggttacctctgcagagtagtcaggggtggcaggatcgatctgctgaagaagctgctcagattcgggatcagcccaaactgcaggaactacgatcagaggacgccgctccacatcgctgctgccgagggcctgcaccttgttgccagcacgctgatagaatctggagcagacatacaggccaaagataggtggggaaacacgccgcttgacgaagggagacggtgcagcagcaaaccactggtcaggatactggagcaggctagaactgttgcgactaattgatgaaaaacaatgtgtattcatggggaaactaattgcaatgaaatattctttctgaggc

SEQ ID NO: 20824 - DNA, 3965 bp, Oryza sativa
  unsure (1)..(3965): unsure at all n locations
  Clone ID: TF_OsC1991_2
atggatcgcgccaaggcagcggcgcgcgaggacaaggcggcggcggcggcgacggggaaggagaccgccgtgtcccgcgccgtcgcggaggacgacaccgcgctgctgctcgcggcggtgggaagcttcaggaaggaggcgatgggccgtctccggaagggctccgacgcgtcgcggatgctggaccaggagatgtccacgaggctgctccacctcgcctgcaagcacgacgccgtgcagtgcgccaggctcctcctcgagggagggcacggcatcacggcgtcgcccgtggacgccagggaccagctcacgcggacgccgctccaggtcgccgccgaggcgcactcggcccggtgcatcgagctgctgctctccaagaacgcgcgcaccgacctcaagctggtcgatggccgccctcttgtcgcgctcgagatcgctctcttaagcagaagagctcaagttaaatggtcactggacaactccattgaagatcttctgtcatctctgcaagaaaaggatctgaatgcagtgaggctcctggcagagaaaaccagagaggttggggaggtggcctacagatatgccatggaaggtcgtgttactgtgttggcaatgctgcttctggtggctgaagagaagatatcggcaccagtcagtgtagttatagagggcgtcaggacaaagaaatcaatctactactctattgtggatgaggctctgtccattggggatgctccagcccgggacagcaatgagaggagaaaggccctgctcagtgagattcagctacttaaccaatttggggcagcgttatggagagatcgcaacattgacaagagaagcttgccccctctgcttaaagctgccaaggttggagatgtaaatgtcacaaagatgctcctgatgggggatgttgatgtcaatgaagccgatcctgaagggaacacggcacttcactggtgccttagtggtagctcaagcacacaggagccaaggattgtgtggctcctgctgaagaatggtgccagagttttccaggggaacaaacttggtcttacaccagtacacagcgctgcagctaagggaaattataaagctcttcagtcacttctgcttcatgctcaagattgtgttgatactccttccaagaccaaagaaaccccattgttcttagcagtgaagaatggttctttggactgtgtaaagcttctcctgcgttctggggctagcaccaaagtccagaacctaagaaagcaaagaccaatagacgtggcaacgtcccaagatatgcgtttcattcttacctctgcaaatgtggctccatggaaccgtagctcacatccaaaaaaaagtgtgacgaataaggaaagctgcaaagagttcctggaagattttggtgattatgacagtgatgatttaaatgaaagctttactgggcttaaaacatcagcaagccatcgggatttccggtctagtaatggttctgcccaagggggcaagagtaagaaccattgtgctcccaagcaaggttccaagtttgtgcctcggcctaatcattggccgaagcacgactacactcggaaaatttttgttgggggcctcccaccttctgtgggcgctgagtacctcactgagttcttcactgctgaatttggacctgtggaggaagcagtagtcattgggataaggatgggtgatcgggtgcaatctcgaggatttggttttgtaaagttcaaaagagaagaggatgtgataagtgcaaaggaaactcatcatgtgtacatgcttgggaagagagtggaggtaaaggatgctgttgctagaggatccttgcctgcagaaatccagaaaattgctccattcaggcaccacagccaggaggttccaaaggtaactcaccatctgttggatggtgagctaaaggaggaacattacattaggaagcgccggcccttgccagagaagtgtcttccatcttggttctttatattcaggaagtggttgccaggatttcttgcagatgctaccgaacgacttggagataggtacccattgagctccctgaagggtgatttcagagcaatttgcagaatggagcttgatcatggcacacttggttatcctaagctcagtgatttcatgcgttcccttcctggtatctgcagaatgtgtgtagtccctgtaggaagtggtcctgccacacacatggtcctccttccaccggtctcgcgaccgaagtatgtacccttgctggaaccattctcttttgatcatgatgagctcccagaatcagtgtcagatcatcagtccccgaggtctccacttaccactaatatcaccgaggactcccctcataacacagacagtcagcagggtgatacttgcagtgagagcaatgtgcagagccatcagggcgatgagtgctgcgggagcaacactgaaagccagcaggatagtgcttccactgacaatggtagcttactgggtgaagttactgtcagtaccccaaagcctgattccattgagtccatacctacaggaaagtctgatttgattgagcttgtacctacaagaaaacctcatctgattgacacagtcactacaagaaaacctgatttgattgtgactgaacctacaagaaaaccaattgtgattgagcctgtgcctacaagaaaaccaagtgtgattgagcccgtgcctacaagaaaaccaatggcaattgagcctgttgtgcctacaagaaaaccaattgtgattgagcctgttcctacaaggaaaccaattgtgattgagcctgtgcctacaagaaaaccaattgtgactgagcctttgcctacaagaaaaccaactgtcattgagcctgcatctcttactcagaagattgtttctgagcctatgaggaagactgatttgtttgaatctggacttgcaaggaggattggtttgattggttccagaccaacaacatgcttcgttgactgtccagttgaaaggccagcagtaactccaagcaactgtgaggctgatatgagattctctttcttccaatcacaatgggacaggttcctggctccatatcccaagagtgattactgcatcatctgtcgatcctatgatgctgtgatgcagcttgtcccatgccttcataagatttgtgttgcctgcatgatgagatgcaatgtcagggcatgcatgacctgtggcactgctggagtcatggagcgtgcatcagatcaaaggtgccagctgatggtggtctgccgtggagctgaggcgattgtcagatgttccccctgtatgcacagcatcgcatgtcgaggatgcttcctggcttcagtaacattactcaagggctgcaccacttgtggctgcatgattgagcacttcaagttttgttgagtaggcttacttccctgatacagtaataccagaacttacattactaaaaagaataaagcaaacagtcccacaatctgaaggagagatcagttcactctccttcgattttgctgcgctcgtgggatgagctaacaggctactcggttaggtgcgctcactcctgcaagcttgaggagtgctctttttgcttagaaatatgttctctcgaatgcttgatggacatgcttctgtaagcttgtgatgaggagtgtgttccctcccattttggcaagcttacactatatatgccatgtaatgtccactatctatctataatggcactcttttttgtaaattcagtactatttaagtaagatggattctgtttaaaaaaaaaaaatnaaaataaaaaaaaaaaaaaaaaaaaaaaaaaaactaaanaaanaaaaataaataataaaaaaaaaaaaaaaaaaaaaacataaaaanaaataaaaatataaaaaaaaaggggggggcccttttaaaagaaccaaattttacttccccgtgattggaaatttaaattttttttttggggcccctaa

SEQ ID NO: 20825 - DNA, 1296 bp, Oryza sativa
  Clone ID: TF_OsC20391_1
gtagtggctcccccccacgggcccgggaaagagaaagaggatcgtctcggctcgtcgtcttctagctagggttcgtaagttctagggtttgcgatgatccccaactcctcctccctctagtatttcgagcgaattctccaacactttcacccagccgcgcgcgagaggagaaggaagatagatagatagatcgctccgcacatactatggtgctcaccccatcgccgtctccaccgccgatgctccccaagaagctccgcgcgctcggtccaggcttgaatccctttgctcccttcggcatgggtaactactattcctcctctcgctaatatatttctcctcgctcgatccatcttcccccacctccccccttctcaaacaattaatccccttcccgattcgattcgattcggttcggttcgctttcggactcggtttcaatttcgattctccctccgtcgtcgcggccctattctagccgccccctcccctccgctcgattgcctgcctccggatggtgcaattccgcagctctctcagcatgagccgggcacggacccgccacggcgatggcgacgaccgcggctggaaccagctccacgtcgcctcccgcaagggcgacctcaaccaggtgaggcgtctcctggatgatggcatggatgtcaatgcacctgcatgggggccaaaatcacctggcgctacccccctgcatttggctgctcagggtggacatgttaaaatcatggacgagctactggagcggggtgcaaatattgatgctcgcacaaaaggagcttgtggatggacccctctacatattgctgctaaggaaaggaacaaaagagctgtcaggtttctgattgagaatggtgcattcttgccacctgacatgaatgaccacaggttcaatcctcctctccattactgctctggattggaatgggcatatgagatgaagcgcatgcaagacgaaagtgattcgaccggtgaaacttctctgggctcggagagctagaggaaagcaatctcctcagtctggcaaagaggtcaatcttggatcaacagagtttgtaaacatcaagggtcacgtttactttgtgaaattggaacgaattaccatgtgaatcttacatgcgacatggtactagcatgcattgcgatgttgttgtggggttacttgtgttttcgataattgcattgtgttcttactacactggtagcatgtattctactacacattcttaatatcagaatcaatatccggtttgcgtcctaaaaaaaaaaaaaaaaaaaaaa

SEQ ID NO: 20826 - DNA, 1107 bp, Oryza sativa; identical to SEQ ID NO: 11007
  Clone ID: TF_OsC341610_1

SEQ ID NO: 20827 - DNA, 1715 bp, Oryza sativa
  Clone ID: TF_OsC207789_1
cgatcgcattcgaagcttcctccggtagctccggtgagggtgatggacgacctggacatggcgctgcctcaggccttcgagctcctcctcggcagagatcgagacgcctggccgcgcggggccgcgttcctcgtcgccgcccactacggggacgtccgcgaaatgaagaggattgcaaaggagctggacgaggacggcaaagggatcgaggcgactgtggctaacacaagcttcctcggcatgaacgcccttcacgcactgggttggctcggcaaggtgccggcctaccggtatctggtagaggaggtcaaaatggacgtcaacaaggccgacactgctcagggattcacacccctggagcatgccgtctaccatggtcgcctgcctgccaccagatacctccttgatcatggcgctgatgtgcatcaaattcgctctacgggaaatgtctctcttcttcactcagctgcagtaaaagggttctctgaagtagcaaaatttctgctttctagaggagttaatgttgatgcagaatcagaaatggggacaccactggctcttgctgctttcagaggatatgatagcactgtcaaggtccttttggagcacaatgctgatcccaacaaggttacaaacaaggcacttggtgcacctttagacttggcattaaccagctcttctgtgtcctgtgtgaagctgttggttcaggctggagctgaagtgaaagttgaggggccaaataatcatttggtaagagctgctgagaaaggcttaactgaagctattaaatgcatgttggaagctggtgcaaacccaaatgttcctgacaggctcgggagaatgccaatagagctggctgctgagtatggcacacgggaagatgttgagattctctttcctttcagctctgctattccaactgtggcaaattggagtgttgatggaataattaatcatgtacagtcagaaatcaagcaactagagatattatttactcaggacgataattttatcaaaaagagaaggtctgacatgaaacaacaaggggatgctgcatttaagaagcaggattatctaaatgcatcagtgttctacactcaggcactgaaggttgatccgtttgatggcacgttgttctcaaacaggagtctttgctggctccgcatgggtgatggagaaagggctttggatgatgccaatgcatgcgaaaagctacggccaaagtgggcaaagtcctactatcggcaaggagcagctctaatgtttctgaaggagtatgagagggctcatagggcacttggtcgagctttagagttggaccctgaaagtgaagagatcgagaatttgtattgggagtcgatggaactgtgcggttgatccctgaaatgccagctacagatagaagaagcacacgcagaactggaagctccttttgtgttatgaaagatggaacgacgcaaacgctcagtgatttgctgctttttgtgtacatatacttaggctgtcaaaacagaaacaaatgtctggtcttttatgtcgtgtttcgtcgtgacatcttcctggagtggctgttagactaaactagcattatcacattctatctgttgctagtatgggcacgaggatgatcaactgtctaagcaagctggaatgatatgaattctctgaaaaaaaaaaaaaaaaaaactcgagactagttctctctctctctctcc

SEQ ID NO: 20828 - DNA, 2650 bp, Oryza sativa
  Clone ID: TF_OsC16902_1
accgccaccacgtgcggcgatcgccgccgcgcgccgcgacactccccccgatcgagctagtgtgcttatccgccgccggcggcgccgcctctagccgcgcgcggggatggggagggggatagggtcgaagcggagggtggaggacgacgacggggagaatatgccggggaggaagaagaaggaggaggaggaggaggaggaggatgacgatggggaagaggagtacgaggtggacgtggtgcgcgaccggatcgggtcgtcgcgggggagccgcctggcgctgttcggctccgacctccgcctcggccgcttccgcccgcgccgccgccgcgtcgcccccgtcgacggcgacgatggcatcttccaggacttcgtcatcgaccccgacaacaagtggtatcggttatggacgaggttcatactagtgtgggcagtgtacagttccttcttcacgccattggaatttggcttcttcagggggctccccaggaacctcttcttcctagacatagctggtcagatcgccttcctcatcgacattgttctcaggttcttggtggcctaccgtgatcctgacacctaccgcatggttcacaatcccacctccatcgctctccgatattgtaaatcaagcttcatttttgatcttcttggttgttttccgtgggatgctatctataaggcttgtggaagtaaagaagaagtaagatacctattgtggattcggttgacacgagctatgaaggtgacagagttcttcaggagcatggaaaaagatatccgtataaattacctgtttactaggattgtgaaactcatagttgtggaactctactgtacgcacacagcagcatgtatcttctactatcttgcaacaacacttcctgaatcaatggaaggatatacatggatagggagcttgcagttgggagactatagttattctcatttcagggagattgatcttaccaagcgttatatgacatcgctgtactttgccatagtcaccatggcaactgttggttatggtgacattcatgctgtgaatgtcagggagatgatattcatcatgatttatgtttcctttgatatgattcttggagcctacctcattggtaacatgactgcacttattgtcaagggctcgagaaccgagcgattcagggataagatgaaagaagttatcaggtacatgaacagaaacaagcttggaaaggacataagggaacagattaaaggacatttgaggttgcagtatgaaagcagctacactgaagcttctgtccttcaggatatcccagtctcaattcgtgcgaagatttcacaaacactgtataagccatatatcgaaagcattccactgtttaaaggatgttcagcagaattcattcaacagattgtgatcaggctgcaggaagagttcttcctacccggagaggttattttggagcagggaagtgcagttgatcaactgtactttgtctgtcatggggcactggaaggtgttggcattggtgaagatggtcaagaagagaccattctaatgctagagcctgaaagttcttttggagaaatcgctgttctctgcaatatcccacaacccttcaccgttcgtgtctgcgaactttgtcgtcttttgcggcttgacaagcaatccttcacaaacatcctggagatcttcttcgttgatggaagaagaattctgagcaacctttctgagagtagcgaatacggcagccggatcaagcagctggaatccgacatcacgttccacatcgggaagcaagaggcagagctgacgctgcgagtgaacaacgctgcgttctacggtgacatgcatcagctcaagagcctgatccgtgcaggagccgatcccaagaacaccgattacgacgggcgatctcctctgcatcttgcggcttgcaaagggttcgaagatgtcgtccagttcctcctccacgaaggcgtcgacatcgatctttccgacaaatttggcaacacgccattgctggaggcggtgaagcaggggcacgaccgggtggcgacgctgctgttcagcaagggggcgaagctgagcctggagaacgccgggagccacctgtgcacggcggtggcgaggggcgacacggacttcgtccggcgggcgctcgcctacggcggcgacccgaacgcgagggactacgaccaccgcgcgccgctccacatcgccgccgccgagggcctctacctgatggcgaagctgctcgtcgacgccggcgccagcgtgttcgccaccgaccggtggggcacgacgccgctggacgaagggcgcaggtgcgggagccggacgatggtgcagctgctggaggcggccaagtccggcgagctctccaggtacccggagcgcggcgaggaggtgcgggacaagatgcacccgcggcggtgctccggtgttccggcccccacccgtgggacggcggcgagcggcggcgggaaggggtggtgctcggcgcaggagaagctcggcctcgccggctccggcgaggggctccggctgctcggcgaggacggcgccagagtgctcgacgtcgacatggtccacgacgggcagaagctctacctcgtcgtcggcggcggcggcgatgacggcggcacggaggcaaggcagtga

SEQ ID NO: 20829 - DNA, 2616 bp, Oryza sativa
  Clone ID: TF_OsC1434_2
atggggttcctcaaccttgtgggcaactccattgggtgctcggcttccggcgagcggctcgtctcggcggacagggacggcgacctgcaggaggcgcgcgcgctgctcgagtacaacccgcggctcgcctggtactccactttcggtggccgcaactcgccgctgcactacgccgccgcgcagggtcaccatgagattgtttctctgttgctcgaatccgaagtcgagatcaacctcaggaattacaggggccagcggatcctgtctggtgatcattcttgaatcgaatgcggtttgggcggcctcgtggattgggaaatttcagggtgaagtcttcgatgccacgcccccgtctctccaccatcttcgccggcgcggccacctccacggcgccggccccggcccccgcggcctcgccgtcggcgcgcgcacccctgcggcgacggcgacggctcggccccggtcccggcgcgcgccctcaacgggatcctcgccgcgctcgcccgcgccccgccttccgccgcctgcggtgacgcccccgccctcgccatcgagctcttcaagcggatggaccgatgggcctgcccccgccactctcctcccaccatccacacctacaacatcctcatcgactgctaccgccgcgtgcaccgccccgacctagggctcgccatcgtcggccgcttgctcaagaacggcctggggccggatgatttctcgtactcgctcatctacggtttcgttaaggatggggaggtggacaaagctcactgcttgttccttgagatgatggagcagggcgtattgccgaagatactgatttgtaactcaattatcaaagagctttgcaagatgaaggaaatggacaaggccgagagcattgtgcagaagatggtcgattcgggtattgcaccggacttgtttacttatagcttgattattgacgggctgtgcaagtcaaaggcaatggacaaggctgagagggttttggagcagatggttgaggctggtactcgacctaacagtataacatacaatagcttaatccatggatattccatttcggggatgtggaacgaatcggttagagtgttcaaacaaatgtcaagttgtggtgtcatcccgactgttgataattgcaactcattcattcacgctctcttcaaacacggtagaaccaacgaagcaaaatgtatttttgactcaatggttctgaagggccccaaacctgatattatctcctactctacgatgcttcatgggtatgctactgctactgacagttgtttggctgatgtgcataatatcttcaatttgatgctaactaaaggtattgcacccaacaaacatgttttcaacatactgattaatgcatatgctcgttgtgggatgatggataaggctatgcttatatttgaagacatgcagaacaaaggaatgatccctgacactgtcacatttgcaaccgtgatatcttctctttgcagaattggcaggttggatgatgctctgcacaaattcaaccacatggttgatattggtgtaccaccgagtgaggctgtttacggctgtctgatccagggttgttgtaatcatggtgagttggtaaaagccaaggaattgatttctgaaatgatgaacaaggatattcctcctcctggtgtcaagtatttcagttcaataataaacaacctgtgcaaagagggaagggtagcagaagggaaagatatcatggacatgatggtacaaacggggcaaaggcctaatgttgttacttttaattcattgatggagggatattgcttagttggtaatatggaggaggcatttgcattacttgatgctatggcatcaattggcattgaaccgaattgttacatatatggtacgcttgttgatggctattgtaaaaatggaaggattgatgatgcattgactgtattcagagacatgttgcacaagggagtcaagcctacaagtgttttatatagcatcattctccatgggttatttcaggccaggaggacaactgctgcaaagaaaatgttccatgagatgattgaaagtggaacaaccgtgagcattcacacatacggtgttgtgcttgggggactttgtagaaacaattgcaccgatgaagcaaatatgctgttggagaaattatttgctatgaatgtaaaatttgatattattactttcaatattgtgattagtgcaatgttcaaagttggcagaaggcaagaggctaaggaattgtttgatgcaatctctacttatgggttggtgccaaatatacaaacctacagcatgatgataacaaatcttataaaagaagagtcatacgaagaggctgacaatctctttatatcagtggagaagagtggccatgcttctgactctcgtcttcttaatcatatcgtcaggatgttactcaataaagctgaggttgccaaggctagtaattatctgtctataattggcgagaataacctcactcttgaagcttcaactatttctttactggcttctctcttctcaagggaaggtaaatatcgggagcatataaaattgctccctgcaaagtatcagttttttgagggagcctggcaagattaa

SEQ ID NO: 20830 - DNA, 1551 bp, Oryza sativa
  Clone ID: TF_OsC216950_1
atgccggtgccggggagccagaacgggcggccgaggccggcgaaggcggagaccatccacggcctcgcccgcgccggcgacctcgccggcgtccagaggaagctgcaggagaatcccgccctcatcaacgaccggaaccccgtcatgtcccaaacaccgcttcatgtcgcagctggctacaataacactggcatagtcaaattcttgcttgatttccaaggcacggataaagttgagctggaagcaaagaacatgtatggagagacacccctgcacatggctgtgaaaaacagttcttgtgaatcagcaaaattgctacttgaacgtggtgcacatatagaagccaaagcaaataatggcatggcaccattgcatttagctgtctggcatgcacttcaatctggagattgtagcacctgtactgaatcttgttctcatcacacattgccccaccaggaaggcaaaatcccttcgaatcatattcctggaggagctggtaaaacaatggttgctcggattcttggaaagcttcttcatatggttggggttctccctaccgacaaagttactgaagtacagcgaactgatcttgttggagaatttgtggggcacactggaccaaaaactaggcgaaagatacaggatgctgagggtggaattctgtttgtggatgaagcttacaggttgataccgatgcaaaaatctgatgataaggattacggtgtggaggccttggaggagataatgtctgtaatggacaatggcaagatagttgtgatatttgctggatactgtgagccaatgaagcgcgtcatcgcctccaacgacggcttctgtaggagggtcacaaagttcttttattttgacgatttcaccacaacagaattagcagagatcttacatctgaagatgaataacccaactgagagcagtttgctgtatgggttcaagctggacccaagctgcagcatcgaggtcgttggagagctgattgccagggagacaactgaacagcggcgtaaacagatgaatggtggccttgtagacacgctgctcatcaatgcccgtgagaatctagatctacgtcttgatttcaactgcgacgatgcgaatactatgatcacaatcacattggaagacctggaagctggccttaagcagatctccaaacagcggcagttgcagtgacaccaaccaatttggtgacaaatttttggttataattggaagctcatcgacatcagacaaagtttcagtcaggttcaaggattttgatggaatcaaatagtgtgatttggtccaatttttttgctggctattctttctgttgtatctattcacattggtaggtaagatttatgcccttctacaatagcactaatacgcatgtagttctttattattcccattgaggtatataagcctttgtaaatacatttcttgcattacgaagcatcttttagaggtgatgaaagtcttctccttctccaggtaaaaaaaaaaaaaaaaaaaaaaaaaaactcgagactagttctcgcccgcgccccgtgc

SEQ ID NO: 20831 - DNA, 3365 bp, Oryza sativa
  Clone ID: TF_OsC40453_2
attccaatccgacggcgccgtgctctcaaatcccgcgaggcgcctcgccgcccagataaaaatcccctcctctcccaaatcctctacgccgcggcgattccgagcagcgcaacggcgggcggcggcggcggctgccggatcgtcggatggcggaggttcgcaagtacgggctgcccaatcagccgccagatattccccagatactgctggaagctcagaatcgatggctacgtcctactgaaatctgccatatactgtcgaactacaagaaattctccattgcgcccgagccaccgaacagacctgcaagtggctcgctttttctgttcgatcggaaaatattgagatacttcagaaaggatggacataactggaggaagaaaaaggatggaaagacagtcaaagaagctcatgagaagctgaaagttggtagtgttgatgtacttcattgctactatgcccatggggaggagaatgagaacttccagagacgtacctattggttgttagaagagggtttcatgaatattgttcttgtgcactaccttgaagttaaggggaaaaataatttttccagggtggcaagcaaagtttcagccgttctaaagaagctgaagagagtgcaggattatctaatgctgatagtcctgcatgctcaaactctttcgctagtcagagccagtgtatctaaagaaaaattcggtgcaacagataattgtcgagcaagctccagataccaccctttcgttgagatgcagcagcctgtggatggagtcatgatgaataatatgctgggtgtttcagctccaagtgcaggatatcatggtgaaatgcagactacaacagctaactcagacaatcattttgctactcattatgacatagctggtgtgttcaatgaagctggagctggattaaggggcgtttccaaaactctacatgattcagtgcgttttgctgagccctatcctgaatgctcagctgagtttatggagccagcactctattcttctaatgccaccatggagtccaacaatctggatgataactcacggttggaaacgttcatgtctgaggcactctacaccaacaacctcactcagaaagaagctgatgcactgagtgctgcaggcataatgtcatcacaggcagagaataatagctatacagatgggatccggtatccacttttaaagcagtcatcactagatctctttaagatcgaacccgatggtttgaagaaatttgatagcttctcgagatggatgagtagtgaacttccagaagtagctgatttggatatcaagtccagttctgatgccttctggagtagtactgaaacagtgaacgtcgctgatggcactagcatacctataaatgaacagttagatgcattcgcagtcagcccttcactttcccaagaccagctcttcagcattattgatgtttctccaagctacgcatgcactggctctaggaataaggtcctaattactggtacattcttggcaaataaagaacatgtggagaattgcaagtggtcatgtatgtttggggacgttgaagtacctgcagaggttttagcacatggctctctgcgctgctacacaccagtacatttatctggacgagtcccattttatgtgacatgctccaatagggtggcttgtagtgaagtgcgagagtttgagttccgtgattctgatgctcgacaaatggatacttcagatccccagacaacaggcataaatgaaatgcatttacatattcgtcttgagaagttactttcgttgggaccagatgactatgagaagtatgttatgagtgatggaaaagagaagtctgaaataatcaacactattagttccttaatgcttgatgataaatgtttaaaccaggcagttccattggatgagaaggaagtttccactgcacgggatcagaatattgagaaattggtgaaagagaaactatattgttggcttgttcataaggtacatgatgaagacaaaggtcccaatgtgcttggcaaggaaggacaaggtgtgattcatttggtagctgcacttgggtatgattgggctgtaaggccaataattacggctggtgtaaaggtgaacttcagggatgctcgaggatggactgcgcttcactgggctgcatcatgtggaagggagcggacagttggggccctgatagcaaatggagctgaatctggtttattgacagatccaactcctcaatttccagcaggtagaacagctgctgatttagcatcagaaaatggacacaaaggcattgctggtttccttgcagagtctgctttgacaagtcatctttcagcacttacactgaaagaatccaaggatgggaatgtaaaagaaatatgtggcttaggaggggctgaagattttgcagagtcgagttctgctcaacttgcttacagggattctcaggctgagtcactgaaggattcacttagcgctgttcgtaaatcaacgcaagctgcagccaggatatttcaagcttttagggtggagtcattccacagaaagaaggtggttgaatatggagatgatgattgtggattatcagatgagcgcactctttcacttgtatccattaaaaatgccaaacctggacagaacgacgggtcacattctgctgctgttcgtatccaaaataagtttagaggatggaaaggtagaaaggagtttatgattattcgacagaaaattgtcaagatacaggcccatgtacgaggacatcaagtaaggaaaagctatcggaggatagtctggtctgtaggcattgtggagaaaattatattgaggtggaggagaaagcgaaggggcctgcgtggtttccaaccggtaaaacagcttgaaggtccatcaccgatccaacagcttgaaggtccatcgcagatccaaccagcaaaggaagaggaagaggatgaatatgattacctcaaagatggcaggaagcaagccgaaggcagattacagagagcactagctcgtgtgaaatcgatgactcaatacccagaagcaagagaacagtacagtagaatcgcaaaccgtgttacagaactgcaggagcctcaggcgatgatgattcaggatgatatgcaaagtgatggagctattgctgatggaggcgacttcatggctgaactggaggagctatgcggggatggggacgcaccaatgcccaccattttgtgacattgaggagttttactagatcagttaggctgcgacctctgttctttaccaggctagctgtaaattcttgtgctagatgttcagtgctcaccgttcgactctatatagcgttatacctaataccatgcgacttctatt

SEQ ID NO: 20832 - DNA, 2708 bp, Oryza sativa
  Clone ID: TF_OsC12642_1
atgcttttcgccaagctcgatgactcgcccatgctccgcacgcagatacagtcactggaagaaagtgctgaaattctcagggagagatgtttgaagtttcataaaggttgccgcaagtatacggaaggattaggagaagcttatgatggagatattgcatttgcaagctcactcgaaacatttgggggaggccacaatgaccctataagtgttgcttttggtggacctgttatgaccaaatttacaattgccttgagagaactaggcacatacaaggaagtcctccgctcccaggttgagcacatgctaaatgacagattgctgaattttgtggacattgatttgcatgatgttaaggatgcacggaagcgtttcgacaaggctagcctcttgtatgaccaggttcgtgataagtacctgtcactgaagaaaggcacacgagctgacataacaactgccattgaagatggatacgacctattgcatcagatggagccatatattaatcaggttcttgcttatgcacaacaatcaagagaaagggcaaacaaggagcaagcctctcttgtagagagaatgcatgaatacaaaaagcagatagatcgggaaattcgtttatcaaatggtttgactgatgcccataatggtgatggaattcaaacgattgctagaagttcacataaaatgattgaggcagtgatgcagtcggcctcaaaaggcaaggtccagaccattcgtcaaggttacctctcgaaaagatcttcaaacttgagagctgattggaaaagaaggttttttgtccttgatagtcgaggaatgctgtactactatcgcaagcaaattaataggacacctggtggttgttccagtcacccaagaagcattggcaaccccactgaacatggttctgggttgctgagcagactattctcatctcattaccatggcattatacatgatgagaaatctgttgcacggcatactgtaaatttgctgacatcaaccattaaagtggatgcagaacaatcagatctgaggttctgcttcagaataatttcacccacaaaggtctacacactacaggcagagagtgcaatagatcaaatggattggattgaaaagattactggtgtcattgcatctttgcttagctcacaatccccagaacagtgttttctgctaagccctaagagctgtggccatgatggcagtgccagtgaaagtagctcctttactagccaggatctggaaccttccatgtatgatgacttaacattggaaaagaacactggaaatgggcaacatgatgtcagaggcacacattatcacaagactaacatgaaacctgaaaaaccaattgatttgcttaggaaagttgatggcaatatcatttgtgttgattgtggttctatggaacctgattgggcatcattaaaccttggtgcacttctgtgcatagagtgctctggggtacacagaaatctcggagtgcatatatcaaagttaatcagcactacattgttccgcagcgctcatggattagatacggcatggcacttcactgtcagcaagcctaaacactcagatcctttctctgccaaagagaagtttatccatgccaagtatgctgacaaggaatttgtacgaaagtatagcatggatgagattcagctagctcagcagatgtgggataatgtaactgcaaatgacaagagagctgtatacagtctcatcgtgcaatcccgcgccaatgtaaatttagtttatggagagatgtcctatagttcacgttcgactactggaagatcatctcagcaagagcactcttcctcaccatctgatggaagccctgtatttttcgattgccattcacatgaaaaagtttctcctagagagcccctttctcctgccagcacaagttcacgtgtagatgatggggaagaaagatgcgaagatgttggaatggttgaattacttttgcagtacggagctaatgtaaatgcaattgattcaagaggccggacaccccttcatcagtgtatattgaaaggaagacacatacatgctaagcttctactctccaggggggctaatccacaagttgcggaccaagatggcaggacggcattacagtgtgccatcgacggtggaacaagcgacgacgagattcttgtgttgttagaagattatactagataaaatctggtggggaaaaagccctcacttcagtagcatttcttctgtgacacagaccacgcccgttgtgaagtcaagagtaacccggctccaggcttctcccagcttgtgttgctcaatgacccaagtttgtggcgtgaagtagcctatgggttcttctgaagcttcagcaacatgatgtgcctgctccttttcttctcctatatatataccatttcgttgccggattctcttagcgtaggctattcttatttatattcatcttgcaaacggcttggtttttgtttgcagatgattcatgcatagtatgtaagtttgtatatccatcatatcgagttgcttctttctctgtttttttgtatcatctcagaacctgaagtaggtccactagtttccatgaaggatggttggatgtacataccgagatgtgccattgtgatttattatggaatgtgaaatatcacctttttgaaaaggggggcaatttcgttcttgcctctactttgaggtcc

SEQ ID NO: 20833 - DNA, 1699 bp, Oryza sativa
  Clone ID: TF_OsC341609_1
atgactgaaatgttactgaattggaacaaggacctcacagaacaagttgacaaaaatcgaagcacgccacttcacttcgctgcatcactttgtaaagacttcgctgcatcacttagtgaatatactgtaataacgtggatgtcacgcactccgctcattccagtactgctagccaacccagttcagttgtaccagcaagattctgaaggattgtatccgatacacgttgctgcatcctcaggtgccattcggactatcaaatatttaattgaggagcaacctgatgagatcgctggtcttgtagattttaaggggaggactttccttcatgtcgctgttgaaaggggcagaaggaatatagttgagtatgctcaccgtactcgatcattggctaggattttcaatatgcaagacaatgatggcaacaccgcaatgcatatagcagtgcggaatggaaataagtacattttttgtattttactaaggaacaggaaaaacccagaaaaattgatattgctggcattaacacattgcaatgcaagtggtggttgccgtcgggcagatcactttcagaaaaaacaggcagacgaagcgaaggaatcagagaaactgacaacttcaacacaaactctaggcatcggatcagtactaattgttactgtcacatttggcgcaattttagccatacctggaggatataaagccgacgaccattacaatggcggtacaccaacacttgctggaagttcggtgataagtttgggtgctgcttttatgctaggtatgtatttggtactggctccagtggctcgatggactgcaattgcaatctgtgtaatgatgatgattgcatctctatgcttattcacggagccattgcatgcaccccgtgttgcaatagcgatgtatgttaggaagggaaatcaggatatccaaagaacatatattattaactgtgggacaccaaataacatgcatggtaactatcgacaggtgatacttgtagaccgtatcctgagggcactagggcccctcaccaactcatccggccttcctcttttccctcaggcggtgacaacgacagccacggtgacgacgcgtagatccatcgctggccgtgatgacgatggcggcgacagtgcttggatctgctgccgaccgtaaagacgacaaaatctggatccaccaccaactagcctcgagcgcgcagatcgaccgctggccgggacaacaatgacggccgcgacgacgatggcgacgacgcctggatccactgtcggccgccaccgcgtctcctccgcgagctgccgccacctagccccggtgagcccgctgccccccgccgaccccgccatcgcctcccctcctgccgccgccgccgccgcccctctcaccggatctggcggaggggagggcgtggtcgccactgccgcctccgctccaaacccgtcgttgttgtcgcacctcccaaaccatcgccatgaaggctcgaagcggctagatccagtggcccttgacctcagcaagctatcatattcaggttgccccgtgtcctcgggacgagctgaatcctcgggacgagccaagacacctgagcatgctcccattgttgtaagtaaacttctttgttgtattggataagcttgcatgcctgcaggtcgactctagaggatccccgggtaccgagctcgaattcgcc

SEQ ID NO: 20834 - DNA, 865 bp, Oryza sativa
  unsure (1)..(865): unsure at all n locations
  Clone ID: TF_OsC68618_1
gacagggtaaaaaattttaccaaggcatctaaacaaggcctaaaagtccaacattttgacggatccaaatccaatgagagatgtcaaattcagttataattttttaaacactgaaatgaaatttacttttcttccttattcattaaacaaaactctggaaggatgaatagaatagcaatccaatctcaccttaaccttgctcccaagtgaaataaaaaataatctagtgcactcttcgatacatacagaagcatacaggtactcatttgcggatgaacaggagcatatgcagagcagaaatgcagcatttgtctctgaattgagagagaggagtgtggctggcctggcctggcctggcctcgattgtttcattctatacgaaggcgtgcttctcgagcagcttgaggacttcctcctggttgttgagtttcgccacgtcgatggccgtcttcccgtccaggttctgcaccgtcacggcggcgccgtggtcgagcaggagggcgacgcagtccttgcggccgtagccggcggcgtagtgcagcgccgtgttcttgttcttgtccaccgcgtccacggccgcgccggcctccaggagaacctgcgcgcatttcagctcgccatagccgcaagcgaaatgcaggcctctcctccctcccgaatcctcctcgtccttgtccacgccttcctccaatgctttcttcaggccctcgacatcgccgacgctggcagtgtggtggatgaccgacctcccctttcactctctctttcccccgcgncncnccccccnanggnaaccncccccaatttgngtcggtttcattttcgggggggccnncatccaaaggtagnggggccccncggnacn

SEQ ID NO: 20835 - DNA, 2395 bp, Oryza sativa
  Clone ID: TF_OsC413415_1
atgtcgcggcgcagggcggccgctgtggcggcggcggcgcgggaggaggaggaggcgtcgcccgctcagcgtctcgtggaggctgccctacggggggacgtggtgaccatggaggcgtgcctggcggccgccgccgccgctgccgcagcggacgacgacacggacgatggcgtgcccgcggcgagccgcgtcggggtggcgcgcctgcgggtgaggtgcgctgaggtggccctccgcgaggaggcggccggggaggtgatcgtggagtcccgcgagctcaagaccgacgtctcgccgctcttcgccgccgcgcacgccggtcatgccgaagttgttcgcaccctcctgagtggaggtggtggaaaggtggctggtgtatcaagttgtaaaaaagtatactgctcggtatttgaggttgctggagctgatgttaatcaaaagttatttctaggctatgcaacaacagctgccgcacgtgaaggaaacatccatattctagagatgcttctgcaggctggagtcactcgggaagcttgtgaagattccctatcagaggctgctctttttgctgaggctgaagccgttcggctattagtctgttcagagatgatacagcctgaagctgcagcacatgctttggtgactgcttcttcaagaggctttgatgatgttgtggtcatactactgcagaatggggttgacgttaattccatggctagggtcctcttgaggtctgttaagcctgcactacatgctaatgtgaattgcactccactggtggcagcagtaatgagccggcaaatttcaactgtgaaactcttgattgaggaaggctcttacttggactgtcttgtgcaagttggttcttggtgttgggactctgcaacgggtgaagaacttcgtgttggtgcatgccttggggaaaaatacaacgccatttggtgtgcagtagagtactacgaatgcagtggtgaaatcctcaaattgctgctcgataaagcaccatggttgctggaaaccccacgcaagggtcgaaatcttctttgccatgccatactctgtcagaacccgaatgcagtaagcgtgcttctaaatgctggtgccaatcccagatttcccataatgatgacaaacggcacacacgtctcctacccaatacattttgctgcaaggttgggtcatgcgcccgtactgaaacaactcatgttggatggggctaatatcaatgcgcagacttctactggggacactcctctgatggtctctgcgaggtgtggacactccgattgctttcttgaactgatcaaatcaggggcagaccttgggatagtgaacaatgcaggtgacacagcaataatgcttgctaagaaaagctcatttagctcaaccatcatcgacattctttccagagcattgagttgcggaggctgcatcacttcatcggatatcaccgtcttctctccgctgcacttcttcgctgcaagtgacagtgcagaagctcttctaatgacgctacactactcagcagcagatctgaacaggcctgatggttcagggctcactcctgttatggttgctgcagagtcaggccatgctgacattttcaggcttctagtgatggcgggggcagatatcgctgccacgagtgccgaagggaaatccgcgatgtcgatcatccgaagcagagctcctgaaaccagagatcggttcgaacagatcttactccaggcttcgctcgcggatgcgatcgcaggccagcagccatctttcagacccctgcactacgcggcccggatcggcgacacctcctccctgacgcagctcctgaagatgggccacgatcccaacgcgatggacgaggatggctacacgccgctgatgcacgcggccgccgcaggcaagctggaggcgtgcagggcgctggtgtcgcgcggcggcgccgccgacgcggggagcgagacggcgctgtcggtggcgaggaggagcggcaggtcgaacaaggcgacggaggagtggctgctggaccacgtggcgcgcgccccacgtgctcgccggggaggagctgacgaagcacacgcgcgggggccggggtccgccgcaccgcaaggcggtgcggatgatgcggtccggcgtgctgacgtggggggcgacccgccggaggaacgtggcctgcagggaggcccgggcggggcccagcgcggcgttcaggaggaacaggaggatcatcaggacgggcagcgaggagcagctgatcctaatggtggagacggtgaccgggagggagatccacttcgaggccacctccgcgtccagcgtcgagctatgggtcagaggcatcaatctcatcgtgcaagactgcgcgtggtcaaggccggatgaagctgagcaagcatag

SEQ ID NO: 20836 - DNA, 1083 bp, Oryza sativa
  Clone ID: TF_OsC359_7318
tcctgcacccccaaacgaaacttggcaaaaaaaaaagaaaaacatgtattctcatagaaaactattgtgtgaagcaatacaaagagaagtacaggttcatagtgtcaatgacttctgcagtggggtaaaacccatactccttgaggatagttgaaacatgttccaaaacctccacatggggcgcctctgaatgcgcctgaacgtatgcagaaagaggttcaccagcttgggaaattacatcaacaagcaggcctgtgcaatcaataagtgccctcttttcctcccgaagcttctgtgccattccatttgaaactttcccccatctcaaggcaaatgaaagcctcagtatacgcttgtacataatgtcatacccatttttctttctacctcggatctgctcctgagcagccagtagtagaattgcggtctggataagttttccattctcaatataattccagagctcttcaaggagattatttgtttttcctgcaagtagtctagttgtatccaggaagatcttcatttcaggtaaacacagcagatggaaaagcttgtagatataatccagatgatcctggccgggagaaagattgtcctcaagatacttatgcaggcaagtgttctcaatcgcgatatggagcaggagtaggccatcgatgacatcgtcgccaaccgtgcgtacgttggctgatgcaccatggcgtaagagcagcttgatcatctcaatagagaacctttcagcagcttcatggagcgggaagtatccatatttggttacgcagttgggattggcatgcaccccaaggagctcaggtgccctgccctccaatacaactttcgcgcatcgcagggaattgaaactgaccatgcaggttaaggtttgtgcggtgatggtgagattccatgacatggtatagcccttccagttcttgaataatcggaggaagcaacgtgcactatcctttataaagatgggctccaattggtcatatttgtccaagaaggtataacacatccaacctcgggagcagggtctgggatgattatgtcatttgctagccggcgtgagagaagcggcgt

SEQ ID NO: 20837 - DNA, 1893 bp, Oryza sativa; identical to SEQ ID NO: 11014
  Clone ID: TF_OsC349299_1

SEQ ID NO: 20838 - DNA, 1641 bp, Oryza sativa
  Clone ID: TF_OsC298449_1
ctaggtgtcagatatcaagaatgcctgaaatgcaagctttctacccatgttaggaagcccctcacttccagcattattactgtgtcctccaggcaaggtaaaagcagcggcgaaggtgattgttgcaaggaggattgctactaaagaagtgttgcttgtgtatgtttgagtcaatgtccttatatccttccttgctttctcagttacttgatctttgattgtttttataagattatagatttcacctttgtcttccgggtcagctttcaacatacgcatggagacttcactccagttgagcgtcttagcatggtcggcggcatcatttggtacccagattggggggttaccgttgctgtcgagcactgtgacatcctgggctttacattgcagtaaaagagcgacgatcttcggatggcacttccggattgcataatgaagggcagtttcaccgtttctgtctcgcatgttaatgagtttccgcagctcctttgactgcaaaacaaattccacaaactttatgtgacctttttgtacagctatgtggagacatgtggtgccatcgttttcaactagaaatggagcatctggacaatgtttaagaatctccatagcaacaccaacatggccctggtatgcggcactaccaagaagagggataccacttgtgctgattatatatcctaaagagaaatcatgttccaacaatacttttagcacgtcaatcttgttctcaagcacaccaaattgcattggattaacccgtgcgctgttctcttctcttgccaatttaggacgagtctcaataatctttttggcgatatcagtattgttatttctaaaggcagcatgcagagcattgtatccggaggttccaccgtgagcagaatcaggaacctccaacagtttatcgaacacatcggtgaaattcctcatcaccgcgatgaacatgggcgattcatcgtgtttgttaacagctttcgtcaaggcaggctctttttctatcagctcgaatgcaagcttcctgtgtcccctgcggatggtgtggtgcagcgcgttgcatccttgcttgtcttgcctcaccatcgcctccctcgtatcaagatcgtcatggcggcggcagtagtaactgagaagaaaagaagctaaagcgacattgccgctttttacggtggcgagcaacggcgtctcgccatccgcgtttacagtgcagaggagggacgggttcagcatcaagatatccttgcagaattcctcgtggccatgggccgatgctatgtggaggcaggtgttcccctgcactgtccttccaagcagaaggcttgggtcatgcagagccggcttcacacccgatgtggctgctttcagcagacctctgtccatcactggcgaatctgcggttgctttgctgtctggaataggcctaagcggctgggatggccccttgggcctcttcaaagttgggcttgttatggcgaagcccccatccttcagcatacacccttcgcccaatgatgcatttggtcttgccagataccaacgcgattcttcagccttcgccatctctacttcatagtcttcgccatgggacttcgcccagatgatcttatcgtcatgggcctgaatcctcacaggttgcat

SEQ ID NO: 20839 - DNA, 1401 bp, Oryza sativa; identical to SEQ ID NO: 10999
  Clone ID: TF_OsC309277_1

SEQ ID NO: 20840 - DNA, 1669 bp, Oryza sativa
  Clone ID: TF_OsC26711_1
atggggaactctctggggtgctccgcctccggggagaggctggtgtcggcggcgcgggacggggacgcggtggaggcgcggatgctgctggagctcagcccggcgctggcgcggtactccaccttcggcggcctcaactccccgctccacttcgccgccgctaagggccacctcgacattgtgacgctgttgctggagaagggcgcggatgtgaacgtacggaactactgcgggcaggtgttccatttccgcactgcgcaagcatggagatggacaagagggaacagcaggatcttgaccggactagctgctcaggcatgttctggagccgaagaagctgccacagggaggagcagtgtaatgcagagatcaatgcttgattctttcttctttctggttgttaatatatctggattcatagcagctcaatgtgggagatgagcagcggttattttttttgcctccccagctgtgtttctttcccctatttgcagccaagattttcttgattggtgaagtgaatcctgcagcttttggctgctgtagtttttactgtattgtagcattttggttacaaatgtgtgtcgtccctgtgatcctagatagccccaaaatcaccagttactcctctttgtagctgtatgtaaattgcaggagttggttgggatttgttttctggtaaagatgttgagaatctatgtacaatggcatcagtcatttgccctcttaaatcttaatgataatactatatagatcctaaaaataaaagagcaaacttaatatagctaggccagattatgtgctctgtagaattgcaataatttcagaaactgttaagttaggaagagaatttgggttgctgcacaccgtagcctctgtggatgatagtgatctttgtgcagtttgccttgaaaggtcttgttcagtagctgctgaaggttgttgtcatgagttctgcatcaaatgtgctctttatctttgctcaacgagcaatacccgtgttgagttcactggcccacctggatcgattccgtgccctctttgtcggaatggaataatgtcatttaccaagttgccaagcacgccaacagaagggcttaaatctagctcagcactcacgttctgtaatccatgcatgctaaacacccgatctgtagactcaccagcaactatcagcaaagcagaaataaggcgcaaccgtgttgcagctgtctcttcagagctagtctgcccactaacctgcagcccatttccatcgtctgccctcccgacctgcaggtgcagtgacgatgatccatgtgatgccatagaaacacaggatggttccgaggtgcaatctcctcagccatcgcactgcgcaagcatggagatggacaagagggaacagcaggatcttgaccggactagctgctcaggcatgttctggagccgaagaagctgccacagggaggagcagtgtaatgcagagatcaatgcttgattgtttcttctttctggtgtggtactatatctggatacatagcagctcaatgtgggagatgagcagcggttattttccttggctccccagctgtggttctttcccctatttgcagccaagattttcttgattggagaagagaatcctgcagctctttggctgctgtagatttcactgtactgtagcatt

SEQ ID NO: 20841 - DNA, 1122 bp, Oryza sativa
  Clone ID: TF_OsC45222_1
agagcaaactgacatgacagttactacaataattcttggctagtatgaattatggtccagttgatcaaatctgattctagatcagaatggttcatacttaaaaaagacaggattcaaccaaaaaaaattagtacaggttttcgataccaaaatttgttccccttcgttaacctttgtgcagcataacattttcagccttcaagcattgccttggctgcatcaattagtgcaggtctaaagctatcagatgctcgaccaagtacggtatagccttccttgtcctcaatggcaacatcagcaccatgtctaactagcagaagagcaaccgctttgtcctcagaaataacagcatgcattagtggtgtttgtcctgttttgtcaactgcatcaacatcagccccctcctcaattaggaattcacacagttcagcatttcctgtactggcagctctatgtaagggtgtgcacccaaacttatctttcttgttgacatttgcactgtgcgctattagtgtttctgctatattaagccgtcctttactggcagcataatgaagagcagtccggccagcatcggttgtcaaatcaacattagcaccttgatcgagcaggatggagatgatctcagcttttccgctgctcgccgccgtgtggatcggcgcccacccctcctcgtccttcccgttcacaacgctggccgccgcgtcgccgcccatcgcggcaagcactctcaccacctgggcgtggccggaggcggcggcgacgtggaggagggaccggccgtcctcatcgcggagggcgagcgcggcggcgaggtcggcgggggagagggaggagaaggccgcggcgtccccggactccgccgcgctgaagagctccttctccgaatgtctcccaccgcccgcggcggcgctggcggcggcgccgtcgatgtccattgtagcagacatcgtgcttaggcaaaagcgaaggcgcagaagagaaatacgcttcgagcctcaggtttgcgtttccggacgcgtggggctcatctcgtgcgcgtctcaaatgagccacacacggctctaaagccacgtatcaggatcagaatcagatacggcaatgatacgataagcctcgtgc

SEQ ID NO: 20842 - DNA, 1358 bp, Oryza sativa
  Clone ID: TF_OsC35821_1
gcacgaggcttcctctcgtcgattccgcctcagatcggggaggaatcgcggcgagatcggccgctccgaatccgatccgcgcacgtggtctcgccggcggggtcaggttggttcgcgggagccgccgccgccgccgccgacgacgacgatggccatggagacgccgccgccgttccaggagtccgcccactgcgacgtctgccgctgcaccttcaccaccttccgccgccgccatcactgccgcaactgcgggaggacgctctgccacgagcactcgtcgtaccatatggctctcccacagtacgggatatacacggacgtcagagtctgctatgattgcttcaacaaatcctccagtcgtggtggtgttggcaatgccggttcacctgggagtgtatctagtgcagctgactccttttcagggttaaacttgggggaagatgatgcttcatcacctatgaaaaattcagcgtttcacagtgcacctgctgttattgagtgcaaatgtggaatgcctttgtgtatatgcgaggctccgaaaccagaacctgtgcctgtaaagttttgtgtgcctccgcctaacgagcatatgcagcagagtatcagcacaacttcctcaagtgcacagtcgaatcctaggccaaaaaaatcttctaccaatcaacaatctgctgaatcaagtgtcaagaaggcttcggccacttcaagcagcaactcaagctcattcttaaatcttggcctgatgagcaatgatactaatgataagggtccttctgaatatgatgttactggggagggactgagggaagcaattaagagtggggatattaaagctgtcaagaaacttctcagccagggagtggattctaattactgcgataagcaaggatttgctttgctacatttggctgcactatttaaccagacagagattgctcttattctcatggataatggagcaaatattcagagcaaaaatggacaaggggaaactcctttggattgtgctccagccatgctgcaatacaagatgcgccagaggatggaagaacttgcggcatcacaacgaccctagtgatatttttctcctcttgttcatgtgccaaagatggtgcccccccttgcatggcccagaataaaaccatttttaccaaccgaggggcctctttgctgtgggtatagtagtatttctgttggcaccatcgcctacaaaatgtcaaaacaacaccagctcataaactgcatgtttcgccagctaaaaaaataattcattgtgcttaatcttgccatgtcatcgtgcatacatatgttcatgtatatgtaatcatatgtcctggtttattattagcattggtctg

SEQ ID NO: 20843 - DNA, 915 bp, Oryza sativa
  Clone ID: TF_OsC1528_2259
gggtggaaacgatcgcactaatcctgtgcgtcgccttcgtgttaatatatatgtgatgggaacagcccccatcgtggcgatacagagttcggcgcagctgagaacaaccgaagccgagattgatgaaacgactgcatgcagtaacagaaaacagaaaacaaactctaacaaacatctgttatcgcatgtggaggaaaggctaacctgatccgcatggatagactaacctaatccaaactaacctcaacaactacatgcatgcaagctgtcaggtcgtcatcacatgatccgaacctttcatgctaactaacacggtcgccttcgcacgtgccacgacaagagcctccacggtggcgccatgcccgtgcctcgctgccatgtgtagggccgtgtccccggccgcgttctggcatcccaggatattctcctcgcagtcctgggccagatttacaaggatcgtcacggtgccggcgtgccctgccctcgccgcgcagtgcagaggtgtgtccatcgccgagttccggcgagagaggagactattgtccctgatgaacctatggtagagctcctggatcagctcgccatgccctttctccgctgcgacatgaagaatggtgttcctctccgccgtcacctcgagtacgttgcactgtctgtgctgaatgatgccagcgacttgacgatgtgctgctgcaccatcgccgggccgttgctgcagaagcaacgccatgacctcctccgctcgcccgctccgtgcagcgcgatacagcgacgggcacatctccatgcgaggcgcctcatcaccattcgacgccgccggctgatccattgatggagtatgcatgccgtacgtacgtgtcaaattaagcttattagagataaagaggatataaagtatatgctcggacgcgtggg

SEQ ID NO: 20844 - DNA, 655 bp, Oryza sativa
  Clone ID: TF_OsC97704_1
atgacgacgcagcaagcttctggtgcagatgcagagtcgggcatggatctggacggggtcaccactgaagggaacactgcactccatgttgtggccacctgcggtgatggcccgggctacttgaggagtgcaggcgtcatctacagcaggtcccaacatctcatgttagtgcagaacaacaacggtgacacacctctgcactgcgctgtccgggctggccattccaaaatggttgatcatctaattgatctggttgaaactaaggacaactcccctagcagcgcgagactggaggaactcctgagaaaggaaaactgccgtaaggagacggcctttcatgatgccgtctgcattggaaataaggatataatcaccaaccttcttaaatattattcagaattggccggcttccttatggatgcaacaggtacttcaccgttgtacctagctgtcttgcatcaacaggtcgacattgcaaagttattgcatcaaatgacagacgggaatctttcgtactctggcccaaatagacaaaatgcattgcacgcagccgttctacaagaccaaggtgcgtatgcaatttatatttgctgttttgaatttcattctagctatattccatacttattttgaatcatatatttgcttttatcat

SEQ ID NO: 20845 - DNA, 1523 bp, Oryza sativa
  Clone ID: TF_OsC763_2
ccggccgcggttcttcttcccaagttctcatcgagggttttcctctctctctctcgcatcgcatccatcccctcgtgtcgccgccggcggaggctgcggcgagccttcaccccccacccgcccaccgccggcgagccacggcgtgggcgacctcctctcctctcccgatcccctctcgcccttaggtaggggcttctccccagtccccaccacacgcgcgtgcgtggccgacgagcaccccaggttcggatcggatggaagaccagaagaaaaatgcaaaaccagaggggtcttctggctcgcaaaggggagctcccccggcacctgatgcaggccttcccaatccttttgatttttctcagtttagcaacttgctcaatgatccatctataaaggagatggcagagcagattgcaagcgaccctgtgttcacccagatggcagagcagctgcagaagagtgctcatgtgaccggggaacagggtggccctgcattggatcctcagcagtacatggaaacaatgacacaagtcatgcaaaaccctcaattcatgtcaatggcagaacgtcttgggaatactcttatgcaggatcctggaatgtccagtatgctcgagagtttgactagtccttctcataaggagctgcttgaagagcggatgtcccgtattaaagaagatccctctttgaaggggattcttgatgagatagagagtggtggtccatctgctatggtgaagtactggaatgaccctgaagttcttcaaaagattggtcaggctatgtcaattaattttccaggagatgctgctacttccactacattgtctggacctgaagaaactgaagaggatggtggagatgatgatgagtccattgtccatcatactgccagtgttggcgatgcggagggtctgaagaaagctttagaggatggagcagacatggatgaagaagacgctgagggaagaagggccttacattttgcgtgtggttacggtgagttgaaatgcgcagagatccttctggaggcaggtgctgctgtaaacgcactggataagaacaagaacaccccactgcattacgctgctggatatggtcggaaagaatgtgtggatcttctgctgaagcatggcgctgctgtcacgccccagaatctggacgggaagacccccatcgaggtggccaagctgaacaaccaggatgaggtcctcaaggtgctcgagatggacgctttcctataaagaaaccaatgccaaatctcacgctcatcatcaccggctcgtcgctttacagttcagctttttacggcaaacccaaatcatcatcgactcttttagctttggttttggtgtgggggtcgaacatccatgaatcgttgctatgtttggagaaccgatttgtaatctgtttcacttccccgttacactgcatcactccgtttcatcctttgtattcctatgttgctgagtctggtggtgcagaaaaaaaaaaaaaaaaaaaaaaaaaaacccccccacaac

SEQ ID NO: 20846 - DNA, 2790 bp, Oryza sativa
  Clone ID: TF_OsC35544_2
atgcctataaagagacttgagattgagaaagtaacggcccaggatgcagtcttagcttttaaaaatgatggaatcgggttgctgcacgctgcggcttgccagggccaactgaacgtttgcaagttcttggtggaggaatgggggggtgacgtgaatatggctggagcacaaggtttaacaccggttatggcagctgctgagtctgatgctgttccgattctgaaaggatagcttgatcatgggggtgatgttacaaacgcagatgtgataggaggcacagttatccaccatcctgctgaaacgagttgatggatggaaacagagttatcgctttcaaaagcaattcctgtcaagatagacagtgaccttggaacaccactctttcatgctgctaacgatgacaaggataagacacctaacattctgatgtatcacaatgcagcttaacaagcttgggattggggtgctgcacgccgcggcatgccagtgccatctgattgtttgcaagttcttggtggaggaattggggggtgacgtgaatattgctggaaaagaagatataacaccgtttatggccgctgctgagtttggtgatattcctacgttggagtattttcgtaatcatagtggagatgtaacaaaaggagatgttagagtacaaacatcccggagcggtgtggctgtggaataatctctcatgcgaaagtcaaagatataaggccaatgacaatagatcatgggccaaccacagttctgtacacaaacaggagcatttgtagattgctcatgggtgatggtgaagatgctcaatctgatggtaacagatcccgaatgatgcggcctaactgggaaaaagcttgttatcgttggagtgcaggtcacatgctactcaaggagtacaaacaactgtgggatgctctcatggatgcacaaaaattggatcctgggagcgttgaaattgagaaggaacaaagggaatatgatatccaagaaagtaaagatgttgtggagtcgaaggttggcctttatgataaacccactgcatcttatggggtcaaacctccaaatgtttcatctgttatgggaaaaacacaaattgatacatgcaaagatgtggtcttcttaaaagaagaggtagagaaaaggatgaggctggatgtttctggatccttcttcgtgtaccagatgagcacgttagaagcaggaataccattatcatcgtatgctggaaagacatggaatgggaacattgacatggatggtttgattgttgttcatgggagagtcagaatcaagaaaaagccatggaaaggcctcaactcaagcaagatgaacagtgactgcaccaagttgacttcgatgataagagaaatgtttgtcaaaaaaaatgttcatcctccgtacttgaagcaccttcttggaaagttagaagctttagctgtcgatgttttcacagtgcgtcagcagcttgcttttgactatcatatctctttgataccttctctgaaccgagtaaatttggtgtatcaaattaagagatgctatgatggctgggatgacagagagaaaatgtacttcagatttgttgcagacaattgcacagtcccagaagattggtgcaatactttgatgtctaagcatttgtttcgcctagtgattttggaaggacagaagaggaacatcatatacggctccaatggcatgagtgcatttcatttggtgagaaattacaatactcatgcaccagaacattcctggattcatgtgttcgtggattccaaaatagaacattaccaatggtttcaatgtgatagtggtattgagctaatggtcccaaaatatctaggagactttcttgcagaagctgtatttaagtttattgaagatgagtttgatttaactcatgtgaaaccaaatataaccaaatgcaattcaggtattccaacactgctacgacacaacttccatgaaggatctgaatgtaacagccatgacaagctgtcaagtccatttgatgggatgggacaaaaagtaatgcccagcgagacgttcgatcgttcggttgtctacgtggcaattatctatggcgaggctctcgatcggcttgctagctcctcggccatgtgctctaatggcgatttctcggtttgttcgcaggtaacccgtataaatgagtttatggatcgacccacttgcatctctaagtgcggcaaatcggaccacgacgtgaaaacacacgggttatcacttattttacatataaatgccgtcttagctcttaacaagcatgggattggggtgctgcacgccgcggcatgccagggccatctgaatgtttgcaagttcttggtggaggaattggggggtgacgtgaatattgctggaaaagaagatataacaccgtttatggccgctgctgagtctggtgatgttcctacggtggagtattttcttgatcatagtggtgatgtaacaaaagcagatgttagaggatgcacagttctccaccatgctgctggcacagatttatggcccatctcattcattgcaggatgctgtaagtctaacgtaattgtcaataatggagccggtagtcccctgatgagttcccttatctaccgatcattgaagtgtatgaagctactcataaaggctggtgctgatgttaatggcaagggtacagttgtaacccctttgatgcttgctgcgtcgcaaggaggctatactaacttcattcagtttcttctgaaggctggagcaaaccctaatattcctgatgatgtatgtttt

SEQ ID NO: 20847 - DNA, 1621 bp, Oryza sativa
  Clone ID: TF_OsC60712_1
gcgtgtgtgtgtacatgggtagcttagctctagttctactagctcttgccaacagcccagctaagctgagctgatctattcacgtctgtggcgtgagctagatcagcttattaactatctctctaccaaatcaagctaagttaattagctggatagctcgctcgcagtgatggtggttgtagtcgctgtcctcatgtccggcgtgggtgagacggctggcgcctcagcagggggtgcagatatatggggaattcgcttggctgcgtggggcttggggagaggttggcggcggcggcgaaggacggcgacgcggcggaggcgcagcggctgctggcggcgaaccccgggctggctcggtgcaccaccttcggcaacctcaactcgccgctccatgtcgccgccgccaaaggccaccacgagataatttactgtaataatatgctcaatgatcaaatcacagacgagattgctgcattgctgctggagaatggagcagatgtgaatgcgaggaacatctatggacaggtgtggagggtggagaacctgagtgggcggacggcgctgcacatggcggcggccggcggacatgtcaagtgcgtcaggctgctggtggcggacgccgccggcgacagagacgggtacgtgaacaaggcggcgaacggcggcgtgacggcgctgcacctggcggcgctgcacgggcacgtcgagtgcgtccacctgctcatcgacgagcgcgccagcctcgccgcgcagacgctgccctgcgccgcgccgcccatggcatccatcggcgccggcagcacgccgctgcactacgccgcgtgcggcggcgaggtcaagtgctgtcagatactcgtgtcaagaggagcagacagaacagccatcaattgcaatgggattgtggtagtcaggtggatcccaatcgacgcagccagaatctggggctgcaactggcttgaacacgtcctctcccccaagtcgcatcttccctgcacgggcacgcctccttccggctacctctcccagccactccccagcctcatcgccattgcaagggagcaaggtctgaacttgtcttcggaggtttctgatggcttcgatgaaggagcagatgcctgcgccgtctgtcttgagaggccctgcactgtagctgctgaaggttgcgatcacgagctgtgcgtgaaatgcgcgatggatctctgctcggtgatcaaatcctacgactcggcggggatcgccggcgagatcccgtgcccgctctgccggaccgggatagcctccttccggacaaccgccgccccgccgccgccgagcctcgccgggtcgcccgcccgccgcagccgccgcaacaactccggcggcggcggcggcgagcacgaggcctccaactccggcggcagcgagaagggatacggcagcatcgaccccgacgccggcgccgtcgtccccctctactacgcgccgcccttcgcgccttctgccatcctgacctgaggagcaaggtctgaacttgtcttcggaggtttctgatggcttcgatgaaggagcagatgcctgcgccgtctgtcttgagaggccctgcactgtagctgctgaaggttgcgatcacgagctgtgcgtg

SEQ ID NO: 20848 - DNA, 2384 bp, Oryza sativa
  Clone ID: TF_OsC339703_1
atggatttcggaccttgcaacgagacgctcgacaccgaactgctacacgtgctgacctccggcgacgaggtccgcatggcggacctgctgggcagagaacgccgtggccatggccactccctgtcccaggtggcgatacgcgtcgacgacgacgacgacggccgcgcgccggcgggagcgagccgcctccttggcgtgacgacgggcaacggcaacacggcgctgcacgtggccgccacccgcgggcacgccgcgctcgcggcgctggtctgcgcgacggcgcccgcgctggccgccacgcgcaacaggttcctcgacacgcctctgcactgcgcggccaagtccgggcaccgcgacgtggcggcctgcctcctgtcagagatgctgcgagccggcggcgcggcgtcagcggcgctgccgctgcggcgggcgacgaactgcctgggcgccaccgccttgcacgaggccgtgcggaacggccacgccggggtggtggctctcctcatggcggaggctcccgagctggcctccgtggccaacgacggtggcgtctcgccgctgtacctggcggcgacggttggctccgtggacattgtccgggcgctgctccacccgttgcctgatggaacgccctcgccggcctcggccgctggtccggacggacggacagctttgcattctgcggcaactactagcaaagagccctccctagctctggtttgtgatatccaaggatcatttcctttgcatgttgctgctgtgatgggcagtgttaggatcgtcgttgagctcatacagaaatgccccaacaactacaacgatttggtcgatgatcgaggaagaaattttctgcattgtgctgttgaacataacaaggaaagcatagttcgctacatttgccgagatgacaggtttggtatcctgatgaatgcaatggacaatgaaggaaatactcccctccatttggccgccgagtatgggcacccaaggatggtcagtttactcttggagacgatgagcgtcgatgtagccattaccaacagggatggtctaactgctgctgaccttgcttatcgccatctgcaacctggtttgcactattttctgaatcctcgagccgtggtaaagaatctcttctactgcaccagagcaccggttaccctagaaggggatcatgctaggactggcatcccatcggccatggaggatgccgatgctcccaaggacagtggtggcgtgacatccaccggaacagtcgcgtccgtgctgatcgccacggtgacgttcgcggcggctctcaccgttccggggggctacgtcgccgacgaccacccgaacgccgggacggcggcgtcggccgggcggttcgccttcagggcgttcgcggtgtcggacaccatggcgttcctctgctccatcgtgggcacctgcctcctcgtcgtcggcgaggcgagggaggtccggccgagcaggggccgtctccgcgcctaccaggggtcggcgtgggcgctcgtgacggccggggcgcagttcatggtcgccgcgttcgcgttcgggctccaggtcgcgctcggcggcggcgcggacagccggtggctggtggtgttcgtccacgcgctgtgctcggcatcggtgctgctctgcttcccgggcatctgggcgccgttctgcctcgggaaggcttgcgtcgacctcgagccggccacgcgggcgtggaggtcgccgaagtgcgcggcggcatcagcgagaaaggaggcttgccatgcgggaacgcggaggtcgtataactggcggttcagcttcttccagcgcttccgctcggcctccacgtggctggctctgggcttgttgggacacggccgccgcccaccactgcctgctctgatcctcgccatgggagccaccgctggcagtttgccgcctaatcagcgactccccatcgccaacgcgtccctccctcagttgccttcaccagcccagcaacaactccacggtggtagcttggtagatttttagggagagcaactgctaaagtgtcaaagctctccagggggtcgacggaggagtggaggaaggtgacatcggaggcacggaagttgtcgaagcacaacgtgttctgttgggcgtgcctcgtggacgacaaggccgtgccttggctgctatgcttcctctcctccaccaccgccgccatacaggataatgccgtggcgtcgctgctcaacctcttgaagcaccccgccgggcagatgaccatcatggaggtcggaggcgtcggcctcgttgtcgacgtgatcaacgtcgttgccaaggccgtggcgcagcataacgtagcggccatcctcttctacctctcgtcgaacaacccggatgcatcccggaggtga

SEQ ID NO: 20849 - DNA, 2674 bp, Oryza sativa
  Clone ID: TF_OsC264249_1
ggcacgaggtttttttttttttttttggaaatgatactgatatttcagagggaaagcactacaagcagtcagctaaaacaactttagccaagcaaacaaccaccaaaggctatacaaactccaggcccctgaaccaaaaagacatcatggcaagccaacccaagtacccaacccagccttcgagctgaaggccagcagctgggcacacccactacactcttcgcggtctcccactccctctacgcccctactctttacaggcacgctcgctgcgaactaccaaagcctacggggagcaacaaaacacaggggcgtctcactccttccctctcttgccgtacaccgccctggtcaccgcccggatgcccctcacccacagctccgcctcctcctcgccgccctggcacacgaagtgcacctccctccccgtcgccgtcgccacgcggaacagcccgggctcgtacgcgtcgcagccccgcctctgccggtgcagctggaacgccgagctgccaccgagctcggcctcccggcacaccacgttgcgccgccccgacccgccccaccggagcacgcccgccgcggcgaccatccgcagggacttgccgtgcggcttgccgcgcccgcacttggtgtgcttcttgacgtgggcgcccccgaggacgagctggcggcccagctcgtccatgatcacgtcctcggccttgttgaacgccgcggtggccctcgccagggagagcgccgtctcgccgcgcggggtccgggtgtcgcaccgcgcgccgtaggagatgaggagctcgcacacggccgcgtgcccttccctcgccgccagcatgagcggggtgtagccgtcgccgtccgggatgttgacgtcgcagcccgcgctcgccaggtggcgcaccgccgcggtgtcgccgcgccgggacgcgcagtggagcgcgtagaagccccccggcatgcccttctccagcgcgaactcgagcatgacctgctcgaacaggtccctcttcttgctctgctgcgccagcccgatggccgtctcgccgcgcttgttgctcagcttcacgttggcgccggcgaacacgagcgcgcggaaggcgtcgacgttgccctccttggccgcggccattatcggggagcacccgtccacgtcctgctcgtcgacgtccacgtctggctgggccaggagaacttccatcgcggcggcgtcaccgcagcgcgccgtgaacatcatcggcgagaacacgttccggtcgctcgaccgagggatcgtcccggaccgaatcacgccaagaacggcgcgctcgaagccggccttccagcccccggaacaagcgacggaagccgcggactcgccggccgagttcaacagcgcgacgtccgctccggcggacacgaggatcctcaggcaatcctcgcgcttgtggcgcgcggcgagtatggccgcaacgtcgccgccctccgccctcgcgttcacgtcgcatcccttgcctatcagcatctccaggatctccggctggccgaggcgcgcggccatgtgaacaggcctggacctggagctcctggacgtcttcacggccacctcgtggtccacgccggacgccagcagcgtctgcaccgcgccggcgctgccgcagaggacggcgtggtggaggagattccggccgagatgggtggcgcccgacgagtacccgttctggaggagcatgcggaggatggcgccggtggactcgtagtactccacggcgcaccagaccgcgtcgtaggggtccgcgaggccggcgccgacgcgcagctcctcgccggtggccgtgtcccatgaccacgctcccagcctcaccttggtgtccctctttactccggcctgaagtagctgacgaacgacggcgatttgccggctgacgatcgcggcgaagagtgccgtgcagtcgacattggcatgcagagaaggcttcagagagcgcaggagcacccgagaagtagcatttgggtcagctccacacttgatgagcgagtccaccacgtccacgaagccgcgggcggcggccgacacgagcgcgtgcacagcgacgcgagggcggacgaggtcggagcccatgaagatgacggcgagggcggcctgcccctgcagcgccgcctccacgacggcctcctcgcacgccggctgcgacgccccggcgcgcaccagcaacgccgccacctccgcgcgcccctcccgcgccgcggccgtcgccgggtacccacggaacaccttgccgttcacgtccgcccccttcgcagaggccctcatggccgtggcccgtgcgagctcatctgcaagcagcgcacggacgagcgcggcgtccccgttgccggcggcgaggaagagcggcgacacgtcggcgcggatctcctcgtgcgccgcccgcagctcagcggcggcgccgtcccgcagcgcggcctccgccacccgccgcgccttgagccacaccaccccggcgtagttcacgtccgcgcggccggacgcgagcagctccccggcctccctcgcgtccccgcgcgccaccgcctccaccagccgctgcgacgcggcctccgcctccgcctcgtcccgcagctgccggtggtggtcctccgccaccggccacacctgccgcccgccggcgatcgccgccgccggccgcagcagcactgccat

SEQ ID NO: 20850 - DNA, 2088 bp, Oryza sativa
  Clone ID: TF_OsC1713_3839
tcaatgtactcccctaatcttggagtacaacaccacgacaacaatcacaatgtaaggccagaattgcatcagcaaggtggccatgatggcgaacggcagccgccaccacgcccgtgcaatcccgagcctcttgagcagcatcacctcgccggcggccaccacaaagacgaaccacgcgacgtcggccagcgcgagccccgtgatgacgcaggcggcgatggccgtcgtgcgtgccacgggggccagcacgacgtacatcccgaacgcgaacgccacgccgaggctcctcgccgagcacgccatgaacgacgccgagaagacgaaggagatcatgcgggtgcgcatgtcgacggcggccaccccggcgtacgtgaggctgatgacggacagccccgcgcagatgaacgccagcgtgttggcgatgatgaacacgtcgaaggcgtagcggccggccagcctcggcgcgccatcgtcgccgtagtcgcccggcggcgcgaacgccgccgcgaacgccaccgtggcgatcagcaccgagccgacgccgatggtttgggtggattccgtcagcttcttcccttcaacctcctcgtctaccttcttgttgtgttttttgagaaagagatcccatcggtgattaccttgcttggcgttggcatctttcagcaacttgtatatcttgacccgttgattcaatccgaaataaacaccaactggtttctcgatccaagaaatatcaagcggggtttctcccttattgttcgtcaagttgagctcgacctggcgtctctccatgagagggttgaagatccacatgttgccggccttgacggcgaggtgcagcgccgtgttgccgtcgtcgtcctgcatgttcatcaccgccggcgagaggttcccgagcttgcaggcgtacgcgaccacggactgccgctgctcctcgacggcgacgtggaggaagctccgcccgcggccgtcacggagctcggcgcagcctcttaggtctcgacgcctgcgctcccccgagcacagcccggcgcacttgcggtggttgtcgagcccgagcaggatggagacggccctgacctggccgtcgtaggcggcgacatggatcgggaacgcgccgtcgtggtcaggctggtacgccgccgatgggtcggcatcgagcagcaagctgatgacgtcgtggtgcccccatgacgccgcgacgtggagaggcgtgctccctctgtgccggtcggcttgcttgatgagatccttgttccatcctagtatcattttcgtcgtctctgaaatcgataaatcattgaactcatatcgttctttgcctttctgaacagcggcgtgcaaggcgttattcccgtccggtccagcgtacgagagccccctgtcgtgctcatgcagcagccgtgcaatgtcgtcgcggcgccccagcgagacggccaggtacaacggcgagccgccgtcggccgccacgacgcgggcgagctcagggtcggcggacatcagcgcctccaccatcgccttgctgcccagacggacggcctcgtggagcgctgtctctcccttgctgttccgcctcctcgcgaacgccctcgccgccgcgtcgcccgcgacgccgccgccgccgcccctcctcgccaggtccaggagatgggagaccatcctgaccatgccggccctggcggcgcagtgcagcggcgtgtcgcccttcccgttgccggcgtcgaggaggtggctggccctggcgtggaccgccgtcgcgctctccaggaacgcgggctcgtcgccgctggacgccaccacgtggaggacggagtccagcgcgacggtgaccgcctccgccgatgttaccaccgcagctgtaggctcggcgtcgtcgtcgtcgtcgacacccacaccgacggtttcaacgtcctcgacatggaggacgacctccccaaccggcaatgccaccggcggcgacaccgtgccaagaagacgtttcagccggtcgcgatcgccgtggcgggcggccatgagcagctcgggacgatgcggcgcctgcaccccatcgttcggctcgctctgcgtcgtcgtcttcttggaatccat

SEQ ID NO: 20851 - DNA, 2915 bp, Oryza sativa
  Clone ID: TF_OsC658_1
ctcccgtcgctcggcgcgcggagcaaccgccgcatcaagctccgccgcttcatcatctccccctacgaccgccgatacagaatctgggagactttcctcatagttcttgtagtctactctgcgtgggtctcaccatttgaatttggcttcattccgaagcctacgggggctctagctacagccgacaatgtggtgaatgcattcttcgcggttgacatcattctgaccttctttgtggcttatttggataaaatgagctatatgcttgaagatgatccaaagaagatcgcatggcgttatagtaccacatggcttgttcttgacgtggcctccaccatcccatcagaatttgctcgcaggatactaccttcaaagcttaggtcatatggatttttcaacatgcttcgtctgtggcgtctccgcagagtcagctctctgttttctaggttggagaaggatagacacttcaattacttctgggttcgatgtgcaaagctcatttgtgtcacactttttgctgtgcactgtgcggcatgcttctactatcttcttgctgataggtaccccgtcccaacttctacgtggattggcaattacatggcagatttccatgaacggagcttatggattcgctacgtaacatcagtctattggtcaatcaccactcttaccaccgtgggctatggggatctacatgcagaaaatacaagggagatgatcttcaacattttctacatgctctttaaccttggtttgaccgcttatttgatcggtaacatgaccaatttggttgtccatggcactagtcgtactcgaaactatagggatacaatccaagcagcaacaagctttggagtaagaaatcagctaccacctcggctgcaagatcagatgatttcacatattagcttaaaatacaggacagattcagaaggtcttcaacaacaagagatccttgattcactgcctaaagctattaaatctagcatttctcaatatctgttcttccatctggttcaaaatgtttacctgtttcaaggagtctcaaatgatctgatttttcaactggtttcggagacgaacgcgtaatattttccacctagggaggatgtgattttgcagaatgaagcacccactgacttctacatcttagtttctggtagtgtggagttagtagagcagcaaaatggtgcagaccaggtgatacaagtggctacgtcaggagaagttgttggagaaattggggttctttgctacagacctcagctattcacagttcgaacaagatccttgtgccagttgttgcgtttgaatcgtacagcttttctcagcattgttcaatccaatgttggggatggaactatcataatgaacaaccttattcagttccttaaagagcagaaggagaacagtgtaatggctggtgtcgtaaaggagatagagagtatgctagctcggggaaatctggatttgccaattacactctgttttgcagtaactagaggagatgattttttgttgcatcaacttcttaagcgtggtatggatccaaatgagtcagataatgacgggcataccgcactgcatatagctgcttccaaaggaaacgagcaatgcgtcaggcttctattagaatatggagctgatccaaatgccagagactcagaaggaaaagttccactgtgggaagcgctgtgtgagaagcacgccgccgtcgtgcaactattagtcgaaggcggcgcggatctgtcgtcgggtgacacgggcttatacgcttgcatcgccgtggaggagagcgacaccgagctgctcaacgacatcattcactacggaggcgacgtgaacagggctcgccgggacgggaccaccgccctgcaccgcgccgtctgcgacggcaacgtccagatggccgagctcttgctggaacacggagccgacatcgacaagcaggacggcaacggctggaccccgagagccctcgccgagcagcagggccacgacgacatccagctcctgttccggtcgcgcaaggcggcgacggcgagtggccaccatcacgtcccaagctccaccaccaccagggtggcgccggcggcggcggcggcatcactgatcgggaggttcaacagcgagcccatgatgaagaacatgatccacgaagacgccgacctgcccagccgggttctccccgagaagctccggaggaagcgggtcaccttccagaactccctcttcggggtcatctcgtcgtcgcaggcgcagcgggagaccgaccacccgctctcgaggggtggcctcgcggcgacgggctccccgaacccgagcagcggcagccgcaacgccgtcatcagggtgacgatcagctgccccgagaaagggaacaccgccgggaagctcgtgctcctgcctcagacgctggacatgctcctcgagctcggcgccaagaagttcgacttcgcgccaaccaaggttctcaccgtggagggcgccgaggttgacgaggtggagctcatcagagacggcgatcatcttgtgctcgtcagtaatgaatgggatgcagagaagatgaaaggcaagagctagtaaaggagttgtgtgtttttttttctttttcttttttggttgtttactgttgatttccaagaaaggggagatagaatttaccccggagtccaacggttagctaaggaataactggaaatcattggtatagttattccaccatgaagagatggtgaaattgatgggttacgtccggtgttcgtaagtagagaagcgtaagaatttgattttgttatagcgtgttgtgatgttagcctgtttttgttttagttggcaagttgatctgctggcatgtacagttttacgcttttctaatttttgaaggaaaagtccaaagaatgtaccagtgcttc

SEQ ID NO: 20852 - DNA, 2832 bp, Oryza sativa; identical to SEQ ID NO: 11036
  Clone ID: TF_OsC658_2

SEQ ID NO: 20853 - DNA, 1248 bp, Oryza sativa; identical to SEQ ID NO: 11041
  Clone ID: TF_OsC254554_1

SEQ ID NO: 20854 - DNA, 2921 bp, Oryza sativa
  Clone ID: TF_OsC5083_1
ggtgactggtgagctgagctgagcttgcagttttggttcttggggtcttgaggagttgagctgtggtgcttaacacaggcatagctgcttgcttctttctttacaagttgttggcattggctccatgtgatcgatgagctgagagagctcagctcagctcagctcactttcgccactgcagcatcggcgagctagagctgtagatcttgggaagatccagcaatggagaagccggcgtcgtgctgctgctacttcccgctgcggtgggagagcaccggcgaccagtggtggtacgcgtcgccgatcgactgggcggcggcggacggccactacgacatcgtccggcagctgctgcacctcgacccgaacctcctcatcaagctcacctcgctccgccggatccgcaggctcgaggcgctctgggacgacgacgcgcgcttcgccggcgcggcggggcaccgcgcgggcgtcgcccggagcctcctgctggagtgcgagtgcagtaagaacgggggcgccgccgccgccgccgagaacacgctgctccgggcggggtacggcgggtggctgctctactcggcggcgtcggcgggggacatggcgttcgtgcaggagctcatggagagggaccccttgctggtgttcggcgagggcgagtacggcgtcacggacatgttctacgccgccgcgaggggcgggaacgccgaggtgttcaggctgctgctggaccacgccatgtcgccgaggtgctcgacgaattgccccaacggcggggaaggcgcgcgcggcggtggcggtggccgctcctcggtgttccggctggagatgatgagcagggcggtccacgccgccgcgaggggcggcagcgtggagatgctgagggagctcatcgagcgccgctccgacgtgtcggagtatctcgacttccgtggatccaccgtgctgcatgctgctgcagggagagggcagctagaggtgaggcatctacttcttggccattgcttacttcactacttctgcaaaatgcaccatagtgaacttctgtttgtgccaatatgcatggatgacaaggttgtcaagtaccttatggccactttcgacattgtcgattcgactgataatcaagggaacacggcattacatgtagcggcctaccgagggcatctgcctgttgtagaggcattggttgctgcatctccatcaaccatttcagctgtcaacagagctggtgatactttccttcattcagcaattgcaggtttcagaaccccaggcttccgacggcttgaccgccaaatggagcttatgagacacctgatacgtggaagaacatcaaatatccaaaagattatcaacctgaagaatgatgcaggcctcacagtccttcacatggctgtggttggttgtgttcatccagacctcgtcgaactcctgatgacaaccccatcgatcgacctcaatgctgaagatgccaatggcatgactccactggcattgctgaaacagcagctgcgctcttcaacatctgacaagctcatcaggcagatagtttccgcaggaggggtgctgaattcgactgttctgcgaactcggtcagcgatcgtttcgcagataaagatgcagggagggattgcaagcagccccggtacaactttcaagatatcagatgcagagatcttcctctactccgggatcggaaccgcggagtcccgacgccctagctcatgctctagcaatggcaagtgtgaccatgcccatcatggagatgcaaaatgcggaaatgctgaaaaccatggatcttcagagaagaggctgagctctgccagccgtgccaaggaccgtctcaagctgatgctgaaatggcctgatgcagagatcttcctctactccgggatcggaaccgcggagtcccgacgccctagctcatgctctagcaatggcaagtgtgaccatgcccatcatggagatgcaaaatgcggaaatgctgaaaaccatggatcttcagagaagaggctgagctctgccagccgtgccaaggaccgtctcaagctgatgctgaaatggcctcgtcagaagatgtccagaggacacaagaaatccgacgatggcgacgccatggattccatcaagaagctgagcgagcaggccccgccgccgccgcagtccggcaagatgaagggcaccaagacgacggcgctgaacaacaagaggaccctcgcggtgaagacctcgactcccagctcggccaccaagaagaagctcaacagcaagctcatcctgggcgagccgtcgagctcggggtcgtccgtgaacgacgacgcgtcggcggagatgccggcgcggcggcacgggtgcggcaacgggaggctgatcaacatctgcttcggcgcgcagggcctcaccgtggaggactcggccagcgggcagcagaccagcaagatgttcaagcagcagtacaacgacgacgacgatgacgccatgggcgagccgtcgagctcggggtcgtccgtgaacgacgacgcgtcggcggagattccggcgcggcgggcacgggttcggcaacgggaggctgatcaacatctgcttcggcgcgcagggcctcaccgtggaggactcggccagcgggcagcagaccagcaagatgttcaagcagcagtgcctcagggtgtcctgactcccgagtgactcacacgcgcacacggtataattagcctgcttttctttggttttctgactcgaattgagcttgcagttcaacggaacatatatggtttctgcatgttgaactcgtcgggcttgtgtggattttgttggctgctgcgtgtaaccgtatccttgcgtggcgtgcttggtttctggttgggcttgtgttaacgccttaacggcttacttcgatgcaaatatatttggtgaatgtatca

SEQ ID NO: 20855 - DNA, 787 bp, Oryza sativa
  unsure (1)..(787): unsure at all n locations
  Clone ID: TF_OsC26711_2
cggacgggaaaattcgagaccccgaaattccggcaatttcaaacgcgccccctcgccgccggcgagccccagcgcgatcctgagccccggcggtccgtcgccggaggtgttagcctcgtgaggtggctctcgccgtcgccggcgagcggcgtaggcggaggcggcggcgatggggaactctctggggtgctccgcctccggggagaggctggtgtcggcggcgcgggacggggacgcggtggaggcgcggatgctgctggagctcagcccggcgctggcgcggtactccaccttcggcggcctcaactccccgctccacttcgccgccgctaagggccacctcgacattgtgacgctgttgctggagaagggcgcggatgtgaacgtacggaactactgcgggcagactgcgttgatgcacgcatgccggcatggccactgggaggtggttcagatgcttctgctcttcagatgcaatgttaccagggcggattacttgagtggccgaacagcattgcatttcgcagcacatgatggacttgttcggtgcgttcgtcttttactcgcggactttgtcccaagtgctcccttagaggatggtgcttcttcgacggtggatggtgggngaatgtcagacgaatagtgggagcagtccttgttcttctttgggactgaaatttaatgaatctgctcgtttgagatatatcaacanacctgctgtgggcggtgttacagcacttcatatggcagctttgaatggtcattttgattgcatgcaattggtgat

SEQ ID NO: 20856 - DNA, 6019 bp, Oryza sativa
  unsure (1)..(6019): unsure at all n locations
  Clone ID: TF_OsC359_8351
atggcggaggagctccccttccccgctaacatcgaagtgatgcgccacacgccgcggttcaagctcatgcaggcggcattccacggcgacctccgcggcttgaagcggcaggcgaagattctggatatggggaggggccgcctgaggaaggccgtagaggatgtgagggtggaaggcgtgccgggcgaggaaggtacaggggtgctgcatatggctgcctcccatggccacatggagatgtgcaagtacctggtcgaaacgcttcaggtggatgtggatgatgcggatgacaaagaaaattttaaaatagactctcttgtcagctgtttttttaacaaaaggttttggccaaatgcccaaacccataagggtggtttggcaaggcaatccacaccaggtagaacatctctacttaaggcggtacattctgggcatcggggaattgccaagtatcttcttaatcatgacgccaatccagacctagccatgtgctgtgggcttacccctctacattctgccgctggattaggtgattgtgagtccgtaaaactattgcttgcaaaaggagcttatgttgacccaatgtctacttttgggacaccacttcatcttgctgctaaagaagggcaggatggcaccatgaagatattgttggacaacaatgcagattgcaacaagatggtaaacggtataacacctctcctccttgctatgaaagctgcatcagcaaaatgtatggagctgctggttgaggctggagctgatgctacttactctgatgtcatctggaattatatgtcaactacttttatggatgatgaagatagtggttcatctgtgttctcggattctgaaccagaagagattgatgccaatcaccatattcccgtcaatgacaaacctgtgaatcgaaggaaaattgcagagtttaagtcgttagggcttgaggcagttgagaagaaggattatctttctgcagcaggattctacagtgagattccggttcctccgacgctccggtgtacttcgaaatagtcgccgaggttcctccagcagcaganaagagtttgagtatgtgtccgatggcgggttctccgaggagtaggcttcgtccgtgccgtcgaggatgcctgtggagtggtgttcccgctgccgttcaagtcaaggcttagctccagttatcttttgttttccgctgcatttctgtaagnttttataatgtttgtaagacgtggatctgtatgtcaacattgtcgtttgtgtaccccggctggtcctggacgggggttttaatacacattctgcttggaattctattcgggaatttctgggcgtgacaagggagctcttgagaagttaaaaatcgtatgaagggctctcgccagtcggcttcaaccatagctacgtcatgagtgtccgcatcttgagtagtatctctatgaggtacggtcggtgtataaaggtgttcgacgaaaacatctgagggcgccgtctcgcgcttggatccaaaattggcaagtctgtcggcggcttcattgttgtgtcgaagaacgtgactgagctcgagtccctcgaacttgtcttccaatttgcgcacctcttgtcgatatgccatcatattgtcgtcaatgcaggaccactctttcataacttggttgacaaccaactgtgaatcgcctcgaacaatcagacgctttatccctagggaaattgcaatccgtagtccatgaaggagggcctcatactcggcgacgttgtgggacgccgaaaaatgtatccaaagcacatagctcaatctttctccagttggggaaatcaaaaccactcctgctccagtgcccgaaagtcgtttggatccgtcaaaatgcatggtccagtgctccatgttctccgcgggggtatcctcctggcactcggtccattcggcgacaaaatcagctaacgcttgggacttgattgaaattcggggcttgaatgatatgtccaaagacatcaactccaaagcccacttagcaatacgtccgtttgcttcgcggttgtgcagtatatcaccgagtggaaatgatgtgaccaccgttaccgagtgaccttgaaagtagtgagatagcttcctggtagtaattagaataccatataacagcttctgaacctgagggtacctcgttttggagtcggctaggacctcgctgacaaaataaattggtcgctggactttttggacatggccttcttcctcgcgctcaacgaccaagactgtgctcacaacctgggaggtggctgatacatacagcaacaacggctcttgcgggtgtggtgaggctaagactggtggctcggtgaggagtttcttgaaatcttcgaaggccttctgtgcttcgggtccccactggaagttatctgttttcttcagcagcttaaagaaaggcatcccccgctcgccaagccttgaaacaaatcggctgagcgccgccatgcatccagtcggcttctgaacatctttctgggtacttggcggtttcatgttgaggatagcagtaactttctccgggttggcttggatgcccctatgagacaccataaaaccaagcagcttccctgacggtactccgaaggtgcacttttcagggtttaatttcatcctgaaagcgcggatgctcgcgaaggtttcttctagatccaaaatcaaatcatccttttgcttggtcttgacgactacatcatccacataggcttcaacgttgcggccaatttgtgttgagaagcatctctgaatcatacgttgataagttgctcctgcattttttagtccaaacggcatggtgacgtagcagtatgcaccaaaaggcgtgatgaatgaagtcttcaagcagtcggattccttcagtcggatctgatgataccccgagtagcaatccaaaaaactgagaagctcacagccggcggtcgagtcgactacctggtcaatgcgaggcaacccaaaaggatctttagggcaggatttgttgaggtcagtataatcaacgcacatgcgccattgccctgttttcttccgaactagaaccgggtttgccagccagtcgggatgaaggacttctttgatgaagcctgctgctaacagcttggttaattcctccttgatcgcgtctttcctgtcttgtgcaaatcggcggagtcgttgtttgataggtttggcatcttctttgacatgtaaggagtgctcaatcacctctctaggaataccgggcatatcagatggtttccacgcaaagatatctttattgttctctcgggcagacgccatctcgtgagtttgggccatgtcgcaactctccttgtcgcatgtgacggcttgcttgatgtcgctccgtagggataggactcctcggggaccaggcatcttcatcatcatgtaagtgtagtgcgggacggccatgaacttggctaacgccgggcgtccgagtatggcatggtatgctgtctcgaaatcggcgacttcaaagctgatgttctctgtgcggaagttttcccgagtgccaaaagtgactgggagggtgatctggccgagtggagttgcggataatcctggaattactccgtggaaaggcgcattgcttggttttagctcggagcgaggaatctgcatatcatccaaggtcttggcgaagaggatattgagtgcactgccaccgtcaatgagggttctgcgaagcttgacattacggaccactgggtctagtaccagggggtaccgccccgggtggaccactcggtcaggatgatccgagcggtcaaacttgattgcaatctctgaccaacgaagatactggggcgtgtcgggctgaacagcattgatctcccgttcagtcaacttctgcttccgtttagactcataagccagggggccgccgaagatatggttgagctccttgcggtgatcttgaaaacctgccggggtgtcgccgtcgtccttcttccttgacgtgctttgttcttcgtcagagttctttcgtgcagtcttggtgtattgatccgcaaattgcttgtagacgaaacaatctttggccacgtggttggagttaggatggtgcgggcattgggagttcatgatcttgtcgaacgtgttgacgcgcgaacgctgtcgagaagagtgactggcggttgcaacaagttccgcaggcttacgcttgcggtccttatgattgttacttccacctcctcccgtagccggcgtacccttgttttgcttccaactgggacccgactgctttgatgcggtgacggcgtcttcggctttggcgtactcgttggctttttcaaacataagcttgactgtcctggggggcttacgcccgaacttgccgaccaattcttcgtggcgaatccctttggtgaatgcggcgatgatgacgtcatcggtgatgtcggagatcttgttacgttgttcagaaaatcgccggatgtaatctcgaagggattctccggacttctgaatgacgttgtagaggtcgtattgtgtgccgggacgctcgaaggtgccttggaagttggcgatgaagtggtcgcttaattcagcccaagatccaattgtaccacggggcaatccatggagccaagatcgggcggaatctgctaaagccactggtaaatagttcgccatggccttgttgtctcctcctgcgtcgtacttctctattccagtcggcttgaagccggctggccaatccactcgacgcagatcgtcggtgaaggctgctactccgtcaaggtcgtcgtcgtggcggttcggcgaatgatgatggcctcgagctgctcggcgctgtatgattgtgtcgcgaagatcgacggggcggcgacgaggtggtgagcgaggccgttccactcggcgctccctatattggtcgggaggtgagtgaatggaccgctcgtcgtgacccctgctcctgcgattagatcctgcgccggtgatgctgaggcttggatgacggtagtcatgagatcggaagtgagggactcggctaccagtcggcgtgtggacgctttcggagttaactgggactgaagccgcaatcatggtcttcgtctggttcaagatgttgacgacgtggtcggattgattgagctcgttttggttgaggagggtgtcgagaagggtgatcgcggcaaccgcattctgttgaggggtgcggaaaaccggcgtcccttcaacatcttgctggccgatgagatcacgcgcccggcgccctgcttccaaagctcgctgccgtcgatcttcagcctccttcgcggtccgctcacgctcctgctgctcacgccgtaatcgttcttgttcttgtgcttgatgctcctcttccagtcggcggcgctcagtctcgcgacgcgcttcggtctcccgggcttggcgttgctcctccgtctcgttattggccatgaagacgccaaagtagagaggggtgtagttgtcatctaggcttccgtcgaagtcgtcgagatccggatcgtggtagcgagagctaaactcgtcgtactccacgatgttggtggggcgcgagtcgacggtgggagagctgtagtcgccatctagctgatccgtcgaaaccgtgccgagtggttggaggatgacgccaacttccctgaagctaggcgaaatcagtgttgaagccgacttccgcctaggcctacgggaagaagacgctgtcgcgatggagacggccaccaaatcgtcggggagcttcatcaggactggtgggtaagccccatcatcttgatctggtgtcgttggagaagatgcgatctcggccgagtggtttgaagccgactcggttgagatggttttgaagtagctttcagccgcgttcgggaatccaaacgggactgaaagccggttctctcccgactggtttgattccgagtcaaggagagagatcttgccgaagttgttggtgacgaagtcgaggctgccgaaccgaaacgtctgcccgggtgggaagacgaggtcgtcgatgccggagacggaacccat

SEQ ID NO: 20857 - DNA, 1743 bp, Oryza sativa
  Clone ID: TF_OsC359_7958
tcaggcgttccagagcggcgagtgcgtcctgagccgtggcgagccggtcagctagatcggtgtcactgcgctgctcgcgcgacgccagcgccttctccctaacctccagctcggacgcccgcgctgccatcgctgcgcgctcggcccgggcgccttccaggtggcgagcctcgcggccgtatttccctgagcctagtaaggtggggtagtaagggaaactaataatgatgataaacaatgatatgcaattgcaagtgggcagataaaggaacaaatacccttggcttcaaaccaaaattttccacgtgagaaataattccatcgatactccaatctgacagtgttgaaattggtgaggttaaaggaaacaacatttcaacaatgtcccttctgccatgattagcggcaacttcaattggagtcgtattgaactgttcatctggaatgtttggattagcaccagcatctagtaagcacttcatgatgacagaagagccatgatttgctgcaaccattacacaagtaacgccattggagtctctaaaattcatgtcagcaccaactttgattaatagcttcacgcattccaatgatccagaaactatggacataatcaacggggtaccatcaagattgaaaaccctgttaggatcagcatgatgctccaataagatcttcatcgtgctatgttggccactaatcgcagctgccagcaatggggtcccagcgatagaatataaatccacatcaactccttttgaaagaaacaactctactatttcgcagtgtcctttcactgcagcaccatgaagaggtaacactattttatcaatcgcaggattggaaccatgatcgagaagatatcttgtagcagcagctctcccatgaattgaagacaggaacagtggtgtttgacctgccaagaaaaacatgactggttgacgccgaggcagaggtcctccacgaggtacctgaggacgtccacgctccctccagaggccgccatgtgcagagcgcggtgcccgaagccgctgccctccaccgccgccacgacagccgcctcgccctgcccggtgtccagccctcgcgccatctcccctcccaccacccaatcccccacccaatccctttccttctccggatccgcagtagacgagaaaaatggcgccccccaatcgccccgtcgttgtgcccctcctctctctctctctctctcgcacacccccaccccgccgccgcctccgcctccgtacccctacgccgtgccatcgcgcctccaccactcgtcgcgccctccacacgccgccgcatcagcgcacgcgtcttccccctctctcggtcgctccctccgcatctcccctcctcaacccctcgatccacgtcgccgcagccccctccctcggtcgctccctccgctttcctcccccgcatcgctcgcgctcgctatccaaccgccgacgccactcctcccacctcttcgccgcgccccgccacgcctccaccgccggcgcccccatcgccacgctgcgctactccgcggtgctcgggattgaggccgccgtgctcgttggcacagctcgggactccacctcctccgcccttcgtgccgctcgggaggagttgcgacggggtcgagcccctcatcgccgactacccttctccgctcgcagccaccgtcgtagcgtttaagtctctgcatatgctgaatctgaaagtaccagcctgctcttttctgctcgttgg

SEQ ID NO: 20858 - DNA, 3150 bp, Oryza sativa
  Clone ID: TF_OsC134_92
tgaacatggatggtacatgatggtcacctgtagcaaagagaaggccattccttgacggtaatagcctttcgcccagtccggttgcatcttgctgcagatctgagcatctgagagtgcctcatcgcctatgccaaggtttaaccagcaagcactcctgtttgaatataactttgcgtcggtgttgtcgaacttcattgcaaagcagtattttgcaccttttgaactgaaaaaacatttgcaaccaaacatgagcatgaaaaatcgggaatgagcaaaagttgttaccatgctgtatagcagtattgcagcatcgtagtcctcgttgttgaaagaggagttgccttgtagtttgagttcatccttccttttacatgatgcatttcttgcccattccttgtaagcaggatattttacatatctgatgatcccaccaacactccaatctagaagagtaggtacttggtgggtcaatggcaatagaacctcaatgacttcccgttcggcatggattgcagcaatttctattggtaacctatcaagttcgtctggaatgtttggatctgccccagattccaccaagcacttgatgaatccaatggacccggtacgactacatgctgaatgagcaacttcatgcattccaatgatccccccaaaagtgaagaaaccaacggtgtgaagacgatattggcaatcttgttgggcgcgtccgcgtacatcagcgccgtggttcagcaagacgctgacgacggcggcgtgcccccgtgcagcggcgacatgcagcgccgtgccgcgggggttcgccgcgcccacgtcggctcccctgagcagcagcagcttcgccagctcgcgatccccgttgtaggcggcccagtggagcggggtgtcgccgccgttggggtccggcgtggacgggtcggcgccgcggtccaggaggtaggccgccgttgaggtgtgcccgaacgtggccgccagcagcagcggcgtctcacctgcgtgcgccgcggcgtcgaacacgaagcacgaaatcaggcgctccgcgagcatagacgagacgtgcgaggaacgagcggcggccgccggccgggaggggggcgcacctgaggcggagagcgcgtcgacggggaggccgaggcgctcgagcaggaagcggcagacgtgcgtgcggccgttggccgcggccaggtgcagcgccccgcggccgcaccgcgatcggactccgccggcaccctcgccgccgccaggcgccgccgcgtccacctccgccgccatcctagcgaggtggtggaggtcgccgaggacggcggcgcggaggagcgcgccggcgcagcggtagtagtaacattgccgccgcctctcttcctcccgcgcttcgccgccgacggcgacgccgacgcctggtgcgccggcggccggcgccggaggaggaggagtcgccgccgacgaggacgggcagagcacgttcatctccgacgaactgcttccattggtgacattctcacccgatacgaacgagtacacgacaatgcaattatgcaaaccgttctctctggtccgacagcccatgcccaagccagcacggcgccgagccgccgactcgctgacgacgcgccgtggggcgccgggcagattggcagccggcatggccatgggcgacatggcttgcttgctaggcgcctggagagcgagacaggaggcggcggcggcgttgtgatgtcgccgccgtacgtcggggtcaggcgtggacgggccggcggcgcgctccaggaggtaggtaggccggccgccgcgtctcgcggtgtggccgaacgtggccaccaggagcagcggcgtctcacctgcttgcgcgcgcgcggtgtcgacgtcgaggacggcagcgcagcggtagtagactagtagtggtacgctgccgcctctcttcctcccgcggatcgacggcgacgcgtcaggctcctgaccagctatccccgaggcttgtaaaagaatttgaatgtagtggtcacgctcaatccgcatcattgtcctttgaattacttctacaaatagcattgcaaaatcaggtaagagacctcgaaccataattgttactatgacaagaagtacgatctccacaacattgaggacaaaccctactccagaagtgatcagagaagtagtgtgctcaggatgatcatgaaaagttatgatgaaagtcaccaagttcgttatacaacttagaataaggtcaaatccagtagcaactttctgagatcttttgggaacactcccctctttagtggctcttttacaagcacagatacacatcaagtaagtgaatgtcgacatgcaaagtaatgcatgcatcaggataagagcaaggttaagatcctttttgctggccattattgaatacgtcaaccaaattatgctgttaattgatccagccaacatggcgggggcaccatacacttctattgtcctctcaaaatttcctgtgtagacttggtagaaatatggtactatagataaagccacagggaccaccgtgccaatagatgatgcgagcttgacaatggttggccagtggccaccgcctgacgcctccacactgctgcggtcaccattctcctctcggaggccggcttccccaaccccgccgtgccgcgctactaggtcttcggtggcgacgccggtgaaggaccgggaggtggcgccgtggagatgtgccgatgaggtagcggaagcccgtcgcagagcgtaggcgacctgcggctgctgcttgcgtgggggaagttgtgcagcgcgggcgcggtcgccataggcgtcggggaaggagctcccgggggcggcagatgcgggcgcggcatcggcgtggagggcggcggcgagaagcgccacggcgagaagcgccatggccagaagaaggccgtgagcttggtggagaagccgtagcccatcgcgcttgcgttgcgcctcccaccgtacgatggcctgcccgtcggcgtacgcgtcgtggtgaccacgccacgcgcggtcttcatcagcgccaagcggatggcggcggcgcggcatgtgcgggaaggtgcccgaccgcgtgttgaactcgacgcgccgtgtggcggccggaagccggcaccagtggaccgggaggaagagagtcggcgacaccat

SEQ ID NO: 20859 - DNA, 1088 bp, Oryza sativa
  Clone ID: TF_OsC22948_1
gtccggattcccgggtcgaccacgcgtccggccgcctccgctgcgtctggcacgagcgtccccgagcaagcccagcttcagctctatgggctctacaagatcgccaccgaggggccctgcaccgcgccgcagccgtccgccctcaagctcaaggcccgcgccaagtggaatgcttggcataaattgggtgctatgccgacagaagaagctatgcagaagtacatcacagttgtggatgagctattccctaactggagcatgggttcgagcacgaaaaggaaagatgaagataccacagtatctgcttcaagttcgaagggaccaatgggacctgtatttagcagtttaatgtatgaggaggaagatcagggaaatgactctgaacttggcgatatccatgtttcagcaagggaaggagcaattgatgacatagcgaagcatctggctgctggtgtagaagtcaacatgagagatagtgaaggcagaactccactgcattgggctgtcgaccgtggccatctaaattctgttgagattcttgtcaatgcaaatgctgacgtgaatgctcaggacaatgaaggacaaacagcgcttcactatgctgtcctctgtgagcgagaagatattgctgagttgcttgtcaagcatcatgctgatgttcaaatcaaggatgaggatgggaacacggtgcgggagttatgcccttcaagctggtcttttatgaacctggcaaactgacgacacgatgccctctgcactcttttggttgcctaccagcaagaaaccgcactgtctatgttagccaaactagatgagttgttttacgaacctcatcgaataggtcactgtcaaaaggatatttctgtattagtgaaaggagattatcttgtactgcctatacagtttacactgctagtttgtttgtgctgaacatcaatgttggccaggtctgtaaatcatgggcacctaatttctgaatgagcatgatcggacttctcttcttttgaaaaaaaaaaaaaaaaaaacttaatgagcctcgtcaggcatttgcacccccactgttcctactatgtaaaaaaaaaaaaaaa

SEQ ID NO: 20860 - DNA, 612 bp, Oryza sativa; identical to SEQ ID NO: 11055
  Clone ID: TF_OsC35544_4

SEQ ID NO: 20861 - DNA, 5326 bp, Oryza sativa
  Clone ID: TF_OsC9301_1
ccaccgtcgggtgccactccgtctccgcgctgcggaagaacttccccatcctctcgctgctgtcgtcgtccccgtcgtcgccctcgttcctccactccgactccggcggctcttcctccgacggctccgacgacgacgacgacgacttcttcggccggcccagccgccgatcctccgccgcgggggcgggggcgggggcggcggcgccgtcgctgcagcccgcgggctgcgcctcgttcgacctcgcctcgcatccggacctcaagctcgcccgccgcatcgggagcgggccgccgggccccgcggggcaggaggtgtggtccggcacgctgtctcgtggtggtgggggaggtggggccaagaggtgtaagcatccggtggcggtgaagagggtgcccgtgaccgcgggggatgtgcttgagggcgttcaggaggaggtggagcggctgaggcgcgccgcgacgtggtgccggaatgttaccacgttccatggtgctgtgagggtcggcgggcacctctgcttcgtgatggatcggtacgcggggtctgtgcagacagaaatgcggcagaatggcggtcgcctaacgttggagcagatcctcagatatggagcagatattgctcgtggagtagcagaactccatgcagcaggtattgtttgtatgagtataaagccgtcaaatatccttttggatacaaatgggcatgcagttgtttccgactatggtctttcggccattcttaagaacctcactagtcgtagagtgtctgatgattccaacatggttggcttggatgctacacttcttagccccaattatacagctcctgaggcttgggtgccattgaagaagtcaatgaatctgttttgggatagtgcaaatggaatattaccagagtcagatgcatggagttttggatgtacacttgtggaaatgtgtactggtgctgttccatgggctgggctaagtgcagaggaaatttgtaagtctgttgtaaaagagaggaagccaccgcctcaatattcaagggtagtcggtgtaggacttcctggggagctctggaagatgattggtgactgtttgcagttcaaaccttcaagaagaccatctttccaggacatgctaaaaacttttctgaggcatcttctagatataccaaggagcccacctgcaagtcctgaaaatgatttcacaaatgcaagcatgcccaacggtacggatgtgccaccagcctcagttctggacatggtccaggacaatccaaatgctttgcatcatcttgtatgtgaaggagatgctgctggtgttaggaatcttcttgcagaagctgcctcagatggaaatggccgtttaattcgttcgctcttggaagcacagaatgcagatggatatactgccctacatttagcatgccgaagaggctcagcagaaattgttgaagctattgtggcttatcaagagaatgtggacttgttagataagaatgaaaatcctccaataatatttgctatggctgctggctctccacagtgtgttcgcgcacttgtaaggagatcttctgatgttaattcgaggcttagagaaggtcttggtcctactcttgctcatgtttgtgctcatcatggccaaccagagtgcatgcgggaattgctcatggctggagctgatcctaatgcaatagacggagaaggcgaatctatcctgcatattgctgtggccaagagatatactgattgtgctatcgtcttattggaaaatggtggttgcaggtctatgggcataccaaattctgtgaataaaacgccattgcatttatgtattaaaacatggaatgcggatgtggtgaaaagatgggttgaagttgcatctgaagaggagatagctgaagcaattgatgtacctagccctgttgggactgctttgtgcatggcagctgctcttaaaaaagagcacgagaaagagggtcgagagttagtacgggtattgctttctgctggtgctgatcccacagcacaagatgacccacactgtcgaactgcactgcatactgcagcaatgatcaatgatgcagaattggttaagattattttggaagctggagttgatgtaaatataagaaatgctcagaacacaacaccacttctcgttgcactgaacagaggtgcaaactcctgtgttggtttgcttttagctgctggagcaaactgcaatctacaggatgacgacggcgataacgctttccacatagctgctgatgcggctaaaatgatacgtgaaaacctctcatggattgttcaaatgttacaacagccatcgccggctgttgatgtgagaaaccacaggcaagtttatgatgtatctggtgttaagctaaacttacttcaatacaacgtgatgcaaagtaaaagaggctggacattgcgagattttctggagaggctcccacgagaatggatttctgaagaactgatggaaactttagaagaaaaaggagttcatctcaccccaaccatatatgagttcgcagattgggtgaaatttagaagaacagttactgaaccagcttttggctggcaagcccatgctaggtttcgctctgtgctgatcatgattgttttaaaagtttacactgatgtactggatgttgtcaaaaatgatggcatcctggtcgtcccaaagaaagaaaatgatgctcgctgcaaatgttgctcttctgcctactgcaaaaaggcaaactttaaaaatctgataataggagccactgttctgattttcatgtcaatgttaatgagaattccttccatcaatatactaaccgaagatttgtggagaatgtctcatggatcaaataacaaattcactcatcttagtagatttggatggcgtggtcagtcacgagatagcattgggacagttctctgtgttgatgatgatggaatcttgagggttggttttccaggagcttctaggggatggagagctgatcctgctgaaattgtaagggttgaagaatataaggttggtaactgggttcggattcgtccctcattaacggttgctgtacatggcatggaatctattactcctggaagtgttggtattgtctactcaatcaggccagacagcagtcttctattgggactttgctatttgtcaagtccatggctttgtgaaccagaggaggttgaacatgttgatcccttcaagtgtgaagctcatgtttcttcaaatttccagattggtgaccaagtatgcgtaaaaaggtctgttgcagagcctagatatgcctggggtggtgaaacccatcacagcgtgggaaaaataattgacatcgagagtgatgggctactcataattgatattcctaaccgggctgtacattggcaggcagatccatcagacatggaaaagatagaaaagtttaaggtcggtgattgggttagagtgaaggcagcagtaccatcccctaaatatggctgggaggatgtgactcgtagcagtattggggtggttcatagtctagaagaagatggagatatgggtgttgctttctgcttcagaagcaagcctttttcttgctcagttgcagatgtggagaaggcacagccttttgaggtaggagaaaaaattcatgtgttaccttcaatatctcagcctcgccttggatggtcaaatgaaactgcagcaaccatcggggctatctcaaggatagacatggatgggactctaaatgtcaaggtgtctggcagaaatagcttgtggaaggtagctccaggtgatgctgagaggctttcggcttttgaggttggagactgggtgcggttgaaatctagtattgggagcaggcctacttatgactggagtgttgggaaaataagtattgcagtagttcatagcattcaagactctggttacctggagttggctggttgtttcaggaaagggaaatggttaactcataacacagaaattgataaagtagagcctctcaagattggtcatcatgttcggttccgtgctggaattacagagcccagatggggatggagagatgcaaagcctgattccagaggcataattgctggtgtccatgctgatggagaagtaagagtagccttctttggtgtgcctgggctgtggaaaggtgatcctgcagatcttgagattgagcaagtttatgaggtgggtgaatgggttaggctgagaaataatgcagatgattggaagtcgctcaaaccaggtagcattggcgtggtacatgggattggatatgaagatgatgtctgggatggaaccattcatgtggcattttgtggtgagcaggaaaggtggatagggccttcaagccagcttgaaggagtcagcaagtttgtcgttgggcagcgcgtgcgggtcaaactctgtatccaccagccaagatttggctggtctaatcataatcattctagtatagggaccatctcatctattgatgctgatgggaagcttaggattcatacacccgctggtgcgagagcttggttgatagacccagcggaggttgaaaaggtggaggaagaggaagaagtctgtgtcggggactgggtaaaggttaaggattgtgttgcgacccccacatatcagtggggtgacgtgaaccataatagcataggggtaatccaccgggccgaggatggtgaactttgggttgccttctgtttctgtgaaagacaatggttgtgcaaaaggtgggaagtggagaaggtgaggccattccgattaggggacagagtacggatacgacctggccttgtaaccccacgttggggatggggggaggagacatatgagagtaaaggtgaggttgtaggcgttgatgcaaatgggaaactgaggatcaagttcagatggagggatgggctttggattggagatcctgccgatatcgttcttgatgatatcccatcactgacagaggcttctaatggcttttgttcatagtctcgcggtattcttttgaccccattacctgatttcttgctcccttccattgtgcagtatttcaaatttagtaaggtcccaatcatgcaatggagttgcaagttgcacataggcaccatcgcataggcatggcgggttgtatttcgtgttgataaagcagggggaaaagaacgaaatgaaggctgaaaaagaactttgaaatagacatgataaccaccacctaggttttttacatgtataattatgggcctgactccttttgtatcatattacccgtgtacaggtttggacctgaacattaatttaattgatagtgtccttggatctttaaaaaaaaaaaaaaa

SEQ ID NO: 20862 - DNA, 425 bp, Oryza sativa
  Clone ID: TF_uC-osflm202110g02b1
gttgtttttactgttgctgtccaccggtgaatatggggatcctcaaaatcatcgtggggccccggtgacttggctcctaacaggaccatgatcatgttgcgaaggttctgcttgagcatggagctgatcccaacagagtatcgaaccatgttctttgatcactcatgggagatcgctgcagccactccttgaaatgcatgaacttactgatcaaggctattgctgatgggaatgattgaagttgtactgtaccataaacgaccattttagtggtgagccatgatgatggatcagccgatgtcgtcacaatcttgctagaggtctgagctgaccctaacattcgtgacgaggatgggacgattactatcatgacggcagcaactagcggtcaactagtgcttgttgaaattgtgtttcctacgaca

SEQ ID NO: 20863 - DNA, 1080 bp, Oryza sativa
  Clone ID: TF_OsC116644_2
tcagttcgccggtgagccctccatatccaccgcctccggtcggcaatggttgccgccgtggcctctcaaacccctctgatcttcttccctaggtcgttctggagcctgtacaccccttgccgccatcgttgtcgtcctccccgtgctggtcgccgtcgtcgtcggtgaggccctcctcttttcctcctccctctccttgccgtgccgccgctcgccgtcatcgggccggcttgtcccgagctgcgctccagtacccgtggaccggtggtggaccaccacggtggtcccggtccacagtggacctggtgctatgtcaccgacggatggggaccgtgtgtcggcaccccctactctagattttgaaatttggtagcagatgccgcgtgaccatgatcttcgaagtgagcttagcagcactgcatatgcacaagttaaaacatcagtaactgccaagctgagctccttgtttcttcttgtctcatctgcaccattgacaagcaatatcattgttatatctctatttctactctgtatagctaaatgcaacggtgtccacccatcgcgaagacttcgcttctcctcctcgctagctcctcctcctccccggatgttctgccgccgcgccgccgcatcctcgctggatatcctccccgcgtggactgccgctgccggagcctctgattcttcttcttccccgccaccggagccagtgcttcttccccgcgtggactgccactgcatccccgccgccggagccggtgcttcttccccgccaccggagccgccgcggccggttccaacctcggcaccatccgccagcaccgacgacgaggtccaccgccgcgaccggagccgacctcggccccatcccccgcgcgatgactccgggatgctcctccttcccttgatccgcaactcctcactccagcgtgctccgtgcctccccgccgctgagacactccaccgcggccaccgcgccctgccctcgccggcgccgtggatctgtatgtcatgaagcctgtctccgcttccaacggcactctgccgcgcctccagtggtgccgccgttgtaagggtcat

SEQ ID NO: 20864 - DNA, 2217 bp, Oryza sativa
  Clone ID: TF_OsC3304_1
gttctcttgccatttatggataacgctttcacttttgttttctttcagagaaaaacacccagaattcatgtttcatttttacccaatatttgcaatacagaatccctaaactcaaggatctgtagcttcctcacctagcctggtgcgatgccattagaattgtagaaatatgtcttaggtctcatcaaaattccaggttattaaatcatcacagcaaagcaaaatcgtatatcagttctttcctcatcacaaatcttccagggctactgagcaacttttgtgttgcccctttgcctcgccaggcgaacacatgcttcaaatctcttgactgcctcagcacacttgagtgggtcctgtgcattgctcacgtaacactggcggcagtttgacctctcctcagtgcatggcgtggggttttggtacggcagcttgaactccttgtcacgcaggtcttttgatttcttgatgagttcatcacgcatcccagcatgctgcttatccagcttctcctgaaccttttcgctctcttccagaacggcacggatggcttccagctctgaaaaagcaggtgggggtggtggaggagcaggggttacggggagatacatgggaggctgcagtggccagccaggaggagccttgggttcagaagctgggagttcccttgagttgtcctggggctcttgttgatgttgtttgacagtcttcttaggcttgggtttcctggttttctttttgatcttctcgtcatcacgagcaagctggtcgattagcttggtgctaataagctcgccgttctctggctcaagctgcaccccctcatagaaggcattcgcggcttcttcgaacctctgcagcaggcgcagtgccgcgccttccctgtagcaagctttcgcccagtctggcctcagcgctcgacatgctcttgcatcctccagagcacgttcagcttgccctgcccgtagccagcaaaggcttctgtttgaatgcaacgtggcgtcgtttggatttaactcaatagcctgtgtgtaggcatctactgctactaggtagtctttatttctgaaggcatcatcacctctcgattttgcctccaatgatctctcttttgcctcagatgacacctcaacaagttgtggtacttgtaatctgtctgctttctgagttgtagcttcctttacctgtgccttttcctcgactgatttagtgtattctataattccatcaatactccaactcgaaacacctggaattggtgatgtcaaaggtaaaagaagttccacaacttcacggttattcctcaaagcagcaacctgtattggctttagtccatcatcatcacatgcattggggtcacttccagctttaagtaaacaatttattatttccatgtttccaccatctgcagcaatatgtaatggggttgctccaccagctctgatattcggatgtgcacctgcctgaattagaatatccaagcatgggagggaacccgctgcaacagcagacaacaaaggcgtaataccatcatcgttttcagtatttggctgccaagcaataactagcttcagtaaaaaagttaaggaaaggccacatgaacggctgattgaaaggtggttgagtgctaaacaaagagaagccttagcatcgtgttgaagcaaaagtttgactgcctcttgctgtccatgaccagcagcccatatgaggggtgtgccggcatcgctttctgattcaacatcaacccccttggagagaaatagtttcataaggtccaggttcccatcgtcgtccttggggtcgacggggagggcgaggtcggagatgaggaagtgacagacgtgggtgcggccctcgcgggcggcgaagtgcagggcggtgcgcttgttggcgtccttgacggcagcagcgacggcggcgacgcccttgccctcctcgtcgagcgccgcagcgagcttcttgagggaggcgggatcgccggccatagccgcttcgaggaaagcttgcaccttgctccgagctgagagggcggcggtggcgtcggccatggatgatggaagggagctacccgacccgagcaggggggaattgaagccggaagggtgttccagaagcttctggagacgagacgggaggtggaggtggcggcgtcgagtctcgagtaggaggaggaggaggaagcctcccgtcccgtcgccccgcctgccgccctcctgcagc

SEQ ID NO: 20865 - DNA, 1054 bp, Oryza sativa
  Clone ID: TF_OsC10700_1
gcacgaggccggcccggccgccagtggctcaaccccgccgtcactatcttcatccgccgtcccgacgccgcgagcccaaacccctaaccccggagagcctcctcgccgcagatggcagtccccggccgccgcgacgacctcgtcggcgacgacctcgtcgacgacgacgggatcggcgaggagtacatggccccctccgacgacgaggaggcgcaactgcctgacgaactcttccgcctcgccgacgccgcccagtccggcaacgtcgctgccctccgcgccgcgctcgataattattctggcaacattgatgatccaatagaagatggtgatactctgcttcacatagcatgcttatatggccatctaccttgtgttcagctactgttggaacgtcaagctagcttggaatgcaaagatgaagaaggagcaattcctcttcatgatgcttgtgctggaggctttagtgatatagtccagtacattttgaattttgctgcgaacattgatggctgcgtaacaagaatgctcaacactgttgattctgaaggcgacactccactccatcatgctgccagaggggaacatctgggtattgtggatctcttgcttaaagctggggcatgtgccaagaaggagaatacttatggccaggtccctgctgagatggctgatgaaggcactgaagtccggaaactgttaattcaagagcaagttgaggccagcacacatactagcaattaattgacgtatggcaatccttagttgaaattggtaaaatgagttactgtcaggctgaatatctgtagtcattggaactgtgtagtggtatgcgggaaacatcggcaaaccatccatcaccacccttttgttttgtattggcttgttgccatctgcctctatctttctatttcgtatgtttgggcttgcttgatgtctagcaagatttgtgaagaatcatttcatcaatagttgatagatccatgacgacaaaaaatgaaaagattggggtctgtatcctgccatgtcagggaggtagtcactgtacctccac

SEQ ID NO: 20866 - DNA, 1335 bp, Oryza sativa; identical to SEQ ID NO: 10929
  Clone ID: TF_OsC10700_2

SEQ ID NO: 20867 - DNA, 1964 bp, Oryza sativa
  Clone ID: TF_OsC566_5
agcgtgaaacttcgctgaaatggttcgattctgggccaccaaacagaacggtcaaaaggattaatttgcacagattatcaccaagctaagcgtagttggaacaaaaaccaggggattactctatgccggtccaggacccttcctcccccgtgccggcggcggcgcggccgaagcgcacgtcgtcggcgccgatccggccgtcggactacacgcacagcccggcgcaccaccgcgtcgcgctgcgggacgccgccgggctggcgggcgtcctccatgggctcccgccgctcgcccacccgagccgcatcctcaccgccgccgacgccgcccgcgaggcccgcctcgcggcgtccgtgtccggggcgctcgaccgccgcgacgtcccgggcggggacaccgcgctccacctcgccgtgaggctcaggctcccctccctcgcctccgcgctcgccgccgccggcgccgaccccacgctccagaaccacgccgggtggacgcccctccaggaggcgctctgcctgggttgcaaggacatcgccgcgtgcctcctccgcgcccaccgcctcgccgcctgggccaagctccgccgccgcgcccccgcgctgtccgcggcgctccgccgggtccaggacttctacctcgaggtggacttccacttcgagagctccgtcgtgccgctcctctcccgcgccgcgccctcggacacctaccgcatttggaagcgcggcgcggagctccgcgcggacaccacgctcgccggcttcgacggcctccgcatccgccgggccgaccactcgttcctcttcttcggcgaggaggccgacgccggcggccgccacctccccccgggctcgctcctcgtgctccaccgcggcaagcgcgaggtgcacgacgcgttcgcggcggcggcggccgccggcgacgaggattcggccacatctgacgcggccgcgtatcgaccggggctcaacatctcctccgcgaggctcgtgccgaggacgacatggctacggaaggagaagacggagagcgtcggggagtggaaggctcgggtgttcgacgtccacaacgtcgtcttctccttccgcacgctcaaggcagccaacgccggccgcaaggacttcaccttcgagctcgccggagacgacgacgacgacgacaacaacgacgacgaggaagacttcctccccctggagatccgcgacgatgacgaggacggcgacttcctggtcgccgacatccccccgcccccgtcgcgccgcagctgctacgtgcccggccggcgcagcgtggcggcgccgccgtcgcacatggcgacgccgcagaggcggcggaacagcgtggacgtgccgcggcggctcccggcgtgcgcgtccgtcggccgcggcgagggcggcgtgttcggccgccacgccaccacgacggggggagccaggtggaaggaggaggagacggtgaagacgctgcggccaaccgtctggctcaccgaggacttcccgctcaccgtcgacgagttcttgccgctgctcgacatcctggccagccgcgtccgcgccgtgcgccgcctccgcgagctgctcaccaccaagttcccgccggggacattcccggtgaaggttgccattcctgttgttccaacggtgagggtagtgatcaccttcaccaagttcgtccctctcctcgagccggaggaattcttcacgccgatgtcaagccccagcctgttggtgagcccgggtccgggatccatcatgcacaaaccagacactcagaagagctcctatttgaagtggggcttgaagaactccagatcgaagccggtgaacctgtcgcaggttgcggacaacaccgacccgttcacgatcccgagtgactacacttgggtaagcctcgggtctaagggccaagacaagaagtcatccaagactaagaaggggaagaccaaagagaccaagcttagctag

SEQ ID NO: 20868 - DNA, 1809 bp, Oryza sativa
  Clone ID: TF_OsC47742_1
gtgggcatcttatacttgtatggagtatatcagtatatgctagttgcagacgttttacagtgcaactgtaactgttgctacaatgttactgaaagagaaacagaagaaaacaaaaacaacagtctgtatattccagtttgtattgctttcaatgctgtctgatgtacaaccgcattgtgatcgacagtgaagcaacaagttgcaaaactatttccagtgaaacacaaatctatggtatataatgagttgattttctatcaatcatgcatacaatcctccacacgaaatcaacaacaggcccaactgactgttaaaaataggatctcgatgaacgtgatgaacgagtggtgctgccctcatttcgatctttcttccacatgccctcaaagctcaggaagcatttgagaggtttcaccttccaacggtttctctgagatatttcattctggatataagacaattgttcaatgatcgttctaaagtcaggcctgctagcaggattttcactccagcattgttcaatcagctctctcaatccgtaagcataatgctttggaggagctctgaaaggtggcctttctttagaattatgtgccttctcaatttcattatttttcttgtcataaaaagggagacatccttcaatcatctcttgaagtatcaaagcaaatgagaagacatccactttagtatcatattcttcatttcgcaggacttctggagctacatacctacatgcattgcctggagaagttacagctttctcttctctaacttttcttctccattttagcatcttacacagatcgaaatctgccaccttcagatgtccagtgtcatccctcaatatgtttgaaggctcaaggtcacggtggatgatagcttgaggtttatgctcatgtaaataattcatccctcttgcaatatcaagagctaatttcactgcatatgacggttccagagcccctttcctactcaagtgcttgcgcaaatcacccttgggcataaattccattacaatcatcattgggctgctttgtgttacagcacctaaaaattgcacgacattcggatgccgtattagttgtagcacatcaagctcatctctgaatgcttgtactttgttctcgtccataattagatcgtcatcaagcttcttaacagcaaccagaatgcccctccatgttgctttcctaaatgtaccctttgatataccatttccattagtgaaatctagctcgttcggggaaatctcgtactcaggaacctcacggacatttttaacatgcataggagcaatcttaagcttggagccatgcttttccaagatcttgatcacatcatggttctggtaatgcaatgcgtctgccaaaggcgtgctgccccactggtcctcggcgacggcatccgccccacgctggaggagcagctcgacgacctcggcttgcccctcgcaggcggcgatgtgcatcgccgtgcggccgtcggagtcgcggaagttggggtcggcgccggcgtcgaggagctcctggatcccctcgacgtcgccctcgtgggccatgtacatcagctggaagcccatgaccccgaccgcctcgctcgacccctcctccgagctctcccccgcaccgccgcggtcgggcgccatcgacgactgcttccccagcttaaaccgcggggtcgccgcggccgtcggcgtgcttggcttcggctccatgtggcggcgcgggcgcgggcacgggaggcggctagggttccgatggggaggacgagacgagacgagagatcggatcaatcaaagcctcgtgc

SEQ ID NO: 20869 - DNA, 3427 bp, Oryza sativa
  Clone ID: TF_OsC40453_1
atggcggagacacgcaagttcttgatgcccaaccagcccccggatatttcgcagatggtgctggaggctaggaagcgatggttgcgacccactgaaatatgcgaaatactctcaaactacaggagtttctctctctcgcctgagccaccaaacaggcccggaagtggctctctttttctatttgaccgcaaaacattaagatacttcagaaaggatgggcataactggaggaagaaaaaggatgggaagaccgttaaagaagctcacgagaaactaaaagctggcagcattgatgttctacactgctactatgctcatgtagaggataatgagaaattccatagaaggacctattggctgttggaagaggatttcgcgcacattgttcttgtaagctatcttgaagtcatgggtgtaaagcaaagttttagtcgtgctaaagaagaaattatgccgttatctggtgctgatagtccatcgtgttcaaattcgattactagtcagaaccagatgaccccacaaataatggatgcagctgaaagcccaattagtgggcagatttcagagtatgaaggtgctgaaccagcgaaattcggtgcagcagataattgcccagcaagctccagatacaaccctctcattgagatgcagcagcctctggatggaatcgtgatggataacattttatacccttcttcttcagccatctgtaaccaagtttcaggttatcatggtgaattgccaccaggaacatctaatctaaatggtcatacattttctcacagtgacatagctagaatgtttgatgattccagctctgggctaagagacatttccagaaccctgtttgattcaatgccttacgatgagcatttctcaggatatgcaaatggattcatggagccaactcttcattcttctttttccatgatagaggctaacaatctggaggatagctctcttctggagacatatacatctgaagctctttacactaacaacctcagccagaaggaagctgatgcactaagttttgctggcatatcatcgccagaggtgaatggtaataaatatactgaaggaagcaccaagcatccgctcctgaagcaattgtcattagatctatttaagattgagtcttctggtttaaagaaacatgacagcttttcaaggtggatgagtaaagaacttggagaggtggttgatttgggtatcaaatcaagttctgatgctctctggagtagcattgagattgtgaatgctgccgatggtcctagtgcaccaactaatgaacagttagatgcttatgcagtgagcccttcacttgcgcaagaccaactattcagcattcttgacatttcaccaagctgctcatatattggtttgaagacaaaggttctggtaactggtacattcctggcaagtaaagagaatgtggaaaattgcaagtggtcatgcatgtttggggatgttgaagtaccagctgaggttttagctgatggttccctacgctgctatgcaccagaacatcaatctggaagagttcccttttatgtgacatgctcaaacaggatcgcttgtagtgaagtgcgagaattcgagtaccgggattctgatgctcagtacatggagacatcacattctcaagccaatggtataaatgaaatgcatctacaaattcgtcttgagaagctactcactttggggccagatgacaatcaactgcttgtttgtggaaatgaaaaacttgagttaatcaatgctataaactccctgatgcttgatgagaaatggtcagatcagggatcaccatccggctctaaagatgttgtcaccccaaggaaccaaagtttaaagaaattgatgaaagaaaagcttcattgttggcttatctataaaatatatgattgtgagaagggcccaaatatactgggaaaggaaggacagggtataattcatttggcggctgcactgggcttcgattgggctataagaccaatactagttgctggtgtcaatgtgaactttcgggatgctcatggatggactgcacttcattgggctgcgtcttgtggaagagagcgaacagtgggcgtccttatagcaaatggagctgcagcaggtgcattgacagatcctacttctgaatttccttctggaagaactccagccgatttagcctctacgaatggacacaagggaattgccggttttctcgcggaatctgctttgacaagccatctgtcagcacttactttaaaggaatcaaaagatagcaatgcggatgaagcatgcagattaacaattcctgaagatctccctgaaatgaattatggtcagcttgctgtacaggattctcatgctgaatcattaaaggattcattaagtgctgttcgtaaatccgctcaagctgcagctaggatattccaagccttcagggtggaatcattccacagaaagaaggtcgtggaatatggagatgatgattgtggattatctgatgaacacacattttcacttatttctcttcaaaaggtcaaacaagggcaacatgatacacgtttgcattctgctgctgtacgtatccaaaataagttccgaggatggaagggaagaaaggagtttatgatcattcgccagagaattgtgaagttacaggctcatgtgcgaggacatcaagtgaggaaaaactataaaaaagtagtctggtcagtaggtattgtcgagaaagttatattgagatggaggagaaagggacgtggtttgcgtggctttcgacctgagaaacaattagaaggccagacacaaatccagcctgcaaaaacagaggatgaatacgattacttgcaggatggcagaagacaggctgaaggcagactacagagggcactggaccgggtgcgctctatgacacaatacccagaagcaagagaacagtaccgtaggcttacaacttgtgttgctgaaatgcaacagtccaggatgatgcaggacgagatgctaagtgaggcagctggtgctgacggaagtgatttcatgaatggactggaggacttgatatgcagagacgacccccaaatgtctgccatttggtgaagtcgaagttgttacatcagttaggctgatcattgccttgttcattgccatattagccttgtaaattcttccgcttgtatttcactcactgcttaatatctagctcatgctgttagtattatgtaactctgtgcactgatcataatagaatatttctctcctgtatgttacagataagttaagctgtaaattcttgtgctagatgttcagtgctcaccgttcgactctatatagcgttatacctaataccatgcgacttctattaaaaaaaaaaaaaaaaaaaaaactcgagactagttctctctctccctcgtgccgaattcctgcagcc

SEQ ID NO: 20870 - DNA, 3762 bp, Oryza sativa
  Clone ID: TF_14346031
aggacaaagaaatcaatctactactctattgtggatgaggctctgtccattggggatgctccagcccgggacagcaatgagaggagaaaggccctgctcagtgagattcagctacttaaccaatttggggcagcgttatggagagatcgcaacattgacaagagaagcctgccccctctgcttaaagctgccaaggttggagatgtaaatgtcacaaagatgctcctgatgggggatgttgatgtcaatgaagcggatcctgaagggaacactgcacttcactggtgccttagtggtagctcaagcacacaggagccaaggattgtgtggctcctgctgaagaatggtgccagagttttccaggggaacaaacttggtcttacaccagtacacagcgctgcagctaagggaaattataaagctcttcagtcacttctgcttcatgctcaagattgcgttgatacaccttccaagaccaaagaaaccccattgttcttagcagtgaagaatggttctttggactgtgtaaagcttctcctgcgttctggggctagcaccaaagtacagaacctaagaaagcaaagaccaatagacgtggcaacgtcccaagatatgcatttcattcttacctctgcaaatgtggttccatggaaccgtagctcacatccgaaaaaaattgtgacgaacaaggaaagctgcaaagagtttctggatgacaattttgttgattatgatagcgatgatttaaatgaaagctttaccgggcttaaaacatcagcaagccatcgggatttccggtctagtaatggttctgcccaagggggaaagagtaagaaccattgtgctcccaagcaaggttccaagtttgtgcctcggcctaatcattggctgaagcacgactacactcggaaaatttttgttgggggcctcccactttctgtgggcgctgagtacctcactgagttcttcactgctgaatttggacctgtggaggaagcagtagtcattgggataaggatgggtgatcgggtgcaatcccgaggatttggttttgtaaagttcaaaagagaagaggatgtgataagtgcaaaggaaactcatcatgtgtacatgcttgggaagagagtggaggtaaaggatgctgttgctagaggattcttgcctgcagaaatccagaaaactgcttcattcaggcaccacagccaggaggttccaaaggtagctcaccatatgttggatggtgagctaaaggaggagcattacattaggaagtggcggcccttgccagagaagtgtcttccatcttggttctttatattcaggaagtggttgccaggatttcttgcagatgctactgaacgacttggagataggtacccattgagctccttgaagggtgatttcagagcaatttgcagaatggagcttgatcatggcacatttggttatcctaagctcagtgatttcatgcgctcccttcctggtatctgcagaatgtgtgtagtccctgtaggaagtggtcctgcaacacacatggtcctccttccaccggtctcgcgaccgaagtatgtacccttgctagaacctttctcctttgatcatgatgagctcccagaatcagtatctgatcatcagtcccctaggtctccacttaccactaatatcaccgaggactcccttcgtaacacagacagtcagaagggtgatacttgcagtgagagcaatgtgcagagccatcagggcgatgagtgctgtgggagcaacactgaaagccagcagtatagtgcttccactgacaatggtagcttaccgagtgaagttgccttcggtaccactgatctggttgagcttgtacagacaagagagcatgatctgattgctcctgcgtcaacaagaagatttgattttcttgagcctgtgtctacaagagaacccaatgtgattgaaactgtatctcttaatcagaagattgtttctgagcctttgactgatttacttcagtctggacatacaaggagggttggtctgattgattccagatcaacatgccttggtgacttcctggttgaaagggttgcagaaattccaaccagacatatcaatgaggactcaaatgcgcagatttttgtggttggctgtcatggtcaattgacactgcatgtggaccttaagaaaaaaacaagctcgatgatacaggcatacgaagagaagactggcataaaccatgaatatcagtatttcatctatgaaaggaaggtaattgatccagacgatactttgagctgctatgggatagaaaaaggatctactattcatgcttgtagtagattacgaggtggtgctagcatgacattagggcagtatctaaatcgttataaggatgatttgcttgaagatgttatccttcctgatggaagagcttaccccgtgatgaaaccagagccaagtggagttcttagatcatggttgaagtgcttcacaacagccttctctaaaggctactgttggggagagaattttctgctcagtaattttaaagtggttaatgggaaggttgaagtaattaaagaagctaaacatcagataaggactgattttctgcaggctcatttgcgaaagatagatgagaccataagatggtatttttgtcgagatggggaacggtttcctccctatcttgacgagctttgtgacttcctaaagttgcgaagaggacttgtgctatcagaagatgccaaagagttcattgacgatcatgtctgtttcatgaattcgtacgagagaggaatgctagggattaagctgtataaaaaactcaacagtttatctccaggtcagaaactaaaattgttaagagctttagggaaaatcgcctgggatttgagcttgatggatgacgttgacaaattaccactattatgtgatataattgttcaagctaaagctgaggggaagccgtttccacgcacaatacttggtggctttcgcttgctgagagattattttgcacatatccctgaacatcaatacgacaaagcaactaaaccttggaagaggaagtttagaatttatattgggattgaactgatgattccggttcacctaaagaaactactccccagaatcatcaaatgctttcttgatgccaaaattgatatcaagcgcgagttgttatcaagtcatactatgcgttgttctatctgctattcagcagggacctcatcaactgtgcccagattttcagccactccagaaactagacagactgcagggggaataactaaatctataaatgaactagggacgtcatcaaaagcggttgcatcttcaaccaccccgcaaactggacatgcgacaaagggaacaattggaacttcaaatgaactagggacttcatcaaaagcggttggatcttcaaccaccccacaaactggacaggatacaaagagaacaactaggtcttcaaatgaactagggaccttgtcgacagcagttggattttcaaccaccccgcaaactggacagccgacaaagggaacaattagatcttcgaatgaactagaaacctcatcaaccgctcaacgaaatacatggagtacaggacaagccgctagaaatttatttgcacattcctcaggagccccatcagcggtgcaacaacaatcccaggatgactgggaaacagttcaaaaacgtaaaggctgaatggttgatcattagtattatcaaaaaaaaaaaaaaaaaaaaaaaaaaaaaaaaaaa

SEQ ID NO: 20871 - DNA, 1353 bp, Oryza sativa; identical to SEQ ID NO: 10898
  Clone ID: TF_OsC286871_1

SEQ ID NO: 20872 - DNA, 1051 bp, Oryza sativa
  unsure (1)..(1051): unsure at all n locations
  Clone ID: TF_OsC9959_2
cccgcgtccggcggaaagcttctccatcgatcgatctctcctctctctcccgcgggggctctccggcgcacggtgccctctcgtgcctcggagaccccgatccgccgccgccgccgccgccgccgtgcctgagtagtacagtcttgttgtcgaggtgaggtgagtggtgggaggagaaatggacaccgggatgagggtggcgctgcaccggcaggtgtcgtcggggtcgctgaaggagagcggggagctccggcggcagtcgtcgctggagtctccccggacggggagggcggcgacgaggttcctgttcgggaggcagtcgtcgatggacccgaaccggcggcgcgggcggagccagagccccgtcggcctcgccgaggacctgaccgtgccggacaacctcgacgccaccatgcagctgctcttcctggcctgccacgggcgacgccgccggcgtcgaggccctgctccgcggcggcgtcgacgtcaacagcatcaacctcgacggccgcaccgcgctgcacatcgcctcctgcgagggccaccccgacgtcgtccgcgtgctgctcacctggaaggccaacatcgacgcccgcgaccggtggggcagcacggctgtagctgatgccaagtgttatggccacacggaggtgtacaatcttctcaaggctcgtggtgcaaagatcccgagaaacaggaggacaccgatgatggtgtcgaatcctggggacgtaccagagtacgaattgaaccctagtgagctccaattcaagaaaggggatganggtggtcaaggggcgtgtaccaagttgccaaatggaatggaaccaaggttcatgttaagatacttgatagagaatgctactgcgatcaggaagtcataaactctttcaggcatgagctgnaccgtattggagaaggtccggcacccgaatgtggttcagttcgtcggagccgtcactcagaacatacctatgatgattatttctgaatacctcccaaatggtgaattatcaagctgtatttcgaggaaaggaaagctacatggtca

SEQ ID NO: 20873 - DNA, 1488 bp, Oryza sativa
  Clone ID: TF_OsC238283_1
atcgaggagacccacaagtcgctgtccatggactgactaaaggagcgcataaatgggcaggggttcagcggcgtaacgttcgacgtggagggacgccgggcatggtcttccgcgagttagtctagggccacgccgccgaccagcccgacacgccgcccggcgcccaccatcctggatcaccccggcccgcgctcaccttccgctggtgcgctcacctcctctccgtgcgacgtcgggggcttcgccgccaccggcgccgcgacggcgcccggcgccgtgataccggtcagctcgttcaggtacgaggtgttcctgctgctcctccacatcctgcacgccggccgcgtctcgatgttgaggctgaagggcgagccagggccgggctgcggcgaccgcggctgctcgcacaccctctgcttcgccgccttcgtctgcgccctcgacgccgtcgccgccgcgcgctccttgggcgtcgtggagctcgaccacctcacccagaagcagctggcaggcatggtggagaaggcgtcgatcgaggacgtgatgaaggtgcttatggcgtcgaggaagcaggacctgcaccagctgtggacaacgtgctcccacctcgtcgccaagtcggggctcccgccggaggtgctcgccaagcacctccccatcgacgtcgtcgccaagatcgacgagctccgcctcaagtccatgtcgcgccgctcgccgttcctctcgcaccaccaccaccacccgcacgcggccgccgccggcatcgaggcgtcgtcggcggccgagctcgacgaccaccacaagatccgccgcatgcgccgcgcgctcgactcctccgacgtcgagctcgtcaagctcatggtgatgggggaggggctcaacctcgacgacgccctcgcgctgcactacgccgtcgagaactgcagccgggaggtggtcaaggcgctgctggagctcggcgccgccgacgtcaaccacccggcgggccccgccgggaagacgccgctgcacgtcgcggcggagatggtgtgcccggacatggtggccgtgctgctcgaccaccacgccgaccccaacgtccgcaccgtcgacggcgtcacgccgctcgacatcctccgcacgctcacctccgacttccttttcaagggcgccgtgcccggcctggcgcacatcgagcccaacaagctccgcctttgcctggagctcgtgcagtcggcggccatggtgatgtcccgggaggacgcccagaccgccgcggtcaatgcggcgcccatctacggcgagtcccccggcggcggcggcggcggtggcgtgtacaatgccagtggcaccagctcgagcatggtgaacctgagcttggacaacaggatggtgtacctgaacctggggatggacgcgcagttcgggaagatgaacgacggtggcgacggcgacgacggcgggagcagagggccatcgtcgttgttctccccacatggcttcccctga

SEQ ID NO: 20874 - DNA, 2745 bp, Oryza sativa
  Clone ID: TF_OsC23574_1
atgtttttcaccaggctggatgactcgcccatgttcaggaagcagatacaatcccttgaagaaggttctgaattgctgagagagagatgtttgaggtttcataaaggttgccgcaaatacactgaaggactaggggaagcatatgatggagatattgcatttgcaagttcactggaagcatttggaggggggcataatgatccaatcagtgttgcttttggaggacccgtcatgaccaaatttacaattggcagagagtgcgatggatcagatagattggattgaaaaaataactggtgtcatcgcttctttgctgagctcccaatcgcccgaacggcgtcttctgtcaagcccaaagggtagcggccataatcgaactagccagcgaaagtagttcctttagtagctcgacagaacttgaccattccattagtgaagactagcattgctggaaaggaactctggaagcggactgcactttcaaatatcgaggccaagaaaagatttgaatttttagaggctgtcagtgggacaatggatgcacatctgcgctatttcaaacaagttcttgcttatgcacagcaatcaagggaacggtctaactatgagcaagctgctcttgtagagaggatgcaagagtttaaaaggcaaattgatcgggaaagtcgttggtcaccaaatggcataaacgattcccctaatggtgatggaatacaagcaattggtagaagttcacacaaaatgattgaggcggtgatgcaatcagcttcaaagggcaaggctcacatttcagcatggaaattcatgtcatattttaaaagtggttatactaaccaaagaagtagcgctccgtcagagcatggttctgggttgcttagcagatggttctcttctcattatcatggtggagtacacgatgagaaatctgtagcaaggcataccgtgaacttgctaacatcaaccattaaagctgatgctgaccaatcggatctgcggttctgcttcagaataatttctcccacaaaaaactacactttgcagcgtcttctgtcgagcccaaagggtagcggccataatcgaactgccagcgaaagtagttcctttagtagctcgacagaacttgaccattccattagtgaagactgcatgctggaaaggaactctggaagtgggtattttgaccactctggcagagccatccagcatcaccgaaccagcatgaaacctgacaagccaattgacttgcttaggaaagtggtcggcaataatatttgtgctgattgtggtgcagcagagcctgactgggcatccctaaaccttggaattcttctatgcatcgaatgctctggggtacacagaaatctcggtgtgcatatatctaaggtaagatcactgacacttgatgtcagggtctgggagccatctgtaatcaatctcttccagtcattaggaaacacatttgccaacactatctgggaagatatgttaccttcatcaagcagtgttgatcatggtgataattcaagggctgatggactagaaaacacatcacataacttaattttcagcaagcctaaacactcggatcatattgctgtgaaggagaaatttattcatgcaaagtatgccgagcgagattatgtgcgaaagcttaatatggatgatagcctggtagctcaacagatgtgggaaaatgttagttcaaacaacaagaagggggtttacagtctgattgtggggtcaaatgccgatgtaaatttaacttatgggcagacatcatttaattcggccctaacccttggaaaagctctacttttacaagagcagccaacttcaccatcagatggaagttccagatgttttgatcgtagttcacttgaaaggatttctcccagggactctctttctcttgccagcacaagtgcacgtatagatgaattggatgattgtgtcgagggattgtcattgcttcatctagcatgccgtgttgcagatgtgggtatggtcgaacttctcttgcaatatggtgccaacgtaaattctgcagactctagaggtcgaacgcctcttcatcacagcatcttgaaaggacgacatatgtttgcaaagttgttgctatccagggaatgtgtcaatattatcaaattaggaattgtacctggagagatgatcagtggtagttggttcctacaatgtggttcttggggcgctgattcacaagccacggaccgagatggtagaacagcattacagtatgctattgacagtggaactattgacgacgaagagattcttgttttgttagaagacccaagtagataatccattagctaccaataccccttcagttcagcagagcaaagctttgtgtgctcagttgcctccatgacagagtcaaccggcacagcaagctccaagtttgtgtcgccgatgatcacaatctgtgacgagaacagtattggtgttctggagctgcattgtgccctcctcgttttccgggtctcgtcttagcgtgacgaatgaccagaccccaatttccttctggttgcagtttgcaaagctcttttggtctttctttttcccctgtttgctgatgatgcactgtgagttttgtacattgcaattggccccaactccccaacatgaagttgctgcccttctgatgacagatgatgatgtacatatagtgatcccatgtaccactatgatttttcctgcaagcattactagtttggtgaacatgac

SEQ ID NO: 20875 - DNA, 1578 bp, Oryza sativa; identical to SEQ ID NO: 10902
  Clone ID: TF_OsC199536_1

SEQ ID NO: 20876 - DNA, 2216 bp, Oryza sativa
  Clone ID: TF_OsC506_1
ctcgcgcctccccgggcccggcgactcgtccctccacggcagcgccacccactgcgccttcgccggcggcggaggaggagggaggtgcggccatgggtcacggtgtcagctgcgcccgcaccggcgacgagcacgacttcttccgggcggcgcagctcggcgacctcgacgccctggccgccctcctcgccgccgatccttccctcgcccgccgcgccaccctctacgaccgcctctccgtcctccacatcgccgccgccaatggccgcatcgaggtgctctccatgttcttggatcgcggggcgccgccggacgcggtgaatcggcacaagcagacgccgctgatgctcgcggccatgcacggcaagatcgactgcgtgctcaagctcctccaggccgacgcaaatatcttgatgttcgactcggtgcacgcgaggacctgcctccaccacgcggcgtactacggccacgtcgactgcctgcaggccatcctcgccgccgcgcagaccacgccggtggccgactcatggggtttcgcccggttcgtcaacgtcagggacgaccacggcgccactccgctgcatctcgcggccaggcaggggcggccggggtgcgtgcaggtgttgctggagaacggcgccattgtgtcggctttgacaggatcatatggcttccctggaagcacgtcgcttcatttggctgctcgtagcgggaacttggattgcatcaggaagctgcttgcctggggagctgatcggctccaaagggattcggctgggagaattccctattctgttgcgctgaaacggaaccatggagcatgtgcagctttgctgaaccctacatcagcagagcccatggtgtggccatccccacttaagttcatcagtgagcttgaaccagaagctaaggctctcctggaagcagctctgatggaagccaacagggagagggagaagaaaatcctgaatggcacaaagtactccctgccatccccttcgcccggtgatgacagtgccgatgacgatgcatgctcagaggtgagcgacacggagctttgctgcatctgcttcgaccaggcttgcaccattgaggtgcaagactgtggacatcaaatgtgtgcaccgtgcacgctggcactgtgctgtcacaacaaacccaatccgacgaccctgacaccgccctcaccggcctgcccattctgccggggcagcatctcacggctggtggtggcccaaacaaggtctgcttgtgatcctgacaagccgtcatccctgcagctcacccggaagcggtcgcgtcgatctcacaacctcagtgagggcagcagcagcttcaaagggctaccttcggccatgggctccttctcaaagcttggccgtggctcgagccgcatggcggacagtgacagcagcaacctggacaagcctgagcacgatctatgaaagcagaacaacgcacggacaatcgccgcatcatcctcaaaacatccgttggtatcagaaacccagatgaaaatccaatggctaatttggagcaactttgatccatggaaagttaaatagatagggactaaataagtagaaccctccactccccattgtctgtgtgcccaccctatttttcggcttgccgggttaagcttagcatatgcataggagctctgaaagaccagagagagagtgagtgagtgagtgagagcaattcatcatcaatcacacagtgagtgttggtgtggttaagggatgcatgcagcagagatgtgaaacggggttcatgttcgtcacctctaaagttagcctgccatggcatgtgagctctgcgccggcctgacccctcctcctctgtgtgatgaatcatgcccccatttttggcccttgtctcgtgttataatggtgcgagttcatgtcctggtgatgctgcagccatcagcagggtggtccattggatcgccatgaattcagcagctgcggtctctgcctatgtgatgacattgtatgtaccgtactccagtgtgtaccggttctttgaactgtggtggcgtgtcactgtctctgtcagtgccactgtccatcgtcgtccggctgttacagccggattgttactgctagtaattggcttccttcgttcgttcgtgatggcatcagcatcagattgtttcttttcttcaggctgataaaatgaagactgttgttgcctgtaaaaaaaaaaaaaaa

SEQ ID NO: 20877 - DNA, 671 bp, Oryza sativa
  Clone ID: TF_OsC35544_3
ccggccggtcgtccgccgcccgaccgatgacggcaccagcggcaccagtgcgagcgctctcctggggcggccttagatgggtacctcggacgactcgaagggtgcttcctctcctcatcttcgccgtgtccatcccacccgatcgatctgtgagaagatattataaagagccttgatatggggaaaggaaaggcccgagatgcagtcttagctcgtaaaaaggatgggattgggttgctgcatgccgcagcatgccagggccatctgactgtttgcaagttcttgatggaggaattgggggggttgccatgtctacgtttggtagtatgatgtgaagtataccaatgtgctgtttatcacatatgtttaacaccgtttatggcctgtgctgagtctggtgatgttcctactgtgaagtattttcttgatcatggtggtgatgtaacaaaatcagatgataaaggatgcacacagttctccaccatgctgctggcacagatccccctcaatatccagttcattcttatatatattaccaattgtattgttgtacaaggctctataatactgcaatactattaatgggagtatgtttcaatcacagcaaaaaaaaaaaaaaaaaaaaaaaaaaagccgagaggcacccaagctctgcgctgacgcgctgcatg

SEQ ID NO: 20878 - DNA, 2059 bp, Oryza sativa
  Clone ID: TF_OsC3119_1
aaaaatcctcttcttcaggccatcaacactagtagctgcagctggatcgagcatatgctcatctcctggtggatcgatcacattggagactacagctccaatattacaagatgaacattgcttgatggtttgaaactttttgaacaaattagctagcatgcaacagtttgctgcgcgcgcaagcgaatcaatcatgcgaaagatcgaacaatccacatcaaataccactaaattgttgcccatttatcctagctatatagtagctagctacaccatttgctgctcatcttgtcaaccatgcataaccccacaaatctcaacacggctagtagaagagaaggatagggaataatattacttatgcgaagccattggggaagtacatggcgggcggcgggctccctcggccgttattgcttttcctcccctcgccggcggccacggccgccgccatttcctggccctggtacatgagcgtcgagttcatcgtcaggctcaccaagctgtcgtcggcgtcgctcctcgggaagttgccgccgtcgcttccgccggcctcggcgccgccggtgacaggcgcgccgtcgtcacgcgtggtcaccatcaccgccgactgcacgagctcgaggcagagcctgagcttgttgggctcgatgtgcgtcagccccggcacggcgcccttgaagaggaactcggaggtgaggctgcggagcacgtcgagcggcgtgacgccgtcgagcgtcctggagttcgggtcggcgtggtggtcgagcagcacggacaccatgtccggggagaccatctccgccgccaggtgcagggcggttttgcctgtcgggccggcgcgggagttgacgtcggcggcgccgagctcgagcagcgccttgacgacgtcgcggttgcagtgctgcacggcgtagtggacggcgagcgcgtcgtcgaggtccaggccctcgcccatgaccatcagtttgacgagctcgatgtcggcggcgtcgagggcgcgccgcatgcgccggatcttgttgtcgcggtccgccgcggaggacgccgggttcatggggaggtagtggtgcgtcaggaacggcgagcgcggcgcggccaccgcggcgagcggcgacttggcgcggatctcctcgatcttggcgaccacatcgatggggaggtgcttggcgaggagatcggcggagaggccggagcgcgcgacgaggtgggagcaagtcgcccacagctcctgcatctcgaacttgcgcgacgccatcagcaccttcatcacgtcgtccaccgacgcctccttcaccatgctctccagctgcttctgaaccagcagggcgagctgctcgacgccgaaggagcgcgcagcggcgagcgtgtcgagggcgaggtcgacggcggcgccgcaccgcgtgtgccagcaaccccgggcgccgcaccccgggagcggcccgctcttgggcgccgccaccgacgcctgcccgctgtacaggaactgcagcacgagcacgagcacctcgtaccggatcgagctgacggggatgacaagctccggcgtggcaggcgctcctccaccaccaccggcgccgccacgccctccaccaccagagccgccgccgcctccccccgccatcggccagtttaacggcggcggtggcggcggcggctggtgattcggatcgagcccgcagaacaacttcctgaagaacaagctccgcgccgccagcacgcagcggtgggcgtgcacgaggcggccctcgacgctgaaggcgacgtcgctgaaggcctggccattgatgagcaggttgaggtagtcaagcgacaaggatttgagcgagtcctcggagctcatgatctcatgtgcagcttatcaccaccagataaaagcgccggattggccccaacttttcaggcgcaggaaggtgaggaggagggatttggatagagattttgaggaagcaaaccaagcaagagaggtggaggggaaagggagggagcaacacaaggtagaagcaactgttgcaagaggaaaaagaaaaggttagggtgaaggagaggtgtgtgtgag

SEQ ID NO: 20879 - DNA, 2407 bp, Oryza sativa
  Clone ID: TF_OsC5805_1
atggcgtcggagatcgaggtgctcgaggacaccaccgccgccgccgccgccccggccgccaccatcggaggcggagaggtcgcgggcgcgggcgcgggggaggagggggaggcggcggcggatgcggaggcgctcaaggacgacgtgtacacgggcgcggcgtacggggacctcgagaagctgcaccgcctcgtggagcgggagggccggccggtgacggagcccgacgccctcggctaccacgcgctccagtgggccgccctcaacaaccgcgtcgccgccgcccagtacatcctcgagtatgtcctatccttttcagttgtttgctttggtgggatgacggttctcagcttgttgtctggacagcatggagcagatgtaaatgctatagaccatacagggcaaacagcactccactggagtgcggtacgtggtcatattcaagttgcagaactacttctgaaagaaggagctaaggtggatgccgctgatttatatggatatcagactacacatgttgcagcacagtatggtcaaacatcatatctttatcatattgttgcaaaatggaatgctgatcctgatgtccctgataatgatggaagaagtcctctccactgggctgcttataaaggatttgcagattctctcaaatgcttttcattaggttgcactcctttgcattgggctgctatccgcgggaatttggagtcatgcactgtgctggttcaggctggtaaaaaggaggatcttatggtgcaagacaataccggcttaactccagcccaacttgctgctgataaaaatcatcggcaagttgcctttttccttgggaatgctagaagagtacatgagagaggatgtgttatctcaggacaatatagcagtaatatgacattactatttgggttattttcatggttgggaattttccttgctactgccggattggttatgttctataagtgtagcagaaaagatcctggctacattgacaagaatacaagagatgcccaaaatcaaagagatgatgaacctttgttgaagaggggtctagacaaccctgaacttctggctggcaattggtctcagctatgtataacctgcaaaattgttaggcctgtacgctcaaaacattgctctacatgcgatcgctgtgttgagcaatttgaccatcactgcccttgggtgtctaattgcattggaaagaagaacaaatgggaattttttatgttcctgatcctagaagtttctgcaatgattattactggtgtgacggccgtcataagagtagtaggagacccagattctcctgcatcatttggtggatggcttaattattcagccactaaccatccttgggtggtgtcttttgttgtgatggatctctttcttttctttggcgttataactctaactgtagttcaagcatcacagatatccaggaatttaacaacaaatgagatggcaaatgccatgaggtatagttatctcagaggcccaggtggccgattcagaaatccatttgaccatggggtgcgtaaaaactgttctgacttcttgctgaaagggtacaatgaggatattgagagggtagaacagacattacaacctgatgaggaattgggaatgattcaaatgacaagaagtgcagtctcacagaatggcgagagcatgtcacttcatgctaatggcacagaccatggttgtgctgatccacaagggaactcaaaatcccatcgtcactcgcacggttcatcacaatgttgcagtcacagtaagagacctgacaagacccccttggggctaggattgggccttggtcgtaacaacccatctagccgctacacacgttcacttccttccattcattcggagagtagtgcttatttgcccttgtgattcttttggagaaggcgagctagatcgtatttcaacttgtaggtgtttattgcacaaccacagctttcttttggctatttcttcctgcagtatttgtcgcttggatctggtctcatcgacattgccagggtgtggtatatttggaggcccaatcaaccgactactgaaattgagaatatgaaggagatgcaagttttatgaaggcttcatgaacatccttagcctctcaggaacaccagcgaatgtctgtctaggcgtagcaatattttttgtgcaaaagtgcatctttgtacaatgtctcaacattttgtatgtacaagagggttagctgtccagatactatgatgttttcaagtacagctgtatattggaagaactgtaaatttatatagcgaaaccaaatgctggcaaatgtttgtttctctccaaaaaaacgagcccaaaacccgggggttcccctggtggacttgcattgtcagcttgatcaaaaaaaaaaaaaaaaaaa

SEQ ID NO: 20880 - DNA, 5063 bp, Oryza sativa
  unsure (1)..(5063): unsure at all n locations
  Clone ID: TF_OsC1528_2163
atggttaattaccaagtaaattttctgtgcttgtccatcagaagagctcatgatcattaataacataacaaaaatagaacacgtaaaatataagaaaaatattgtntaggtagtgctctaattacataggtgcaggggcaggtgagatatggttcgggttccagcgtgcttgataatcctccccgatccgaattggagtgattatgtaccactcccaaaccagcaaacattatataagttatatgaaagaagagaagccagttgtagatggaagcgacggccaatggatactgcctcttgacggcattagtccggtgactgcgccacacaaacctccagaatatacgcatcgtcgttacaggttcaacccatgttccgacattgacaaccaaaacgatgaggcacacgtagataaccatgaacacgatggagactgccctcgaggttctcatcgtggcgcgaaaagccgcaaagaaggccaggatcaggctgacgagcgagacccagataaagtgcaacgccgccacgaagctcttccacgagccggcggagcgcgatgccttcccgtagacgagtaggatcacggcgaccaccgatgccgctacggcgacggtgtcgaggaccatgaaccatttgaatgagaacctgcccttgaggttcgccgtgccgtcgtctccgtagctgcctggcatgttgaatccggcggcaaaggcgacggtggcgatgagcacggccaccaccgcaaggctgtcagttgtcctctctatccctttacctatgtcgcggccgctccacggctttagatggtcattcctttgtggtcggccttgtgccccaaaagcaactaatatcaccacaaagcttaccatgttgaacaaattggtcgatgtcgaagcgagatcaagcggcgagtgtccatcgtcgttcaagacatcgctttgcactttccccttatggagtaaggcattcacaatgtcaggcgagccggcaaccacggcgatgtggagcggcgtgttcccaaccccgtcctgcgcgtccagaaggccaccgacctgcttgtgtttcttgatagcgagggacacgatcgaggactgcttctccctgaccgcggtgtgcaggaaggtctctccatggccgtcacggagctcaacagcatcagggcagatcccaattagttgcttgacaacattggcatgtcccaacctagccgcgacatgaagagcggagaggccatccgagtccttcatgtacactgtgccagttggcacgatggctaggattgcatgtacgattttgcggttgccgtcggatgccgcgaaatggagtggggtgctgccattgcagtcgacctggctagccagttctggcttccattgcaataataagtgaaccatctctgccaaagacacaaatttatcaatcgagttgacaaacacattcttgttttgtgcttgagatctgctcatcactgccaagtacaacggtgacacaccggctttgtttagctcggtctgtgaattagtttgggtggaaacgatcgcactaatcctgtgcgtcgccttcgtgttaatatatatgtgatgggaacagcccccatcgtggcgatacagagttcggcgcagctgagaacaaccgaagccgagattgatgaaacgacttaacaaccgttctctgacaaagtgatagtcaacttctatgtgtttcgttctggcatgaaacactggattagctgacaaatacttagctccaagattatcacaccatattttagcagcttttggacttttaatctctaactctgcaagtaaagtctgcacccacattatttctgcagtggcattggcaatagctttgtattctgactctgtgctagatctagacacagtggcttgttttctagcattccaggagaccagatttgaacccagaaatattgcaaatcctcctgttgatcttctgtcatctaaacagcctgcccagtctgcatcagagaagccactaactaaagtagatcctgacttatgaatttcaagtcctaaccgagtgcattgctttaagtacctaagaatccttttcacagcaatccaatgtacagttgtgggagcatgcaagaattggcaaactttattaacagagaaagctatgtcaggtctagtaagagtcaaatattgcaaagcaccaacaacactgcgatagtgacttgcatcttcaggccctaacaatgagccttcatgaagagagagtttctcacttactgaaagaggtgtattagcaggtttacaatctatcatgcccactttcttcaataaatcattggcatacttgtcttgattcagtacaatgccattctgaaccttgcttacctctattccgagaaaataatgcagctcaccaagatctttgagtgcaaattccccttttagattctgaagtaaagctgcagtggccttctctgaagagctggctacaatgatatcatcaacatataccagaacaaacatagttatatcacctttattcagaaagaacagagacgtatcagcttttgatcctttaaaaccaaggtccatcaactttttacttagtctagagaaccaggctctaggtgcctgttttaacccatatagagctttatcaagtttacacacatgatgtggcttagtaggatcctcaaaacctggtggctgtagcatataaacttcttcttctaggtacccatgcagaaaggcattttgaacatctagctgtctaagactccaacctttagacactgctaaagacaatattattctgatagtggcagctttaacaacagggctaaaggtatcttcataatcaataccatacctctgtttaaatccttttgctactaaccttgccttatacctatctagggtaccatcagctttccttttaattttatacacccacttacagccaataatatttctccctctctgaggaggaacaagatgccaagttttattcttaactaaagcatcatactctgaatccattgctagtttccaatttttatcctttaaggcttctaaatcatttgtaggttcacctgaagcagtaaaccaagaatgcttatatttaatagtaccatcagtatataccttttctttgcgaactccactttgcaacctggtgcgcggtcctgccggtgcctctgaacctgtgtcagtcacatctgcatgctgtaatgtattagtctcatctgtgacagcctgtgcatgttcctgcgctggtgaggactgctcctgctcctgcaccacctgcgactcctgctcctgcaccgcctgcgacactgagtcttctgctgtctcctctgctagcgatgatgctaccccccgtggcacagaaccaggtgtgggacccggatgacggcctgatgacgtggccgcaggggagtggtggacgacacggtctggttctggaccaaaactggcatccagaggaggcgtcgccggcggatcttctgcatcagcgggatgtactgcaccatctctatgtggctcattagcacgattagataaagcagcagaaacatcagcagataatggattagtcactggatgcatgcattgttcattcccaacagaccgtatgggtcctagcagttcaggagtgagaatatcaatctcagaacgaagacgggcactagcattggcatgaagttcagtgaagggaaaaatattctcatcaaagacaacatcgcgagaaatatagatgtgtcctgcaccacttgctgtgtggatttgttcaccaccgttgtatttttccttcatagtgagcttgtccagctctcccgtgacatgatctgtagcaccagtgtcgatgtaccaatttgtgtcaactccataggagttaaccgctgcagctgcaacatgcttggcgtcaggaacgtaatcctcgtcgtacctataccaacaatctgctgccgtgtgcccccgtttgaaacacacttggcagattggtcttttatcaacgcctcctggtgtgcggcctcgaccacggccacctcctccgttgccgcgaccatggccgccgccgccgccgccgcgcgaacctccttggccaccattgctgttgccacgccccccgtggctgaagcctccacggttggcaacattgacggtgacctcctgtgcgccgcggtagatggcttggcgagcttcaaagttcaacacttgagagtacagatcactcacagagattggttcaacccgagcgcagacagccgacaccacctcgctgtagccctcgccaaggccggtgatgatatactgaatcagctcctcttcatcgatcgggcgacctccggcagtagccatctcatctcctaaggatttcatttttgcaaaatactcaggagttgacatgttacctttctttgtattggtgagagcaaaccgagtgttaatcgctcttgctcgtgtgtgggtggagtacatctgctcgatggcgctccacacttcagccgcggtgtcgcatgtagcgacctgcatcagcacctctcttgtcagcgacgagagaaggtaccccagaacttgctggtcggtggcttcccagtcttcatgggctgggttcggctccttcttggtggcgccatcttttgtgacagcgatctctgccggcggccgcttggttgcaccggtgagatgcccctgaagccgcgctcctctaactgcggcgcttacttgcaccttccagagcgcatgatttgccttcccaagcttctctgagattgggtggccttggaacggatttgtggcagccgtactggacgacgaggccatgagtattgatctcttagggaattgatcaacgctctcaacaactttcatgctaactaacacggtcgccttcgcacgtgccacgacaagagcctccacggtggcgccatgcccgtgcctcgctgccatgtgtagggccgtgtccccggccgcgttctggcatcccaggatattctcctcgcagtcctgggccagatttacaaggatcgtcacggtgccggcgtgccctgccctcgccgcgcagtgcagaggtgtgtccat

SEQ ID NO: 20881 - DNA, 1082 bp, Oryza sativa
  unsure (1)..(1082): unsure at all n locations
  Clone ID: TF_OsC35544_1
atggagaatgaatatatatacagagaagaagaagagtcaatcaaggaagacgaagagtcgtggcccttccggagaaatcagcctaacgtaattatcaataatggagccggtagtcccctgatgagttcccttatctaccgatcattgaagtgtatgaagctactcataaaggctggtgctgatgttaatggcaagggtacagttgtaacccctttgatgcttgctgcgtcgcagggaggctatactaacttcattcagtttcttctgaaggctggagcaaaccccaatattcctgatgatttgggttggttgccaatagagcatgctgcattacgtgattgcagggaagaagttgaaatgctatttccattgacttctccaattccaaatgtcccaaactggagtgttaatggaataatcgctcatgcaaaagtcaaaaatacaaagccaatggatcaacatcagaaggagagtagaaaagtcgttttgaaggcacaggcagatttggtattcaagcagaagaattacgccgctgcagcaaaaatatatgatctggcaatagctcatggaccgactgcagttttgtacgcaaacaggagcatctgtagattgctcatgggtgatggtgaaggtgctctttctgatgcttacagatgccgaatgatgcggcctaactgggcaaaagcttgctaccgtcagggtgcagctcacatgctactcaaggagtacaaacatgcgtgtgatgctctcatggatgcacaaaaattagattctgggaatgtcgagattgagagggaactaaggaaagctagggaattaatggcgaaacctccagatgagcagtgaggcagaataactgcataatcgtccatcagtaccctatagctagctgccacttcttttcttagccatgccctattttgttggatatgtgatgaaatgtaaagcatgcacttctcggaactctcacctatcggcggccagggactgtcctctggaggtctcgtactcacctctgcgatggagaaccagccataaatccttatantctatgtgaggccgctcgcancccctggcattgt

SEQ ID NO: 20882 - DNA, 970 bp, Oryza sativa
  Clone ID: TF_OsC8940_1
gccggtgctggtgctctcgatttccggcaagcggatggaccaggcggggcggaagaagtacgtcaagcaggtgaccggccggcacaacgacacggagctccacctcgccgcgcagcgcggggaccttgaagctgtgcgccagatcatcgctgaaatcaacgcgcagatgaccggcaccggggaggagttcgacagcgaggtcgcggagatccgcgccgccgtcgtgaacgagcccaacgaggtggaggagaccgcgctgctcatcgccgctgagaaggggtttctcgacatcgtcgtcgagctgctcaagcactccgacaaggagagcctcacgaggaagaacaagtccggattcgatgttctacacgttgccgcaaaagaaggccaccgagatattgtgaaggtactcctggatcatgatccatcccttgggaaaacgtttggccaatcaaatgtgacacctctgataactgctgcgattagaggccacattgaggtagtgaaccttctactagagagagtttctgggttggttgagctatcaaaggggaatggaaagaacgccttgcattttgctggccgtcaggggcatgttgaaattgttaaggctttgctggacgcagatcctcagcttgctcggaggactgataagaaaggccagactgctttgcacatggctgtgaaaggaactagtgctgcggttgttagggcactagtgaatgctgatccagctattgtcatgctgcctgacagaaatggcaacttagctttgcatgttgctaccaggaaaaaaagatcagagattgtaaatgagcttctccttcttccagacatgaatgtgaatgcacttactagggatcgcaagactgcgtttgacatagcggagggtcttccactttcggaggaatctgcagagataaaggattgtttgtctcgtgctggtgcagtcagagcaaatgatctaaaccag

SEQ ID NO: 20883 - DNA, 2566 bp, Oryza sativa
  Clone ID: TF_OsC50099_1
gcgggagcgggcggatgggaaccgcgcgtcggctccatggtccacggaatcctcgcatacctggccttgaacgccgaagcagtaccagcaagtactgcagaagaatgacttcttccaggccggccggcaacaagccgaggacaggttcaatagatctgtggttcgcgttcaagccctgttccgttcttacaaggcacaacaggagtaccggaggatgaagattgctcatgaggaggccaagattgagttcagtgaagggcagctaggagcagcatgcaggagttgaaatggtttttagggacagctagtttctctaattcttgtcttgtacattattggaaatgctagaacaacctgcagtttgccgacgctgtacattttaggaccatctgaatgatctgatacagcttttgctgaccccttatggctgatgaatttgatgttagccctgtagtaactgtggtggtttgcgtttggctggctttaagctggacataaacagcgtgtgcttcaatgtacatgtagatgcaatgcaagtacatatcatgttgtaaatgctaataagattagcaataatcagcaaagccctgagccaatgacaaggagtgtggtttttctctgttaatttgatccattacacctctcctctgacctctgcagattcaacctctgcaaatcatggcctcaatcaagtaaatgcaaatcattttggagctctgaagcatcaaggagatcagactcaatctcttttggcgtctgatgtagattctcaatcagatcaatttataagttcttcggtgaaatctccaatggatggtaacacatctattcctaatgaggtgcctgctaggcagaacagtcttttccacagagcttctgtccagtgaccaatgaaagactattagaaatcaatgagatctccccagaatgggcttactctacagagactaccaaggtcgtggtgattgggaatttctatgagcaatacaagcatttggctgggtctgctatgtttggtgtctttggtgagcaatgtgttgccggagatattgttcaaactggtgtttaccgtttcatggttggaccacatacacctggaaaagtggatttttatttgactttggatgggaaaacgccaatcagtgagatttgcagtttcacgtatcatgttatgcatggtagttccttggaggctaggctgccgccatctgaggatgattacaaaaggacaaatcttaagatgcagatgagactagctcgcttgttgtttgccacaaacaagaaaaagatagcaccaaagttgcttgtagaaggcaccaaagttgccaatctcatgtcagcattaccagagaaggaatggatggatttgtggaatattcttagtgacccagaaggcacatatgttcctgttactgaaagcttgcttgaactagtgttgcgaaataggttgcaagagtggcttgttgaaatggtaatggaaggtcataagtctactggtcgcgatgatctaggacaaggagctatccatctgtgttctttcctaggttatacttgggctattcgattgttttctttgtcggggttctccttggatttccgtgattcttctggttggactgctttacactgggctgcataccacgggagggaaaggatggttgccactcttttatctgctggagcaaatccaagtttagttacagaccctactcccgaatcccctgctggactcactgctgctgatcttgcagcaagacaaggttacgatggcttggcagcatatcttgctgagaaaggattgactgcacattttgaggccatgtcactgtccaaggatactgagcaatcaccatcaaagactaggctaacaaaactacaaagcgagaagtttgagcaccttagtgaacaagaactttgcttaaaagaatctctagcagcctatcgcaatgctgctgatgctgccagtaatatccaagctgcactcagggagagaactcttaagcttcaaacaaaagcaattcaattggctaatcctgagattgaagcatctgagatagttgctgctatgaagattcaacatgcatttcggaactacaacagaaagaaagcaatgagagctgctgcacgaatacagagtcatttccgtacatggaagatgaggaggaacttcattaacatgcgaagacaagttatcaggatacaagctgcgtaccgaggtcatcaagtgagaaggcagtaccgcaaggtaatatggtctgttggaattgttgagaaagcaattttgcgatggagaaagaagagaaaaggccttcgtgggatcgcatctggaatgccagtagttatgactgtggatgccgaagcagaaccagcaagtactgcagaagaagacttcttccaggccggccggcaacaagccgaggacaggttcaatagatctgtggttcgcgttcaagccctgttccgttcttacaaggcacaacaggagtaccggaggatgaagattgctcatgaggaggccaaggtaattttttttaaaactttctccaataattgctggcatgtgccg

SEQ ID NO: 20884 - DNA, 1848 bp, Oryza sativa; identical to SEQ ID NO: 10919
  Clone ID: TF_OsC47045_1

SEQ ID NO: 20885 - DNA, 2923 bp, Oryza sativa
  Clone ID: TF_OsC168710_1
ggtgcaacgtcttctggtagcaatgaagacctcgagcttcgagagcgctagtagcagcggcggcagcggcggtggcggtggcggcggtggcggcgagggctccggctcgttcaacctccggaacctatccaagctcatcctgccgcctctcggcgtgccggccggcggccacgcccagtccggccatgccggccccaacgacaggcgtgtcatctcgcctctcgactccagatacaggtgctgggacacgttcatggtggtgctggtggcgtactcggcgtgggtgtacccgttcgaggtggcgttcatgaacgcgtcgcccaagggcggcctcgaggtggccgacatcgtcgtcgacctcttcttcgccgtcgacatcgtcctcaccttcttcgtcgcctacatcgactccaggactcagctcctcgtccgcgacaggcggaggattgccaccagatatctgtcgacgttcttcatcatggatgtggcgtcgactatcccgttccaaggccttgcctacatcgtcaccggcgaggtcagggagagcccggcgttcagcctcctcggcatcctccggctatggcgtctcaggaaggtcaagcagttcttcacaaggctggagaaggacatcaggttcaactacttctggatccgctgcgcccggctcatcgcggtgacgctgttcctggtgcactgcgcggggtgcctgtactacctgatcgcggacaggtacccgcacagggagaagacgtggatcggcgcggtgatcccggacttccaggaggcgagcctgtggatccgctacacctcctccgtctactggtccatcaccaccatgaccaccgtcggctacggcgacatgcacgcccagaacaccgtcgagatgatcttcaacatcttctacatgctcttcaacctcggcctcaccgcctacctcatcggcaacatgaccaacctcgtcgttgagggcacccgccgtaccatggaattcaggaacagcattcgtgctgcctccaatttcgtgggccggaaccacctgccgcctaggctgaagcagcagatactggcctacatgtgcctcaagttcagggcagagagcctgaaccagcagcagctgatggatcagctccccaaatccatctgcaagggcatctgcgagtacctcttcctccccgtcgtcaaggacgtctacctcttcaagggtgtctcaagagaagtgctccttctcatggttacgaagatgaagccggagtacataccgccgaaggaggacgtgatcgtgcagaacgaggcgccggacgacgtctacatcgtggtgtccggcgaggtggaggtgatctactccgacggcgaagccgaggagcgggtggtggcgacgctggggacgaggggcgtgttcggcgaggtgagcgcgctcagcgaccgcccgcagagcttcacgctgcggacgcggacgctgtgccagctgctgcgcctgcgccaggccgcgctcaaggaggccatgcagagcaagcccgaggacagcgtcgtcatcatcaagaacttcctcaagcatcagatcgagatgcacgacatgaaggtggaggacttgctcggggaggacgccgccggcgagtacgaccacggcaacataccgtgcaatctgctgacggtggcagccaccgggaacagcagcttccttgaggatctcctgaaagttggaatggatcctgacgtcggtgactccaagggaagaactgcactgcatatagcggcatcgaaggggtacgaggactgcgtgctggttctcctcaagcaagcgtgcaacgtaaacatcaaagacgcgcagggcaacacggcgctgtggaacgccatcgccgcgaggcaccacaagatcttcaacatcctgtaccacttcgcgcgcgtctcgagcccgcaccacgccgccggcgacctcctctgcctcgccgcgcgccggggcgacctcgacacgctccgggagctcctcaagcacggcctcgccgtcgactcggaggaccgggacggcgccacggcgctccgcgtcgcgctcgccgagggccacgccgacgtcgccaggctcctcgtcctcaacggcgccagcgtcgacagggcggccagccacaacgagcagcaggcggcggcggcggtgtcggtcgacgagctgcgggagctcatgaagacgcgcgagctcgcgcacccggtcaccatcgtcgtcgactcgccgtcgccggccgccgcagccgtcatccgggaggtcggctcgtcgggggacagccggaatgggcggcgccagagcgcgagatcagacggcgcgcactggccacgggtgagcatatacaggggccatccattcgtcagaaaccgtagctcagaagccggcaagctgatcaacctgcccggcaccatggaagaattcagaatcatcatagaggagaaactgaaagtcgacgcgaggaagacgctgatcatgaacgacgaaggagcggagattgactcgatcgacgtgatccgggacaacgataagctgttcatagtgaccgaggagcatatgacagcagtagcatcgatggactcggtgtctggatcatagcatattcgagtttgctgaataaggccttgtccagcttggagggatttgagtgggaatgtttttgcatcacaataggtgtaaaactagtctccccaatctgttccttttagggattaaccgaacaaagcctaatcaagttttctattggcgacaatccaacaatgtgagaagtgccaatataattgaagtgattaatggttttgtagtgtattggattaggagatagatatgccataaacagattcacaattgctactacctccgtttcaaaattgtactccatctattttatattataaaacgttttgattttttttaaaaaaaaaaaaaaaa

SEQ ID NO: 20886 - DNA, 1014 bp, Oryza sativa
  unsure (1)..(1014): unsure at all n locations
  Clone ID: TF_OsC116644_1
atagcaaattggaggaatcatcccattaaaaacaatangaggaatggcccaggcaacanttgctaacatctaaatcttttttttttctctgattcttgtgacagagctgagtcacatttttctatttgccggaacaagtttgacaagctttgccaaatcataagacttgaaatctcttccaaaacacaagcttatatccaaggcagtccttccatccttggttcttctcgtcttatctgcaccattgacaagcaatatctttgctatatctctatttctactctgtatagctaaatgcaacggtgtccagccatcattatcagcaacattgacatcaaccctattcttaatcagtaacttcacagtttgcagggcaccaacttgaactgcataatgtaatggtgtggctccatccctatctctgacatgaggatttgcccctcttcgcaggagatggctaatgacggcctcctttttgcctatgacagccttgtgaagtggggtgaaaccatctttgtcaagtaaattgatatcgacaccactatcgagcaggctgtccatgagaggtatctgcagcgccaatgcgtaactatgaagtggatgccatttcggtgatgatattttggtgatatccggggtctcgttctgatccaggatagccatttcttcaggcgtcaagagaagctcgatttctcctcgaagctcctcttcttctcgctgctcttgccgccgcgcggcgccgagcctggagaacagcgagggggaagggaacgaggagaagctgctcctccgcccggtggcctcctgccgctcggcctcggcctctgccccatccccatcctcgtcgtcgctcccggagccgccgtcgtccggctcctcccagaacacgtcgccgtgggaagggcgcgcggcgcgcggcgccgccccggggccaaccgagagaagcggcggcggaggaggggaagggtggtgcgggggcggtgggaggcgcggagagcgcgcgcgccggggcat

SEQ ID NO: 20887 - DNA, 3414 bp, Oryza sativa
  Clone ID: TF_OsC60670_1
atgggcagtctctgtctcgagcgccggaagcaaccggacgatcccctctccatttcgcagcagctccacctgtgcctccttcctctcctcttctgcgcggcttcaaagttttcggcttttgagggagttcttgctcaatatcccgatttttctttcttttttttctctgcctctgcgagaaatcgaggttttgatatcaacgtgcttcacaaagaagcaaggagcaggtggctaaagccttctgaagtctactatatcttgcaaaatcatgagaggttcccaatcacccctgaaccgccaaagaagccacccagtggttctctattcctttataatcgccgtgtgaatcggtattttcggagggatggccatgcatggcggaggaagaaggatggaagaactgttggggaggctcatgaacgattgaaggttggaaatgttgatgctctcagttgttattatgctcatggtgagcaaaatccatgttttcagaggcgatgtttctggatgctggaaccagcatatgaacatattgtgctggtacaatatcgagaagtaggagcagctgagggtagatataattcagcatcactgttgaatgggccaacagattctctttcagtcttgagttatccaaatgctacatatggaaaccaatatcttggctccacttctggcgttagtgatggtagtgaatcactccattctaatttgagctctgtaacggaggtaagttcctattctgcaaacaaagacaatggtattctgcaaagcatacaggagctcagccagtcaactataatgggtgcaccggcgcttggccagagtagtctggagcaaagtattgaagttcgctgggtagataacagtaattcaacaaataaatctgggctcaaccgagctttgaagcaaattgttgagcagttaagcttgggggatgatgaggatgatgactacatacaccaagcacagccttttgacttcattacaaatattgaagctccagataggcagcgtgatgcaagcagaaatgtttcagaatatcaaccaccaggaagtctatacaacagtgatatgcagcagatttctgctgctaaaagatttcttttggagacagaagactctattgattcaccatcttataactatgtgcccagagaagaaggaaacaatggcactaatactctttcagttcatgactatagtcttcagagcagtctgaacccagattggaaaaaaacagcacctctaacacttcaaagcaatttgtatggctctgaaataccaagcttattgttggaccatggtcagtttgaatcattgtcctctggtgaaaatacaagattgatcttgggtcaaaacccccggtttagcatccgtgaggtctctccagaatggacatactgctatgagatcaccaaggtcatcattactggagatttcttatgtgatccatcaagctcatgttgggcagtaatgtttggtgatagtgaggtgccagctgaaattgttcaggcaggtgttcttcgctgccacacaccattacatagtagtgggaagctaacaatctgtgttacttctgggaatagagaaatttgcagtgaagtcaaagactttgagttccgtgcaaagtcaacagcttctagtttcctagacatttcaccatcatctagatctctgaaatctagcgaagagttgttacttcttgcgaaatttgtaagaatgctattgtgtgagaatggaagtcatgcaaattcaaacggtgatcctcagtctgtgcagtgtccaaaacttaagatgaatgacgagcactggcagcggttgatagatgaactcaaaggaggatgtgagaatccattaaacgtgtctgattggattatggaggagcttcttaaaagtaaattgcagcagtggttatcagttaagctacaaggatatgatggcatagcctgttctctgtccaagcatgagcagggtattatacacttgatctctgcactaggctatgagtgggctctgtcttcaattcttagtgctgatgttggtataaatttccgtgatacgaatggatggacagcacttcattgggctgcttattttggaagggaaaagatggttgctgcacttcttgctgctggggcgtctgctccagcagtcacagaccccactgcacaagatccagtgggaaaaacagcggctttcctggcttctgaacggggacacttgggccttgcagcctatctttcagaagtgtcactaactagttatcttgcgtcgctcactatacaagagagtgatacttcaaaaggatcagctgcagctgaagcagaaagagcagtagagagcatatcccagaggaatgcccagctgcatggtggtacagaagatgagctctcgttaaaggactctttggcagccgtgagaaatgcagctcaagcagcggctcgaattcagaacgctttccgtgccttctctttcaggaagagacaacaaaagactgctcgacttaaggatgagtatgggatgacccaagaagatatagatgaacttgcagctgcatcaaggtcatattaccaatctcttcttccaaatggtcagttttatgataaagcagctgtctcaattcagaagaaattcaaaggttggaaaggacgaagacattttctcaacatgcgcaggaatgcagttaaaatacagctgtattttacacaagcacaaggaccttaccttagcggcccattctttgtacaggctcatgtaagaggccatcaagtgagaaagaaatacaagactttcgtcagcactgtcagtgtgctagagaaagtgatactgaggtggcgtcggaaaggacatggtctacgtggcttccgagctgagcaaacagcaatggctgaagcagaagaggatgacgaggatgatgatgatgacgacttcaatgatgatgaagcggtcaaagtgttccgccgacagaaggttgatgaatctgtcaaggaggctatgtcaagagtactgtccatggtggactctcctgaagcaaggatgcaatatcgtcgaatgcttgaggaatttcgacaagccactgctgaatagggtgcatcagatgaagcggcatcaacactcgacaatgatttactaacaagaatcgacgacttcatgcactgaaacaatgcatcagacaaggggcgatcacggagctgtctacagttaattaggaaatagatagtctgcagctaatttatgacctgatagtgttccgtttgtacagtctttgcctgatggatctatctaatgttctgagtaaattattgttatttaggaacactttacatatgtaattcgaggggaaataatataatgttctgagtacattattgttgcttaaaaaaaaaaaaaaaaaaaagaaaaaaaaaaaaa

SEQ ID NO: 20888 - DNA, 816 bp, Oryza sativa
  unsure (1)..(816): unsure at all n locations
  Clone ID: TF_LIB4506-035-R1-K1-H9
ccacgcgtccggatggaagttccagatgttttgatcgtagttcacttgaaaggatttctcccagggactctctttctcttgccagcacaagtgcacgtatagatgaattggatgattgtgtcgagggattgtcattgcttcatctagcatgccgtgttgcagatgtgggtatggtcgaacttctcttgcaatatggtgccaacgtaaattctgcagactctagaggtcgaacgcctcttcatcacagcatcttgaaaggacgacatatgtttgcaaagttgttgctatccaggggcgctgattcacaagccacggaccgagatggtagaacagcattacagtatgctattgacagtggaactattgacgacgaagagattcttgttttgttagaagacccaagtagataatccattagctaccaataccccttcagttcagcagagcaaagctttgtgtgctcagttgcctccatgacagagtcaaccggcacagcaagctccaagtttgtgtcgccgatgatcacaatctgtgacgagaacagtattggtgttctggagctgcattgtgccctcctcgttttccgggtctcgtcttagcgtgacgaatgaccagaccccaatttccttctggttgcagtttgcaaagctcttttggtctttctttttcccctgtttgctgatgatgcactgtgagttntgtacattgcaattggccccaactccccaacatgaagntgctgcccttctgatgacagatgatgatgtacatatagtgatcccatgtaccactatgatttttcctgcaagctttact

SEQ ID NO: 20889 - DNA, 402 bp, Oryza sativa
  unsure (1)..(402): unsure at all n locations
  Clone ID: TF_jC-osflLIB3479017f08a1
gtcgtcgctgccgtcctcgcagaggacggacgaagaggagccgcagtagctgtggcaatcctcctcctgggtcgcctccatgggggcggcggagcgggctaaggcggatgcggctnctnctnanaaatnggagcctcctcgcctcgccctatcccaccaagcccacgtacgcgcacacgtacatacggcgatgcagaagtcgaagcagcctcagacagagccgtagacgaagatccagaaccggggcgtgcggaagctgccgtcgatgaggtacgccgccgagatccggaacccgactaagaagaccccgatctggctgggtaccttatactccgccgaggtggcagcccgcacctactacgactcctaccgatctctccgcgggcccacagagcggaccaa

SEQ ID NO: 20890 - DNA, 440 bp, Oryza sativa
  Clone ID: TF_uC-osflcyp004g06b1
ccgcaaggggatccgccagcgtacgtggggcaaatgggcagatcaaatccttggtcctcagcaagggtgtccgtgtttggctcgcaacatataacactgttgaggaggcagatactgcatatgacgctaaagcccgcaagaaccgtgtcatgaatgccaaggtcaactttcctgatgatccaaatgttgctcagaagctccacctgaagcagaacgctgtcatgcatgacaaactagcttcacctctgaagacctgtggcgatgatgctttctttcagctcaacagttcatacaatgatctgtctagcaatgcttgcaaaggcgcctgcaaagtcggcagagactgctgaactatgcccttagtcaaacctgttgctttcactgtgaaatttctgattaacatgctctttgattcatcagcaactcattcggttcttcag

SEQ ID NO: 20891 - DNA, 1181 bp, Oryza sativa
  Clone ID: TF_OsC172723_1
atgtctgagctggcttattcacccacacaggaggtgaaagtgaattccttgttttgcaatggcataacagaacggtcaagccgattctcaccctccatttggttagctcctgacatcacagagggctatcgcaaatgtcagcgtcaagtgttctggtattcttttctgaagctacacgtaactctagaagtatttcagcaagaagggtggaaagattcgttaccggttgattttccaaagcctagtgacaatgaaaattctgtggaagttgcacaccctaacataaagccattcagtgtgcacccgctgcccctgactaaaaattctgatgtacttctggaatcttcaaatgggtctgattctttaaaggaagagaaaaaccattactatccaggcaaggaaatcaagcgcagaaaacgacatagaagaaagcagtatgtggaccaagaaccatgcataatgagaggggtctacttcaaaaacatgaaatggcaagctgctataaaagttgacaagaaacaaatccacttaggtactgtcgggacacaggaggaagcagcccgactatatgatagggctgcttttatgtgtggaagggagccaaactttgaactttctgaggaagagaagaaagaactacagaattacacctggaaggacttcttggatatgactcgagacaccataaccagcaaaaaacaaaggaaagttggattaataaggcgcaataagacggactcgctggtaggacagagtgatggtgatactgagatgatcaatggtggcggctcatcgcactcggaagatggagatgctgagacctcagcatcttaattaagactgccaccagagttcatggacagccagattgggtctttcaacagattcgtttcaatgaagacataatttccatttaggtttttgttctctcaataattaatttcatgtgcataagggccctgatggtctgataaaggttaggctagagaaatcatgccatcccatataaagttggagatggtccattataggaacacatttctctgagcaaatgagcatcatgtatagaaacaccattcctgaactgtgtatatctttaccccaatttctctacatgtaactagattacacatttaataaagaatttatttttcctttcaaaaaaaaaaaaaaaaaaaaaa

SEQ ID NO: 20892 - DNA, 426 bp, Oryza sativa
  Clone ID: TF_uC-osflM202047f04b1
ctctctctctctctcctccaccttgtcgtagagaggaggcggccatggaagctgccgggatccatgcgcccaccaccaccacctcctccgactccggctcgtgcgtcaccaatggcacgcgagagaagcgcgagatctctaagcacaagcagctcaagcggaagaggagcacctctcctgctcctcctcccggctgcggcggcggccaaggacaggaagcggcggtggagactgacgctgacgctggcgccgccggcgaggaggagagcagcagtgtggctgccgctggcgccggcgagggcgagcgcaagaggggtgacgccggcaggcacccgtcgtaccgcggtgtgaggcggcggagctggggcaagtgggtgtcggagatccgcgagccgcgcaagaagtcgcgcatgtggctcggcacct

SEQ ID NO: 20893 - DNA, 3339 bp, Oryza sativa
  Clone ID: TF_OsC75926_1
aaccccggagggagatctatgagagaatctactgtaaaaaggcagggccataagtttacagtttacacagatctataataacagatgtgggggtaaggagaaaagagaaaggagaaaatggagcaaaaacagcagtgctcctgtagagaatggcatgtcaataaaaagaaccaaaactttacaccacttggaccaacccacttgcaagctcttccctctgcttaccagccagacacggtggcttgcaacagcagaagcgtgagcccgtctcaactctcaaccaggcatcctaaacaatatcatcaggtatatatgtagactgtagttatgtaccggcagtcttcagtagttcagttgctatgtgcctatgtatgagcagatccaattgcttccttttttttttttttttacacacaaaaatgcttaactgaaccaaacatagtactacatgggagtaatagtagtacacaaggaaggaaggaccaggcctaatacttgctgatccatccaacaacttatacaatccattatctaagataacactttatacaatcaaacaaaaactccttaagaccaagccaagaactagaagaaaatacagcaagcatcacaaactagtaagtaagctacaggaggttcttacttaaaaaccttaacaaccttcttaacctgaaaggctaatacgacttacttaaccacgcgaaatcaagatcgagcaagaagtatggatggattagtgcttactctaatatggcaactaatccaaccaagacaggggcgagaggaagagatcaacaagagatttttaagtatgaatgtcttcatacttagaactaatccaatcctcgtggtggtgttgctcctcgccgtgcggttgcaggtgcgggtggtggtggtgcttctgctgctcgcggtggtgggtcggcgcgaccatcatgccggtctggagcgcgtcgacatgggagccgacctcgatggccttcttccggatcgaggccgcggacagcgtgccgccgtcgggctcgcggggctcgcctgcgccgccaccctctgacggcgaagccagcaaggagatctcctcggggaagttgagccgcgccgaccggccgcgaaggtagaacaccgcagggtcgtcgtcgtcggagtggcggcgaggtggccagatccggcctgggcttgccggatctggcctcgggcagcgacggcggcggctcgccggcgaggtcagcggcgcccggcctcctccgcctccgctctctccctccagccatcgccgacgaagctcatcatcatcgtcgccgaccgccctctcttcgcccgcatcgccgccaccttcgtcctcccgctctccctcctcttcctcatccacatcgccatctcccacaccctcttctcccacatcgactccgccctcgactctgccgcccccggcacctccgcccagcgccgcctcgaccacccgctcgccgacgactggctcgccctccttctcttcaaggccgccgagctcctcccgcttgatctgcccagccaaacgcttcattttatcatcgtatacgtaagggatcccctcgaacatcaacttactaccattgaccggcaccggcacaaattcccgacaaggctctcccatgacattgatcgaattgtgatagtggtagtatctgatcaggctttctgtcttatgggttgtcctcccgtagacattctgtgacatgtgtacgccggcagagtatgcgtttcgggcctggatcgcatatttgcgatctcgcctaactttggtaattgaattgcggaagacaagcttctcaaaaccccattcccttgagtaatccttgcttggatcctgcacgcagagcttgctggacatgggattctgctcgatggtgaactgcgagtatcccgagagcttgccgagcacctggtcgagcgtctgcccattgggcaggtaaatgtactcatcgacgtcgaagaagaaggtccaattggcggcgtgcctgtaccggtgcaggcagtcgttcaccaccaagaactggttgtagtagtagccgtcgtactccgcctgcgcccggatgtcctgcaccgtgagccggccggcgcggacccacggatccagcaccgccttcacctccgggctgatgccgccggcgtcgtggaagacgaagtgcgacctcggcccgaagaagtgcgcgtggtaggccacccactcccgcatgcggctggcgctgaggttgccgtacagcgacgagccgcagtagaggtagtcgtacgggaacggcgggctgaagcgggactcgtcgtacgagcccggggcctcctcgagcgccacgaagcgctcgtagcggcgggaggtggtggagtagtaggcgtggacgagcagcttgccgccggcgttgtcggcgttggggttggatgggaaggtgcagttgacgacgacgacggtgtagacgcggccgtacccccagtccgggagcatcttgtacgccttggtgcggacggggcgcggcgacgggttgccggcggtggggttgggcagccactcgcatttgaagtaggggttgctgaacacatgggtgggcttggacgctaatcccacgatggcgaacgtccgcggcccgccgcggtacgcgcccatctgaacgaacagcgccgccgcgctgccgtacggccggagctcacgcttgttggggtcctccacccgcgccggcctcgccgccctagccaaccgcgcggggactgcgctagcaacggcggccggcgcggtcttggccgtgtcggcggtggagttctccgaccggatgacgcctgcgctcgcggcggcggcggcgggcgtggcgatgagggaacatggcgaggccgagacagaggcggtggagcgcgccgcggtgagcaacgagccgtacggctggagctgccacaatgcgacgaacaccgtgaggaaggcgagcgagagcacgaacgacttgatgtcgacgcacgggacgaacactccgccgccgccgccgcccgcgtctttcctcgccccgttcttcatagctacctacaccccgccgcgcgccccctcgccgccggacgccgccccgcagcagcacgacgaaccgcgtggcgaggcagatcggcgggcagagaaggccaaggtatcacgcctcaagaggggcgaggagaatgtagacgccggtgatgcgagaggcggaaggggacgggagcggaaggtgatgaggcaggctgctggtgtcgcgcgtgaactgaaccctcaatccagcgatcgccccgtcccgggtccggcggcccgggcggccacacgagacgagcctcgtgccgattcctgcagcccgggga

SEQ ID NO: 20894 - DNA, 467 bp, Oryza sativa
  Clone ID: TF_uC-osroM202039a06b1
gtttccttcgcgtgagcggcagcaagtgttcagggcgggcttcttctcgatttagctttcttggtttcttgatctgtagcttattagcggccatgtgcggcggagcaatcatctccgggttcatcccgccgtcggccgctgcggcggcgaggaggaggaggacgacgacgacgtggtcgtggtggtccccccgccggcggcggcgaggttcgtcgtccgtgccgcggccaaggcggcgcccccaactgcagatgggatgttgactacaaagcttgtccaacatgatggacctactgctagatcagcaaagcacaagaggaagaatcagtacagggggatccgccagcgtccctggggcaaatgggcagctgaaatccgagaccccacaagggtggccgtgtttggcttggaacatataacactgctgaggaggcagctagggcatatgacgctgaagcccgcaagat

SEQ ID NO: 20895 - DNA, 289 bp, Oryza sativa
  Clone ID: TF_uC-osroM202016h11a1
ggtcaccggactcgggcgttggcgagggcggaggcgccggagccgccggcgtgggcaccggccagcacttacgtggcgtgaggaagcggccgcggggccgttacgcggaggagatccgcgacccggccaagaagagccgcgtgtggctcggaactgctccacacgggcgaagaggccgcgcgctcctacgacgccgtggcgcgcgagtaccgtggtgccaaggccaagaccaacttgccctaccctaacggcgcgcccgccgtccgtgtgaacagtggcagcagtaaca

SEQ ID NO: 20896 - DNA, 978 bp, Oryza sativa
  Clone ID: TF_OsC337824_1
atggaggatgaagtcgtgggcggtggtgggggtagccatggtgtcaagctggagtggaggaggccgacggctgctataggtcgggctagcgaccgagctcttggaggtggcaacaacaggaattcttccttgtcgtgccaacaggggagtagctgggcgcaggcggcggagcggcgcccgggcgagcgcaggcggtgggggaagcagcggcacgggcagtgcccggcgagggagctgttgcctgcagccgtggccgtggagctggaggtggggccaggcgtcatggaggtggacacggtggactcggagccccggcctactcccgcgccgcatcctccctctctccgcgtgctcgctgtcaacccccgccccatatcctccctcttcgctcgtgggctcgctgctggtgccagtgttgagagggggtcgccgcccgctggatgccggatgccacggctgctgctctggaccgccgccgtcgttggggagctggcgcgagcggccctcgagcggcgagacgcggaagtcggaggacggcatcggaggaaaaagagagagatgctatgggtgttggaggacgctgggtggcggaggcgggaggcacaaacggtggggtgcgaggagcttggccgcgccctgcttgaactgcagggcgccaccgaccaggactttgacgctgtcacggtacagcccagacatggcactgccgtgcctgggccaggccgtcgggcctcgggccatatggcctcgattccacgcggcgcgtggaaccgcacacgcttttggctcggctcctttggcagaactaactatgtggcgctcgcctattaccaggccgcgtaccggttccgcggcaacacggcgtggctcaacttgcccgacaacgccgcatcccgtgggttgcttcacgcctccgtggacgccaagctctaggctgtgccagaacatcatggccgccaagaacgccaagtcctccat

SEQ ID NO: 20897 - DNA, 1117 bp, Oryza sativa
  Clone ID: TF_OsC1517_1590
attgatttggtgagtacagcatgcctaaagaaaaaggaggtgcaaacaaaaagctcaaagcggaaaagaaattggcttgataagatgcacaagtccacagagaaaggaagtaagaagggaggtaagaaaaaggaaaaaggatcaaaggaacaaggaactataaagaagggagggaaaaaaaaggaaaaagaagcaacggtacaagacagtgcagcggtgcaaaatatttatcctaatacttctttgcccatggaagaattgtctgaaccatacatggccatcaataccttctctcagatattgacggggccaattacagatgatgttttggctgatttctagtagcatggacagttgctgcaatctgaaatataacagattgtttagggggatagcttttgcttttgtcgaagtgtaaagttcagggaattgcagaattgcatttctgaatagcagagcattttgtgcatctctgaacttgcaacattcagaattaccttttattcaattccaaacaatttacaacacaatgacaatcacaagttacagtcttgctagctctagcacaaatgtcacttcacaagcaagacaaccttcctctgttactcactgaaaatttcagacatagcacacgatgaataaaacacactggaaatttcagatatatcgactccaatcactgctatcctacagacatcattttcagatatgtcgactccaatccctgctatcgtacagacatcttctagcttaattggaatcacggctgtggcaaccctccagcgggtcctatccattctgagacgaggagcaactccattctgagacgtgctacaattgctgcgccgcctgacgaggccatgctgctgcagcagaagctgtaccatggcgtgcggggcagccgcagtggggcaagtgggtggcggagatccggctgccgcagaaccgggtgcgcgtctggctcggcacctacgactcagcgacggagcagcgctcggcgaggacggcgacggagcagcgctcggcgggatggcgcggcgctgctctcggcgaggacggcgccgctctaggtgacgacggcgacgggacggtcctccatccctgcagcccggggatc

SEQ ID NO: 20898 - DNA, 1230 bp, Oryza sativa
  Clone ID: TF_OsC331943_1
cctatccctatcctagatctgaccatagggaggcggccgccggtggcggtagctcgtccacggcggcttcagcagcctccaaggtcatcgttgatgacaatgactcctactccgacccggacgccaccgactccgactccgactcggactccgccgacgccggcgaccacgatatcagcagccgaagcagcaggaccaacgccgccgccgccagcccgggcggtgggcggtggacttccgggacagccagctcaaggtccggcaatggctcggcacgttcccctccgaggaggaggccagggccgcctacgacgccttcgaggtgcaggtaccgcgcctccctgtcccgcggcggcgccggcgcctcctcccccgccgtcgccatcgcgccgtcacctgcccgcgtcaagatccaactaccggcgccgcggccgtccccgtcgtccaaggaggcgccgccgccgtcgtcgtcagcttctgccgcgacgccgccgccgctgaatccgccgccgttcgtcgtcgatacattcctgggggaggatgaccacctcgccgccgacgaggatgaccgcttcggcttcggcctcgccgatcttgggcacctcccgctgccacgccgggagccgcgccgccgcctggcagacgcacgagttgtccagcgacatgaggcgccggcagcacgccgtgtcgtgggggtcctccctgctctcgtcgtcgtcgtccacgttgcgccggtgccggtggcgccgccgccgcccacgcccctcctcgtcgccgccgcctcctccctgctcctcgccgtcggcgtcgtagtagtagtcgccgtcgtcgtcatactcgtcgccgccgccgccaccgccgccccgagactggagcccgtgcctgcggctcccgccgccgtcattgatcggtcaggattgtcccaatccaacgcccgacgacgctcccacctccctcacccccttcctctctccgccctcccagagacccggactcatcctctctctcgcgttcatccaaaaaatcatgctgccccaccctcacaccaactgcacagcgacgcctcctcgcaacccctccgcccacgcatcgcgccgccgtcgatttctgcctcgagagcatcgttgcacgccgcgtgtcaccagatcggcgtcacagtcgccgacatcgatctcgctccactatcggagtcacaaacatcggcaatcaacccgaggctcagcggagtcg

SEQ ID NO: 20899 - DNA, 1335 bp, Oryza sativa
  Clone ID: TF_OsC9802_9
caaatccgatgaggagaagtaactgaaagggagaggtggaacctgagggaaacttctctctcagcatggggtccatattcccctcctcaccgctgctcctttcttcggcatggtcggcgatgtcgtagccgccggatccggctatctctatcgagtccagtcgctttttggcgaggcgctgccgcgaccgccgccggatcggggtcgtccatcgccgtcgcgagcgccgtgtggctctcacgtcgttgggggctgccgaagccgagcggggaagcacgtgcgcgatctccggttagttgaagaggacgggggtggcgcggcccttgatggcacggcggtggcaaacgtgcagagccagatgcgcgagttcttgcgcagctctcagatctccgacacccacttgccccaactccacatgctgctgctagatccaacgggcggcgagcttcgtcggtggagagcttttgcgccgactgctcgagcatccagcaaaatgtaaggtggaggtggtccggtggttgggtcacggatcggccagggtggcgagcctgggggaattggcaggcaggcaaaggagggaaagacgggccaaacattaaaaaaaaataaaggttgcaagtggaagaaaacaaactgtagaaggcaaatccggtgacttggagctgctaaggggctgtttggtttccagggacttattccaagtccatgtcacatcggatatttggacactaatttggagtattaaacatacattaattacaaaacctattccataagcttggactaattcgcgagacgaatcttttgagtctaattatgtcatgattttgacaatgtgatgctacagtaaacttttgataattatggattaattaggcttaaaaaaatcgtctcgcggattagctctcatttatgaaattagtttttttattagtctatgtttaatactctaaattagcgttcaaacatctgatgtgacttgggctaaaaagttttagccccatctaaacaccccctaagcaaatccggcgacttttgctatctcgctgttctgattgccagcaaatttgatgatttggagctgctaagcaaatccggcgacttctgctatctcgctgttctgattgccagcaaatttgatgattgccactggttgcatgttgtttgctattgacttgatttgttgttggctgtgggatgtgaatccgatcgtcaaagcagtcggtttcggtgacagtcatagcagtcggtttcggtgaataatagcagtagtttggaaaagttttggctataggaatctttgcatgtcaatccgtgccctaccctgtttcagtg

SEQ ID NO: 20900 - DNA, 1014 bp, Oryza sativa
  Clone ID: TF_OsC778_1
ggctgcaggaattcggcacgaggctcagcatcgccggcgaagtgaaccagagagagtcatccatggaggtggaggaggcggcgtacaggacggtgtggtcggagccgccgaagaggccggcgggaaggaccaagttcagggagacgaggcacccggtgtaccgcggcgtgcggcggcgcggggggcggccgggcgcggcggggaggtgggtgtgcgaggtgcgggtgcccggggcgcgcggctccaggctgtggctcggcacgttcgccaccgccgaggcggcggcgcgcgcgcacgacgccgccgcgctggcgctccgcggcagggccgcctgcctcaacttcgccgactccgcgtggcggatgccgcccgtccccgcgtccgccgcgctcgccggcgcgaggggggtcagggacgccgtcgccgtggccgtcgaggcgttccagcgccagtcggccgcgccgtcgtctccggcggagaccttcgccaacgatggcgacgaagaagaagacaacaaggacgtgttgccggtggcggcggcggaggtgttcgacgcgggggcgttcgagctcgacgacgggttcaggttcggcgggatggacgccgggtcgtactacgcgagcttggcgcaggggctgctcgtcgagccgccggccgccggagcgtggtgggaggacggcgagctcgccggctccgacatgccgctctggagctactaatcaaaatctcgcactgaaaagtgtggacaaattttgattctccagaaattgggggaaaaaagagaacagagtattggtgaatttagaacagagtaggcaatgagactgaggatgaatggcaatttttgtaattttggaatgtgccagatttctccctccttttgtgattccatctgattttgaatgtgcagtcaatgaattcctgtaaatttacttctcctctccaaagagctattttggtcaagttcttcaatgattttatggattttggatttacgttaaaaaaaaaaaaaaa

SEQ ID NO: 20901 - DNA, 277 bp, Oryza sativa
  Clone ID: TF_uC-osrocyp021d02b1
tttcttgtgggcggacgcgtgggttgtgcaccatggccattgtcggatttgatgggcctgctgcaaagcttgccaaaagaaagagaaagaaccaatttaggggcattcgccagcgcccttggggtaagtgggctgcagaaatcagagatcctcgcatgggtgttcgcgtctggcttggctctttcaacagtgctgtagaagctgtaagagcttatgatgctgaagcactcaagatttgtggtaagaaggccaaggtgaattttacagaagcttcaac

SEQ ID NO: 20902 - DNA, 812 bp, Oryza sativa
  Clone ID: TF_OsC18518_1
gaaaagcttggtacggcctgcaaggtaccgggtcccggaaatttcccgggttcgaccccacggcacgagggcaaagccgacgcgagagcgagcggccaccgcgcgctagtagtagtagcgagccactatagatttggctcccgtataaagggtcgctgagacttgcttgtcgctggcagtggcagctgccgatccgtccgtcaaggcacagcgcaagcacaggctctcgctcgtggaggcgaatggagctggacatgggagcgggaggaggcggtggagtagtgggaggtgggcgagcggaggcgcactaccgcggggtgaggaagcggccgtggggccggtacgcggcggagatccgggacccgtggaagaagacgcgggtgtggctcggcacctacgacacgcccgtcgaggccgcgctcgcctacgaccgcgccgccgtcgcgctccgcggcgtcaaggcgcggaccaacttcggcagcggcagcagcggtggtggtggcgtcggcgggcacggccatggccacagccacgcccagctgccgcagcttcaccaccgcatgcacccgccgcggccgccgcagggccctggtcacttcggcgggctcgacatcagccacccttcgccgtggcactatgtctacttcccggcgagggtgcaggcgatggcgccggcggcggctggccatgtcgcggcgcacgtcgccgcgtcgctgccgtcgacgacgctggagctccggacggggccgagcgccggcgagctcccgttcgacctcaacgagccgccgccggcgctgctgttcggctcgtga

SEQ ID NO: 20903 - DNA, 2168 bp, Oryza sativa
  Clone ID: TF_OsC917_1
agctgctgctgctgcttcttcttcttctatctgctactagtagctcgcagaaaaatactcgcctcgatcgacaagctctcgttgttaccttaccatggacatggacacctcgcaccactatccatggctcaacttctccctcgcccaccactgtgaaatggaggaggaggagaggggcgcggcggccgagctggccgcgatagccggggcggctccgccgccgaaactggaggacttcctcggcggcggctgcaacgggggatcaagcggtggcgcttgcccgccggtccagacgacggcgccgacggccgccgagctgtacgagtcggagctcaagtttctcgccgccggcttccagctgagcggcgcggctggggcggcgccgccggtgcccgcgctgttgccggcggctgctctagagcagaccgacgagacgaagcagctggccttgccgccgcaggccgcggtggcgccgccgccggagcagaagaaggcggtggactcgttcgggcagagaacgtctatctaccgcggcgtcacacggcatcggtggaccggaaggtacgaggcgcatctgtgggataacagctgccggcgtgagggccagagccgcaagggacgccaaggtggctatgataaggaggagaaagcggcgagggcgtatgatcttgccgcgttgaagtactggggtcctagcaccacaaccaactttccggttgccgagtacgaaaaggagcttgaggagatgaagcatatgacacgccaggagtttgtagcttcacttaggaggaagagcagtggattctctcgtggtgcttctatatacaggggtgttacaagacatcaccagcatgggcgatggcaagcaaggatcggaagagtggctggcaacaaggatctctacctcggaacattcggcactgaggaggaagctgcagaagcttatggacatccgcggcgatcaagttccggtgcgcctgaatgctgtcaccaactttgagatcggccggtataacgtggagagcataatcagtagcaaccttccaatcgggagcatggccggcaaccggagcaccaaggccggcctagagctcgctccgtcgagctccgccgacgccatcgccgccaccgaagcgaaccacaccggcgtcgcgccaccgtcgacgcttgcgttcacagctcttccaatgaagtatgatcaggcagattacctgtcatacctcgcattgcagcatcaccagcaaggaaaccttcaggggctaggcttcggtctctacagctcaggtgtaaacctggatttcgcaaatgccaatggcaatggagccatgtcaaattgctacaccaatgtctcattacatgagcagcagcagcaacatcagcaccagcatcagcaggagcagcagcaagatcaacaggatgatcagtcacaaagctccaacaacagctgcggctccattccgtttgcaacacccatagctttcagtgggtcatatgaaagctccatgacagcagcaggcacctttggatactacccaaatgttgcagcctttcagacaccaatctttgggatggaatgatttggggaggtggcactttgcaggcaaaaaggatgaagagcctgatccctgatcagaggtgatgaggatcaagactgacatagttcattctcacacaacaacaacaacaacaaacataaagagcaggggaaaagagaggtaatgtagtagtagtggtatgatgataaagtatgatgcaaacatagtaggaagcagtatgcaggagagagatactgacaggtcagagacaggaggagaagactctgctaacaaaacgatgcagcgcaagcatattgttttattttactgcccttttacccttttgtagctttgttttcttgtgcttttgtcatcgctgagctttgtttgccgctcagcttcttttgagcttttctttctactgacatgattctgcaagtgccatgatagcttagcccatgtacaatggaagcagggacgtctctttgtagcttttgcttcttttcttttgttagatcgcctttggtagcggcccctgtttactcaagaagttgctctccctccacaagtatacaatgaaatgtactgcaggaactaaacaatataagtttttgtaaaaaaaaaaaaaaaaaa

SEQ ID NO: 20904 - DNA, 1140 bp, Oryza sativa; identical to SEQ ID NO: 11133
  Clone ID: TF_OsC302166_1

SEQ ID NO: 20905 - DNA, 914 bp, Oryza sativa
  Clone ID: TF_OsC319797_1
gcacgaggagtttttacaggcccctttcatccaggctctgcaagaaccacccctgttcttcgctttttttgaagaaacagggcttaatcaatcaattattttagttcagattctgcacaaaacaaaacttttttttcttttagttcttggtagcctttagtgttgttgctaatggcggccatagatttgtacaagtatcagctgagctcctcgtcctcgtcttcttcctcggatcaggagctcatgaaagcgctcgaaccttttatcaggagcgcttcacccacctccacctccacctccacctccacctccacgccattgttctactcctctagctccatctccaccaccaccaccactcccttctcctactcgtctccattgccgcaagaatcgtactacctccctgcttcttcgtcctacgccgccattgttccacctccgacgacgacgacgaacaccaccacctccttctcggagctccctcccctgcctccctcctcctcgtcgttcgcctcgccggcgaatgctgcggcggtggggctggctcaccttggcccggagcagatccagcagattcaggtgcagttcttgatgcagcagcagctgcagcagcgggggatggcggcgtcggcgtcggcgtcggcggcggcgtcgtaccttggcccgcgggcgcagcccatgaagcaggccggggcggcggcggcggcggcggccggcggcaagatgtaccgcggcgtgcggcagcggcactgggggaagtgggtggcggagatccggctgccgaagaaccggacgcggctgtggctgggcacgttcgacaccgccgaggacgcggcgctcgcctacgacaaggaggcgctccgccttcggggagactacgtgctccttacttccgcactcttcgccttggg

SEQ ID NO: 20906 - DNA, 2052 bp, Oryza sativa
  Clone ID: TF_OsC48348_2
ttacccatacccatgcccatttacccatcgggcatagcttttgaaccaataagatacccatgggtataaaatggagaacaaacccaaccctaatagggtttttacccgcgggtaaacgggcaaacgggcacaattgccatccctagtgtttgctctggaagcaacttggtagctggcaccaaactgcttccatgcccagcttggaacagctaccccctctgatggcttcctcttctgatccgatgatctggatgcatcctcattatttgggaataggggatgaggttgggcagtccagattggcggatgctcggtcagaagagggaaccgatgagggcggctagcaagttcagagggagcttcaaatgatccatggtggatttgcaggccaagggagccgctatccctcttggggctctgctgtgaggctgcaggctgagatattctcaggttcagatccacatcggctccttgagcagcagcatcagtaggcagctcaccatcatatgtgctgggctcgaagttggtgacggcttctctgccattgcatttgatcgcagccttatcataagccttcttgccaaggaattggcccatgcgagcctcccagcggccgcacttgtggagggtgacacccctgtactttgagctgccgcgggagaagccggtgctctgtcgccggagaacgtgcacgaactcctccttggacaagctcttcatctgcctcatgtcctcctcgtagtcgctcaggttgaagttgatgtcagcctctactcccctgaacttgatcgccgccctgtcgtacgcccttgcagctgcgtgagcagtgtcgaatccacctgtgattgtttgggagaagatgaaggtgtttgttagattgttcatggcgatgtcgcgttggattgagaggaggaagatgatgtgttcgatgaaattacctaggtagacttgcttgccgcaatcccagatgtgggattcccagcggccggtgcggcggtagaaggtgacgccgcggtattgcgagctgcgagagcgcggcccgcggcggcttttcttggccgcctgaggctgcggctgcggcggcggcggcggtggcgccgggggaggcgcgtgggcgaggattctgatgtctgggtgtgggcgcggtgggtcggggcggaggaagccgagctccgcccaatgctgcggcgagggagcggcggaagggaatagctcccgggtgacgagcagctgctggtgttggtggtgcggcggcggcgagggggtggcctcctcctcctcgtcgtcgtcggcgtcgttctcgcccgacgccgacgccgagctcctcaggatgctgaactcgagcaccgccgcgggaggcggcggcggcgacggcggcgtcgagctcgacccctcttccgccggcgcgatggccgcgccagacgcctccccgttgagcaccgacgactccgacgtgccggagtcgctcctcgccgccgtctcatgcttctccaccaccccttccgccacgttgttcagatccaactccattcacagaagcagggcaagccaatcgagtcgtaacaccctttccgatcgattcgaacccctttgcctggccactcaaccaaacccaaaaccaaaacaaaaaaccaaaaatctccgccgagttcacaagctagagcaaaccgcaaccaatctcaacgacggattgagcagctggctcccgctcgggctggaaattggcgcggcgtggagtctatttcaagaagaagaaccagaggaggaagaggtagaagcaggagagggccgactcgttctggcggtacatttagccgggcacctcagccacagtccttagagaacatccctaccctacccactcccccccgtcgccggagacgaatccacgacgatgcttaccaccgtacgtacgtcgccgcgctcacgaatcaacgaaaaatgaagggaacagaacaacaattcaccaccacaccacaccacggggaagaagaagaagaagaagcagaggtgggtgaggtgaggtggtggtggtggtctccggcgccggcg

SEQ ID NO: 20907 - DNA, 1429 bp, Oryza sativa
  Clone ID: TF_OsC120_1
gcccgggaacgcgctctctctctctcctccaccttgtcgtagagaggaggcggccatggaagctgccgcgatccatgcgcccaccaccaccacctcctccgactccggctcgtgcgtcaccaatggcacgcgagagaagcgcgagatctctaagcacaagcagctcaagcggaagaggagcacctctcctgctcctcctcccggctgcggcggcggccaaggacaggaagcggcggtggagactgacgctgacgctggcgccgccggccgtggtggcggcgccggcgaggaggagagcagcagctgcggtggcgctggcgccggcgagggcgagcgcaagaggggtgacgccggcaggcacccgtcgtaccgcggcgtgaggcggcggagctggggcaagtgggtgtcggagatccgcgagccgcgcaagaagtcgcgcatctggctcggcaccttcccgacggcggagatggccgcgcgcgcgcacgacgtggccgcgctcgccatcaagggccgcgccgcgcacctcaacttcccgagcctcgcccacacgctcccgcgcccggcctccacctcaccctccgacatccaggccgccgccgccctcgccgcagctgcagccgccaccgaccaatgcgagtcctcctcctctgccgtcgccgccgccaccgccaccgacgccgaggcggcggagtccacctcgtcggccgcggccagcccgtgcgccgccaccagcagcgtcgaggagaacgcgctgttcgacctgcccgaccttctcctcgacctgagcgacgggctctggtgctcacccgtctggacgacagcgccggccgatcagtacgacgccggcgacgacggcgacgacgccgcggcgccgctcctgtgggccgagcagtgctggatggacgccccagcggcgcccgtgcagcctgactaattaagccaatccacctgctccgactcgccggccggccattgcaccggttgggttggtcgcagcagtcaacctatcgacaccatgggcgtctttttcttttctctctgtttttttttcttttttggaggtgccttgcttcgtgtgcagtgaaacggcgccacgccgcgtttgcggtgggcgatcaggcgatgtgatttaattaattacggaggggaagtcgttttagcgcgaggtgaaacagcggattgcatcgatcggcggcaagaactgcctagacatttcattgatcaaattactaattactccccttcgtggttgtgtgtaaatcaattcggcaaacattttgggagagcctcgtgtaatttcgtctttttcttcttcttcttttttatttttacagtagtagcgtgcattgtaaattttagagatgtgctatatatgcctatggcctaaaaagtattcagagacgtgctatataaaaaaaaaaaaaaa

SEQ ID NO: 20908 - DNA, 1142 bp, Oryza sativa
  Clone ID: TF_OsC251239_1
gcacgagggcgcgaacacctccaaactcccgagtcccctctcctctctcgtcttcctctccacgacgacctctccgcttcaattctgcgccgccgcctcagagcgccatggacttcagcggcgacatcgatgacctgatctccctccagctcctccacgatcagctgctcggggtcgaggccgacgcgtgcctcccggtggcagttcatcacgatggcgtcgccgcgttcgccgagcatcagcagggtttccatcccgcggcgttcttgccgcagcagccgatgacgatgacaccggctgggtacgtggacatggcgaatgatcagtatttgggtgcgcatgccgccgctggcgaggcggaggcggtctaccgggcggcggcggcggagccggtgatgatacggttcggcggcgaggtgtccccggtgtcggacccccggaggccgcccctgacgatctcgctgcctccgacgtcgcacgcgtgggcggcggcggaggcggtgcacccggccgctctgctgcaggcgcagaccgcggccgcggccgccgacccgaacgacttccggaagtaccgcggcgtgcggcagcggccgtggggcaagttcgcggcggagatccgcgaccccaagaagcggggctcgcgcgtgtggctcggcacgtacgacacggccatcgaggcggcgcgcgcgtacgaccgcgccgccttccgcatgcgcggcgccaaggccatcctcaacttccccaacgaggtcggctcccgcggcgccgacttcctggcaccgccgccgccgcccccgccgccgacgacgtcgacccacggcaaacggaagcggcacgagacggcggcggccgacccggacgtcgaggtgatcggagaatcatccaaatccgtcaagaccgagacgtacacatcgccggcgtcgtcgtcgctggcctcaacgacaacctcaacggtgacatcatcatccacgtcgccttccccctcgtcggaggcagctgcctgcggcggcggcggcggcgagctgttcgtcccaccgatgccgtcgagctggtcgtgggatcagttggaggggttcttcggcatcctctcgccgctctcgccgcacccgcaaatgggattcccggaggtcgccgtaaactaa

SEQ ID NO: 20909 - DNA, 807 bp, Oryza sativa
  Clone ID: TF_OsC2721_1
gttcgaaattcatcgagaatgtgaactctgaacagaagaatccccacaaacgtgcagtcattttcaatgacaacggggaacatacaatctggaatgataggttatattgagcagaacataaatattgagttgctcaggtgttgtacagatctaccctactcaacctataatacatgctcaaaatctttcttgctgagacgaatttgctagtcaatcgaaaattgagctgtaatttgtagattataacgcagagatattaacaagctgcaaccagttgtatctgtatgtaccactaagctccaaatatgactgaaacaaccctaatatgcgatgcggctccaccaagtcaagttttcattctggcttagacgcaagcagcttcaagcctgccccttctatacagtgcatacccttctccatgtagttgcttcgatcaaagttggtcaccgcatttttgccacggatctcaatagcagcaatgtcgtaagcctccgctgcttcttcctcagttttgaaagttcccaggtaaatgtctcttgttccagcaaccagtcctatgcgtgcctgccacctcccatctttctgccttctagtaactcctctataaatagaagcccctcttgagaagcagctacttcttcttcttaggtatgttacgcattcctctcgagacatgtcccttatgtcctccagttccctttcgtattctgaaaccgagaaattcagctttgtattttggccccagtatttaagagctgcaacatcatatgacctggcagcttttcctcggtatcataacttcctaaa

SEQ ID NO: 20910 - DNA, 1419 bp, Oryza sativa
  Clone ID: TF_OsC156_1
actcgccgcgcaccgcgggttcccccgacgggcccaagttcacaacccaacacccaaaagcaaaagaaaagcagcaaccaaagatgtgcggcggagcgatccttgcggagctcataccgagcgcgccggcggcgaggcgcgtcacggcgggccacgtctggccgggcgacgccaacaaggccaagaagaagggcgcgcgcgccgacgacttcgaggccgcgttccgcgacttcgacaacgactccgatgacgaggagatgatggtggaggaggcggaggaggaggaggcgacctccgagcacaagccgttcgtcttccgcgccaagaaggcggcggcggcggcgtcgagcaggcgcaggaagccggcgcagtacaggggcgtgcggcgccggccgtgggggaagtgggcggcggagatccgcgaccccgtcaagggcatccgcgtctggctcggcaccttcaccaacgccgaggccgccgcgctcgcctacgacgacgccgcgcgcgccatccgcggggacagggccaagctcaacttcccttccgctaccacccctgacacccgcaagcgcggccgcgccaccgccgccgccgccccggccgtcaaggcgaccccggtcatcaacctcgtcgaggaggaggacgaggaggaggtcgccgccgccatggcgtccatcaagtacgagcccgagaccagcgagagctccgagtcgaacgccctcccggacttctcctggcagggcatgtcggcctccgacgagttcgccgtcgccgcggcggcgctgtcgctcgacagcgacgacgacctcgccaagaagcgtccgaggaccgagccggaggacaccaccgactccggctccggcgacgacaccgacgcgctgttcgacgcgctgctgttcgccgaccagtacaaccacttcaacggcggcgcctacgagtccctggacagcctgttcagcgccgacgccgtgcagaccaccgccgccgccgccgccgccgaccagggcatggggctctggagcttcgacgacggctgctgcctcgtcgacgtcgaggccagcttgtccttctaggctctagccgtcgtctccggcgaccctgtgactcgatcttgtaccatgtcatgtacatagaagagtggttttgccaagcaagcatgtgttcgtcctggttcctttcggtaatgaaaaattatgtgaggcttctcgttctcgtaaaagatctttttggctgtgcctttgatgcaaaaaaaaaaaaaaaaaaaacgcggcccgggccccggtacccaattcgccctatagtgagtcgtattacaattcactggccgtcgttttacaacgtcgtgactgggaaaaccctggcgttacccaacttaatcgccttgcagcacatccccctttcgccagctggcgtaatagc

SEQ ID NO: 20911 - DNA, 3398 bp, Oryza sativa
  Clone ID: TF_OsC21519_1
cacgcgtccgcccgctgccgctgccactgcacacgcacgcagcgagtcgcgacacgagaccgtaccgtggaaagaagagagcgaggcgaggacaccactccgctccgctccaccgccgggtcgccgcgccgcgcgcggcccgagctcgccgatcgagagccatgagcctcatcctttcccggcggcgcctcgccgccgccgtccggcggtcaggccccgccgcgctcgcctccaggtggatgcacacgccgccattcgcgacggtgtctcctcaggaaatttcaggttcgagcccggcggaagtgcagaattttgtgcagggcagttggacaacatctggtaactggaattggctagttgatcctttaaatggtgaaaaatttatcaaagttgctgaggttcaggaagcagaaataaagccatttgtagagagtttatctaattgcccaaagcatggacttcacaacccacttaaagctccagagaggtatctcatgtatggagatatatctgccaaagctgcaaacatgcttggtcaacctgtggtttcagatttctttgctaaacttatccagagggtatctccaaagagctatcagcaagctcttgcagaagttcaagtctctcaaaaattcttggagaacttttgtggagatcaggtacgctttctggctcgatcatttgctgtacctggcaaccatcttggacaaagcagtaatggttaccgttggccatatggtccggttgcaattatcacaccgttcaatttcccattggagattccattactgcaactaatgggagcactgtatatgggaaataaacctgtcctcaaagttgacagcaaagttagcattgtgatggaccagatgcttaggttgcttcacgcatgtgggatgccagcagaggatgtggacttcataaattctgatggtatcacgatgaacaagctgctgttagaggcaaatccgaaaatgaccctcttcactgggagctcacggatagcagagaaattggctgctgatttgaaaggcaaaatcaaattggaagatgctggttttgactggaaaattcttggtccagatgttcaagaggttgattacattgcatgggtttgcgaccaggatgcttatgcttgcagtggtcagaagtgctctgctcagtctattctattcatgcacaagaattggtcgtctagtgggcttcttgataaaatgaaaagtctttctgaaagaaggaagcttgaagacttgaccattggcccagtccttactgttacaacatcaagcatgatagagcacatgaaaaaccttctcaaaataccaggatcaaaggtcctgtttggtggtgaacctctggagaaccattctatcccagaaatatatggtgccttcaaaccaactgctgtatttgttcctctatcggaaatccttaaaagtggcaattttgagcttgtgacaagggagatctttggtcctttccaggtggttacagagtattctgatgatgagcttgaattagtattagaagcctgtgaaaggatgaacgctcatctgacggctgcagttgtttcaaacgaccctttattcctgcaggaagtacttgggcgatcagttaacgggacaacatatgccggcatccgagcaaggacaactggtgctccacagaaccactggtttgggcctgctggtgatccaagaggtgcagggatcggaactccagaagccattaaactcgtttggtcttgccacagggagatcatatatgacattggccccttgcctaagaaccgggcactaccttccgctacataaatactatgtcaaggctagattagcttgtagcatgttattctgaataatttgccccgtctgggcaatcatgtgtttcattaaccccgagagcataataaaaaggcaggaaatggttgtgaaaaaaaaactgaataaaaaaagatagctacatgctacattggaggccaagaaccaagttacatcatgatggtgaagaatgagattgaaaactactcaggatcatctccagcaatgatcatcaatgcgctggaaggcggcgccgaggcgggcccggttgtcaggaggagaaggagggagccgtctttgctcgcaccgatcaatggtgatggtgacaccaatggtggtggcattggcaagtcgtccttgtcaggcatcactgtcaagaggagctctaggtttcgtggagttagcagattcagagcttgtagagatgacaagaagatgttgtcatgtaggcatcggtggacaggtcgtttcgaagcacatttgtgggacaagaactcgtggaatcctacacagaggaagaagggcaagcaggtctatcttggagcatatgatgaggaggaggcagcagcaagggcttatgaccttgctgctctcaagtactggggaccaactacctatacaaattttccggtaatggactatgaaaaggagttgaagataatggagaatcttactaaggaagagtatcttgcatctctaaggaggaagagcagtggcttctcaagaggtgtgtccaagtacagaggggttgcgaggcatcatcaaaatggaagatgggaagcaagaattgggcgtgttttcggaaacaagtacctctacctaggaacctacagtgagtacaagaacagtgcttatactctattctacattgtgaattggtattccaatgcatccaaaacttcacatcttaacatcggcccatctgccattcttcctaaatctttttctccaggcactcaagaagaggctgcccgtgcctacgacatcgccgcgatcgagtacaaaggcgtaaacgccgtcacgaacttcgacctcagatcatacatcacatggctgaagccaacccctgctcatgttgccatgaaccctgcagaagctcttgcaatgcagatccctgtagatcacttcctcccaatggaaacccagatgatgatgctccctcagagcaatcctttcacctcatatcacaatgcacaatcactgggtggtggtgacggtggcagtagcagtactaataatcaagaagcctccatgataatctctcccagtggctcatctagaaagagatcatcatccactgctcttagccttcttctgaaatcgtcgatgttcaggcagctggttgagaagaattcagatgcaggtgaagaaaatggaggtgagatgagagagccgggtgcccatccaggagaaggatatgaataccacaacttcttccagggagatgctgctccggacatggacatgtgtgatctgctttcatcaggaaatgtgcatgctgcaagtggtagtgctggatttgaagaggacatcgcatgttatagtggttttggaagcatgcagtcgctgcagcaatag

SEQ ID NO: 20912 - DNA, 2101 bp, Oryza sativa
  unsure (1)..(2101): unsure at all n locations
  Clone ID: TF_OsC4061_1
gnaattgtatacgactcactatagggcggctcggggcccgggccccccctcgtgttgttttttttttttttttttttttttttaacaacgacgctaaataataataatagtagtagtagaggtaattcacattacaagttcttataacacgctaataatattacaagacataataataataataatgctactactactgtttacaacctgtaagatcagcagtagaaggtaataacagactttagaagagcaatggacgccacggccggagtaaccgaccagtgaccggccaccggagacgcacgccggacacaaaaacgccggctgccggtagcatcggcgtctccggttgaggaagaacaccaaccaaccctagcatctacagaggaaacaagtccggagagagatcgatctacgtacacaaacgaaccaaaccaaaaggattagggactataaaactgctaatccatgcccgtccgtgcggtgcagaatgtctaaaatcccatctgcacggcggcggcggcggcgacgattaggctaacgacggcgtgagtactagccaagaagtggtggtggtgttaattggcggcgaggagggagtcccagtcgatctcgtaggacgggtacttggtgagggcgaaggcggcggcctcgtcccacggcgcctcgctgaagtcgagctgctgcatctccggcacggtcgccggcgtctcggccgtggtggcggcggaggacggcgacagggagggcgacgagtcggcggactccaggcaggacgacgcgtcgtcggaggacggcgacgagcagttgctggtgggcgcggaggatgttgcggcggcggaggcggagacagaggacttcttggcgttcttggcggcggcgatgttctggcagagcgtctggagcttggcgtcgacggaggcgtggagcgggccgcgggaggcggcgttgtcggggaagttgagccgcgccgcgtcgccgcggaggcggtacgccgcctggtcgtaggcaagcgccgcctcctcggcggtgtcgaaggtgccgagccagagccgcgtgcggttccgcgggaggcggatctccgccacccacttcccccagtgccgctgccgcacgccgcggtacagcttctgcggccgcggcggcgtcgccgccgcccccgccgccgaagccgacgacgacgacgccttcatcggctgcgcgcgcgggccgagcgggccggcctgcgccgcctgccgctggaggtggaggcgggcctggatgtagtgcatctgggccgggctgagctctggctgctgggccagcccgccaccgtacgcgaacgcgtgcgggaaggagaatggcgaggtgggactaaactgggaacaaaccggaggcgagccggaggcatctcggataaaaggctcgagtgctctcatcagctcctcccctgacagatctatagctgcagccatctactcactcttttttttgggatttttttttctgatactaaaacagtagtaacaaagatttgcctggttccgaatccaaaatcaagaacaggcaggaaggagggagaaatcgacagccacagtaaaaaaacagatggctttttggtggtagatctagcaagtgaggtgtggaaaaagaacccctcttggctaccaacctaacactagaacacaaagaagatgaaagaaaaacagcagatctgggagccctggatctaaaaggccctgggtctctcgctctctgcaagcaacctaaccaagaaaccgtagaagaacaggtgggggagccagaggaggaagaagaagaagagggtttcgagaaaactttaccttgaagacgctcgaagtcgctcagatctaaagcttttcttacctcgctcgagctcacggtggctgtgggtgttcgtgggcttggagatggtggcggcggcggtgggaggatggctgtggatctgggtgtgtgtgtgggcgaaagtgggaatggtgggcggggaggtgtaagggacgccattggagctcttttatagcaaagctctccagctccagaggccatgaccggttaatcccatcccttaattagtaatttccctcgtcttatcgcccaggat

SEQ ID NO: 20913 - DNA, 1869 bp, Oryza sativa; identical to SEQ ID NO: 11154
  Clone ID: TF_OsC70902_1

SEQ ID NO: 20914 - DNA, 1029 bp, Oryza sativa; identical to SEQ ID NO: 11155
  Clone ID: TF_OsC338711_1

SEQ ID NO: 20915 - DNA, 881 bp, Oryza sativa
  Clone ID: TF_OsC19805_1
gcacgaggccctcttctccccgtgagccaatccgccccggctcagctcaacccagcagcgcagcagctcaagccttctcgcgttgcagcgccgcgccgaggaggtgtttgttgatttgtggagatggtggggggagaggtcatgtgcgaggcggcggcgccgaggtacaggggggtgaggaagcggccgtgggggaggttcgcggcggagatccgggacccggcgaagcgggcgcgcgtgtggctcggcacctacgactccgccgaggccgcggcgcgggcctacgacgtcgccgcgcggaacctccgcggcccgctcgccagaaccaacttcccgctcgtctcctccctcccgctcccgtcgccccactaccacctccccgggaaggcggcggcggcggcgccgccggtggccggccccgcgtgcagcgcgagctccaccgtcgagtcctcgagcgggcctcgcgggcccagaccggcggccacggcggcggcggtgccccggaggcgggtcccgcggcccgcgccaccggcgcccgacgccggctgccacagcgactgcgcctcgtcggcctccgtcgtggacgacgccgacgacgcctccaccgttcggtcccgcgtggcggcgttcgacctcaacctcccgccgccgctggaccgggaccacgtcgacctgtgcacggacctgcggctctgataggaatccacaccgaatcgaagcaaccggagaagacgattctactgctcgtcatcttttcccaattagatgcttgtattcgactcgacaatagtctgtaccactattctttacgcgataattgacaaggaatggccctcttgagtttcaaaatcaaaaaaaaaaacctcgtgcaaaaaaaaaaa

SEQ ID NO: 20916 - DNA, 915 bp, Oryza sativa
  Clone ID: TF_OsC143164_2
gcggagaacagtagtaaaggtttaagaatcctattaagaatggaacaagaaatgaagcaacgatcgagcaatgaaatgggtgacagatcatcgatcatggcatggaccagaagctgccgtcgtcgagcatcatgatctcccgtagagccgtcccagatctcctggtccttcgccgccgccgccgtcctcgcgtgctctggcgcgtgcaccggcgacgacgcgttcgagccgcagttctcacagaagttgtgatggaagagtggacgtggctgctgcgcggccgtggacgccgggaagttgagcttggcgcgctggccgcggaactcgagcgcggcgacgtcgtaagcgcgcgcggcgtcctcggcggtgtcgaacgtgccgagccacttgcagacagcgcggcgcgggtcgaggatctccgccgcccacttcccccacggcagacgccgcacgcccctgtacctgctcccctcgccgccgctccgcctccgcggcatcatcttgcccacgccgcccgtcacgccgccgatggccaccgcgcccgtggtgcactccccctcatcctcctcgtcgctgcagctcgagccagctgccgccgccaacaccaccacctcgcagtccacgccgatgcacccgtccaccccgcacctggcgcacgtagccgcaccggcaaccacggtcgccatcgtcggctccggcagcagcgtcggcaccgtggtgtcaccggacacgacggagatgagcgcgcgcatgaacagcgagtcctcccgctcgctgttggggagatggaacccgccgccgccgcgctccaccctaggcaccatggctgaaccaaacaaacctcggcgagttcggtcggtgtcacgcaaaagttggcgcgctatcgtgatccgggcgctgctgcggacgcgtggg

SEQ ID NO: 20917 - DNA, 1797 bp, Oryza sativa
  Clone ID: TF_OsC183204_1
atggcgaagagatcgtctcctgatcccgcatcatcttctccatctgcatcatcctcgccgtcgtctccttcctcctcttcctccgaggattcctcttcgcccatgtcgatgccctgcaagaggagggcgaggccgaggacggacaagagcaccggcaaggccaagaggcccaagaaggagagcaaggaggtggttgatccttcttccaatggcggtggcggcggcggcggcggcaagaggagttctatctacaggggagtcaccaggcatcggtggactggcagatttgaggcccatctgtgggacaagaattgctccacttcacttcagaacaagaagaaagggaggcaaggggcttatgatagtgaagaggcagctgctcgtgcatatgaccttgcagctcttaagtactggggtcctgagacagtgctcaatttcccactggaggaatatgagaaggagaggtcggagatggagggtgtgtcgagggaggagtacctggcctccctccgccgccggagcagcggtttctccaggggtgtctccaagtacagaggcgttgccaggcatcaccacaatgggcggtgggaggcacggatagggcgggtcctggggaacaagtacctctacctgggtactttcgatattttgtacaatctatcacaaaactacagatttaagaacttgttttacaaaaatacagattcagtggcttcgtttatcacaaaactacagctcagtgacacagaggccaagctacctgcagatactcaagaggaggcagccaaggcctatgatcttgctgcaattgaataccgaggtgccaatgcggtaaccaacttcgacatcagctgctacctggaccagccacagttactggcacagctgcaacaggaaccacagttactggcacaactgcaacaagagctacaggtggtgccagcattacatgaagagcctcaagatgatgaccgaagtgagaatgcagtccaagagctcagttccagtgaagcaaatacatcaagtgacaacaatgagccacttgcagccgatgacagcgctgaatgcatgaatgaaccccttccaattgttgatggcattgaagaaagcctctggagcccttgcttggattatgaattggatacaatgcctggggcttacttcagcaactcgatgaatttcagtgaatggttcaatgatgaggctttcgaaggcggcatggagtacctatttgaagggtgctccagtataactgaaggcggcaacagcatggataactcaggtgtgacagaatacaatttgtttgaggaatgcaatatgttggagaaggacatttcagattttttagacaaggacatttcagattttttagataaggacatttcaatttcagatagggagcgaatatctcctcaagcaaacaatatctcctgccctcaaaaaatgatcagtgtgtgcaactgattctctctgtgtgtgtgtttctgggtgttgaaaatcttgagatatacagggaagttttcaggtttttatcttggggtatatttctctgtccatggcactgccacaaagaagcaagcttctgtaggcgttctgttcaggtggggaagacttcatatgcttctccctatggtcctagtctcctagaaacccaaggcattcaacttggcatgagacaagtgtctgtgttccttttcttgtaatacccacaaggctgattgattaactagggagacattttctcccttaccctagattgagctagttaattctgattactcaaaaaaaaaaaaaaaa

SEQ ID NO: 20918 - DNA, 430 bp, Oryza sativa
  Clone ID: TF_uC-osflcyp034f01b1
aaaagtcaatccacgccaccatcgatctctctatccaatccaagcgcgcaaatcaatggcagagcatttcagccacgccggcatgtacatcggctacacggcagacgccgccgcgtcctcctcctcctcctcctcgtcttcgtcgtcttcctcctcggagatgcttcggttcgacacgggctggcccgacgagacacctgcgccatcctccgtggcggggaggaggaggagcgcgggcggtgatcatcgtcaaggtcggggacagacggaggcggcggcggcgttcatcggggtgcggaggcggccgtggggcaggttcgcggcggagatccgggactcgacgcggaacggcgcgcgggtgtggatcggcacgttcgacagcgccgaggccgccgcgatggcctacgaccaggccgcgctctcgcgcgtg

SEQ ID NO: 20919 - DNA, 1633 bp, Oryza sativa
  unsure (1)..(1633): unsure at all n locations
  Clone ID: TF_OsC1760_6
atctggagctttcatttgtcttaacactccaaaaaaaagtgaaaatctgaccataagcagagctggcattttattccactccacacaaaagagagagagagagagagagagcatancaattatacttcttttttgcatgctgtccctcgtagtagtattacaaatctcgtaatctttatttcctccttctagaactccctaccagctcagccattttatcttggaaaaaatataaaaaaaataaagaagggaaaaatctccattaatttctcctacagtatttagctgtataggaggagcaaagctggttgagctcaaaactgctagctccaactcgcgatcatcagtagctccagagtgtgacgtcgccgccgccgtagccgccggcgccaccatcgtcgtcgccgtccatctgccagctctggtactcgccgccgccgcccatcccgtcgtagtagtaggacggctggtcgaagtccatgttgccgtagtacgcgtagtcgtagctggacggcgtcgccgccatgtcgtcctggtactgcatcatcatggcgggcgcggcggcggcggaggcctcgacggcggcggcggagctggaggcggcggcggcggcggcgtcgtgcgggcatgactcggcgagctcgatggcggcgcggcggatgtcgtcgggggtggcgagggtggccgggtcgacgcggaggaggcgggccgagtcggcgaagttgaggcacgcgccgcggccgcggagggcgagcgcggcgacgtcgtgggcgcgcgcggcggcctcggcggtggcgaaggtgccgagccagatgcgggacttcttgttgggctccctgacctcgcacacccaccgccccgcgggcccccgccgccgcacgccgcggtacaccgggtgcctcgtctccctgaacttggtcctccccgccggccgcttcggcggcgccgacgtcaccgtcgcgtactcctcctgctcgtagtactccatgtcagtagtgtgtgttgctgctggtggggcggtggccggtgtgcccacgcgccgccgctcgtcgctcctccggacggcctctccatttccttttgtgtttgtttctgctgacggcggcagcggcagctcacaggtgtacaacgccactgacacgtgtccgtggtccaggtgagacgccgtcgccggtgaccaaaagagcggcggaagatcaacggacggcgacgacgacgaggaagaagcggcgacgctcttcgggttgacggcggcgacggtgctccggcgatcttcggcgacggcgaaggggcggacgaggacggagacgcgacggcgaccacgatgacgaccttcccgagcgacggcgacgactggaacggcggcggcgcacggctggagcgacggcggcgctaggtcccatgatgctagagcgtttccgacgacgagaggcgaaggcgagggtggcgacgggtagaggagagctcggggaactttcttgggagccagttgaagcagccctatagcaacaactatgtcgaggctcgatttgatgagagcgagacgcctctcgttgcacttctgcagtttcatctggtattgctcgttctttaacagctcctggtgtttaagctccttctctagtttcttcat

SEQ ID NO: 20920 - DNA, 904 bp, Oryza sativa
  Clone ID: TF_12581491
actgcttgagacgtcgcacacgtcatggagaagaacaccgccgccagcgggcaattgatgacctcctccgcggaggcgacgccgtcgtcgccgaagcggccggcggggcgaaccaagttccaggagacgaggcacctagtgttccgtggggtgcgatggcgtgggtgcgcggggcggtgggtgtgcaaggtgcgtgtcccgggcagccgcggtgaccgtttctggataggcacgtctgacaccgccgaggagaccgcgcgcacgcacgacgccgccatgctcgccttgtgcggggcctccgccagcctcaacttcgccgactctgcctggctgctccacgtcccgcgcgcccccgtcgtctccggactccggccaccagctgcccgatgtgcaacgcgctgcctgcaaggccatcgccgagttccagcgccgggccgggggagcaccgccactgccactgccacctccggcgatgctgcatcgaccgctcctccgtcggcacccgttctgtcagccaaacaatgcgaattcatctttctttcttcactagattgttggatgttaatgtcaaagcttatcagcagtagcagagcaaaaggatcgttgtgcctgcgaaaaaatcccatttcattttgcatggttacaaattcttacactgctcttttgctcgaatacattatattgcagatgaattcaatgatcgttttaatccacgaattatcaaaatatcaagtctttctgctactaaccatgataacacaccacctttttcaatggaggaggtaggcgcggacgccctcgccatcatcgtcgatgtcgccactgatgacgaggtccgcgccgctcaccagctcgcacgcctcgtcgtcgtccatgctcgccacctcggtccagcagctgaacc

SEQ ID NO: 20921 - DNA, 433 bp, Oryza sativa
  Clone ID: TF_uC-osrocyp005g12b1
tgttcgtgacatgaacggcctcaagctcgccggattcagcaccacgaagctgggcctcggcagcagcaggaagaggacgacgcgccgccgagggatccggcagcggccatgggggaaatgggcggcggcgatcacggaccccagcaagggcatgcgcgggtggctcggcacgttcggcaccggcgaggacggcgtcatggcgtacgacatgaaggcacgccggatccgccgcaagaaagccaaggtcaacttgcgcgacaccgtcgccgacggtcccaagcggccacggcgttcttcggcgaaacattcgccgcataagcagaaggccaggtcctcggcaccgtcgactgcgagcctgaacgccagcgatgccaagtccaagaccaacaacaaccgggtcagctcgggtgggagcaggaccgacactaccgac

SEQ ID NO: 20922 - DNA, 923 bp, Oryza sativa
  Clone ID: TF_OsC272545_1
ctgcaggaattcggcacgaggatacacaagaatgcccttcccgccttgcccgtaacatccgctggtaattacgaaattaccctcccgcctccgggattcccatggacgccagcctccgcacactgcctccggcgagcttccccggcgaggtccgctccgccgtctcctccctcctcctctctcccggcggcagcgccctcgacaccgtgttctcccacctcccgccgcccgtcaccatcccgcctctcggctccagcgtctactaccgccagagcgagctcctgcgccacttcgccgcgtcgcaggcggcgcaggcgcagagcgccaccgccgccgccagctcttcgtcggccgccgcggcgggtctcgacgatggcgcgccgcggaagctgtaccgcggcgtgcggcagcggcagtgggggaagtgggtggccgagatcaggctgccgcagaaccgggtgcgcgtgtggctcggcacctacgactcgccggagaccgccgcgcacgcctacgaccgcgccgcgttcaagctccgcggcgagtacgcgcgcctcaacttccccggcgtcatggacggccgcgactgccccgacaacctgcgccaactccgcgacgccgtcgacgccaagatccaggccatccgcgtccgcatggcgcgcaagcgcgcgcgcgcgcgccgccagcgcgaggagagcaagaagagccaacgcgccgaggacgcgaaggcggcgacgccgtctcgccccgtggcctccgagcgcgccgcgtccgagacgacgacgacgacaaccacgacgtcgtcgtcgtacgggtcaccggacggcgtgctctccatgagcgcggcgtccgtcgacggcgactgcccgctcgagcggatgccgtcgttcgatcccgagttgatctgggagatgcttaacttctag

SEQ ID NO: 20923 - DNA, 1830 bp, Oryza sativa
  Clone ID: TF_OsC44972_1
tttttacatcaaaatgacttataatatgaaacaaatggagtagctgacaatggaactagtaaaaaaaaagagcttgaactataaacgctggtgatacatgagtttctgtgctacagggctatgtcagggaaggaaaagaataatctgaaggatgcattgcattgcattcctgcatgcatcagcagccaaaacttttgatcagttccatgtcagtcctaggcctaccactcgtttcagctaatgaagctaatagagccagtaagtccacctactccatcccaaacaaatagttgtagaagtggggagccgtgctcgtgttactcgccacccatgtcccgttgctaccggtggagcccccgtagagtgctgatccagaagtcatagctgctgcagcagcataaggaatgttgttaccggagtagctgttgctctgcttgttgctgctgccgccgttttgctgcctccccatcgctgcgccggcggctgtgccccatatggcgctgctgctgctgctgttgctgttgctgccgctgtggctgctagtccccattgtgaagtccacgttcacgccggaggagcagccgtaggtgtcaaatgcagaagcaggaaactgctgctgctgctgctgctgctggtggtggtggtagtgcagggcaaggagggaccagtagtccttctccgacggtggcatggcaggcgacggcagcggcagcgatgggtcagaggggaacttagaggcgcgcgtggcggctccgccgccgaccggcaggtcgctgttgaggatgctgtcgacgtcgtagcggctcatgtcgaagttggtgacggcgttgagccccctgaacttgatagcggcaatgtcgtacgcctcggcagcctcctcctgcgtgctgaaagtgcccaagtacaggtccttgtttccggccaccctgccgatcctcgcttgccaccggccgtgctgatgatgtcttgttactcctctgtagatggaagcccctcttgagaagccgctgctcttcctgcgcagcgacgcgatgaactcctgccgcgtcatggacttcatctcctccagctccgtctcgtagttggcaacagggaagttcgtcgtggtggttggaccccagtactttagggcggcgaggtcgtaagctcttgcggccttctcctccttatcataacctccttggcggcctttgcggctttggccttcccggcggcagctattgtcccacaggtgcgcctcgtacctccccgtccaccggtgcctagtgacaccacggtagatggacgtccgttgcccgaacgtctcggcggtcctcctcgccggatcggccagctccgccgccgcgtcggtcgccattgcgatggtcaccccgccggcgttctcaggcgctgggtaccggcgcaagaacccggcggcgatgctaccaagctcgccgcagctgagctgatcctccggggcagctgccggagcggcggcgacggcgccgccgcctccgcctaggccgccgaggaaatcctccatcttcggagcgccctccgctggcccctcctctccaagtggaggtgcagatgtggtagagagggcctcaaggaggccatggtggtagttgttagcgagggagaaggagagccaatggtgaggataagccgagctcatgtccatgtccatggcgatagatatgatcgatgcgccgatcttgaagagcacttgaccagcgtttgtttgagcttatgagagggaaggataactataaagctattgctcgatgtagaccagtgttgtgctaaggagagaatgagagaatacccaagtgtgtgttatcctcgtgc

SEQ ID NO: 20924 - DNA, 936 bp, Oryza sativa
  Clone ID: TF_OsC2061_1
cactcgagcagagcaaatacagttcaggaatcaggagcaagcagaaacacacacacaaatccgaagatgtgcgggatcaagcaggagatgagcggcgagtcgtcggggtcgccgtgcagctcggcgtcggcggagcggcagcaccagacggtgtggacggcgccgccgaagaggccggcggggcggaccaagttcagggagacgaggcacccggtgttccgcggcgtgcggcggaggggcaatgccgggaggtgggtgtgcgaggtgcgggtgcccgggcggcgcggctgcaggctctggctcggcacgttcgacaccgccgagggcgcggcgcgcgcgcacgacgccgccatgctcgccatcaacgccggcggcggcggcggcgggggagcatgctgcctcaacttcgccgactccgcgtggctcctcgccgtgccgcgctcctaccgcaccctcgccgacgtccgccacgccgtcgccgaggccgtcgaggacttcttccggcgccgcctcgccgacgacgcgctgtccgccacgtcgtcgtcctcgacgacgccgtccaccccacgcaccgacgacgacgaggagtccgccgccaccgacggcgacgagtcctcctccccggccagcgacctggcgttcgaactggacgtcctgagtgacatgggctgggacctgtactacgcgagcttggcgcaggggatgctcatggagccaccatcggcggcgctcggcgacgacggtgacgccatcctcgccgacgtcccactctggagctactagagctcaatcaactgtacaattttgcctcttttttctctcttttctggcttccgatgccaaaattttggtactgtacggacactactttcggtaatgtgatggaacaagttgcaaacacagagcatcttcatttgagtcaaaaaaaaaaaaaaa

SEQ ID NO: 20925 - DNA, 1043 bp, Oryza sativa
  Clone ID: TF_OsC270762_1
atctgctggtctcgatctcctcttcccttccctatctatactctctctatctcgctgctgttgcataatcatatcgacttcttgcaagctaggttcgatgtgttgagacgcatactagcttaattagcagctggccggcagatattctcttggtacagcagccatagctaggggggagtaggtgcactgtagcttaatttgggggatataggtcatcccaaggtgtatatatgtcgatgggtgtgccctaatggtacatggctgacctgaccgagcatccgtcgccgactgctcctcctcaagtgcaaacagctggcctgccggcggcggcttctccgggtcctgcctcgcctcattcaccgtcggagcaaggggacaagacggcgcccggggcagccacggcgtcgacgatgacgacggcgagctcgggcgagccgtcgccacggtcctcggggaagcacgccttctaccggggcatccggtgcaggagcggcaaatgggtctcggagatccgcgagccgcgcaaggcgcgccgcatatggctcgggacgtacccgaccgccgagatggccgccgcggcctacgacgtggccgcgcgcgcgctccgcggggccgacgcggtgctcaatttcccgggcgccaccgcctcccgccctgtcccggcgtccgcatccccggccgacatacgcgccgcggcggccgcagcagccgcggccgccgcgcaccttgagcggccgcacggccccaccggcactgcctatcctgccaccgccgcagcggagcaccaccagcagcagcagcagcaacagtacggcagtggcagtccggccgccgacgacgtctcaggctacccgccgatggagggagggattggcaatgacgatttcatggacgaagaagccatcttcgagctgcctcagctgctgcgcaacatggcggctggcatgatgatgagcccgccgaggctgagccccaccacctccgacgtgtcgccggagccgtcggaggccggcgagagcctgtggagctaccgtgatccctag

SEQ ID NO: 20926 - DNA, 1099 bp, Oryza sativa
  Clone ID: TF_OsC75926_2
aaagggggaaggacggattaattaatcgctgcttatctagtcgataataacacggagaagagagagaggaaaaaaaaacagagaggatgacttgttttatcactgttacagctgtcttttttgacatttggaaagaccgccacttgtggcgtcctcctcccccgtctccaccgccctcctcccgacgctgcccttcccttgttcttatccaaaaccgcatcgaaaaatctcgccacgaagccgccgccgccgccgccgaggtggagatgaggggtggacgaataggtggtaggtggatggatgcagcgagcgtacgtggtggaggtgatcatacgctggctgcatgttgacgaagccgttgatcgatcttggccggcggaggcggttttgttggcttctactcggcgtcggagttctccgggcttggcgcctggttgagatccgggttcttggcgcggccgctccacgccgtccgctggtgcttctgctcgtggtggtggtgttgctcctcgccgtgcggctgcaggtgcgggtggtggtggtggtggtggtggtggtgcttctgccgctcgcggtggtgggtcgtcggcgcgaccatcatgccggtctggagcgcgtcgacgcgggagccgacctcgatggccttcttccggatcgaggccgcggacagcgtgccgccgtcgggctcgcggggctcgctcgcgccgccgccctcggacagcgacgccagcgaggagatctcctcggggaagttgagccgcgccgaccgcccgcggaggtagaacaccgccgtgtcgtaggcgcgcgccgccgccacgggcgtcgcgtacgaccccagccagatgcgcgtccgcttgtgcggctcccggatctccgccacccacttgccccacttccgcatccgcacgccacggtactgccgcctcggctgctgctgctgcagcggcagcaccgccgccgccgccgcctgctcctccttggcagcaaccgccgccgcagccgcggcgagaggagccatagccgcagccgccgccgccgcagcagcagcagcagaagcagccgagtcctcgctggaggagcggtggtactcgccctgcat

SEQ ID NO: 20927 - DNA, 741 bp, Oryza sativa
  Clone ID: TF_OsC313387_1
ctgcaggaattcggcacgaggctcctccgttcagttcagaggcgcctagcaatagcagctcattgcctcatctctgcctcccctgtccttctgggggcagagaatctctccactgctggaaaaatggtacagccaaagaagaagtttcgtggagtcaggcagcggcactggggctcctgggtctctgagatcagacaccccctccttaaaaggagggtgtggctgggcacctttgagacggccgaggaggctgcgcgagcctacgatgaggctgctgtgctgatgagtggccgcaacgccaagaccaacttccccgtgcagaggaactccaccggtgatctcgccacggccgcagaccaggacgcccgtagcaatggcggtagcaggaactcctccgcgggcaacctgtcacagattctcagtgctaagctccgcaagtgctgcaaggcgccatctccgtccttaacctgcctccgcctcgaccccgagaagtcccacattggcgtgtggcaaaagcgcgcaggggcccgtgctgactccaactgggtgatgacggtggagctcaacaaagaggtagaaccaactgaacctgcagctcagcccacatcaacagcaacagcttcgcaagtgacaatggatgatgaggaaaagattgcgctgcaaatgatcgaggagttgctgagcaggagcagtccagcttcaccctcacatggagagggagagggtagctttgtcatctga

SEQ ID NO: 20928 - DNA, 1757 bp, Oryza sativa
  unsure (1)..(1757): unsure at all n locations
  Clone ID: TF_OsC126_1
ccggccgggctctgtaaaaacaagcaaacaaagaaagaaaagcatcacaaatctcacgcactgtctctcgttcgcgcaaagcacgctgcttttctccgctttgcgagcaccatagcctagcccaccatgtgcggcggcgccatcctctccgacctcatcccgccgccgcggcgggtcaccgccggcgacctctggctggagaagaccaagaagcagcagcagcagaagaagaagaacaagggcgcgaggaggctgccactgcgccaagaggaggaggatgatttcgaggccgacttcgaggagttcgaggtggattccggcgagtgggaggtggagtccgacgccgacgaggccaagccgctcgccgcgccccggagcggcttcgctaaaggtggattgaaaaacactactgttgctggtgctgatgggcctgcagcaaggtctgctaaaaggaagagaaagaaccaattcaggggtatccgccagcggccatggggcaaatgggctgcggaaatcagagatcctcgcaaaggtgtccgcgtctggcttggcaccttcaactctcctgaggaagctgccagagcttatgatgctgaagcacgaaggattcgaggcaagaaggccaaggtcaatttcccagatggggctccagtggcttctcagaggagtcatgctgagccctcctccatgaacatgcctgctttcagcatcgaagagaagccggccgtcatgtcagcaggcaacaaaaccatgtacaacacaaatgcttatgcctaccctgctgttgagtacaccttacaggagccatttgtgcagattcagaatgtctcatttgttcctgcaatgaacgcgattgaggatactttcgtgaacctgtcctctgatcaagggagcaactcctttggttgctcggactttagccaggagaatgatatcaagacccctgacataacttccatgcttgcaccgaccatgacaggtgttgatgactccgcattcctccagaacaatgccagtgatgcaatggtacctcctgtgatggggaatgctagcattgatcttgctgacctggagccgtacatgaaatttctgatcgatggtggttcggatgagtcgattgacacccttctgagctctgatggatctcaggatgtggccagtagcatggacctttggagcttcgatgacatgcccgtgtcggccgagttctactgaggggtttggggtgtagcaactggtgcctgtatatataaggacaaatggaataaacattctggacatccaagaagcggcatgtgtctgtcgggcgcttctagttgcgctatatagctatgttagtatgttagtatgtgctgtgtctagcttagatgctgaagtctcaagtactatttggcagtgaaactatctatctgtaactgctatatgaggctggaacaagttacttagcttctaccttatctgtacttgctatagtggctgtgaaccttgtggatctgaactctgaagccaatgtttactatataatgtggttggttttataaaaaaaaaaaaaaatggacccctgtcaatggtcatgctatggctggggataagaacaattaatgatcatatttgactagaaaaaaaaaatccaaaatatcccataaagtaaaaaaaaaaaaaaaaaaaaaaaaaaaaaaaaaaaaaaaaatacctcgaggcccagctacgcgaccacttctgtacangtccnatgatgtctataagtagctcgcccc

SEQ ID NO: 20929 - DNA, 557 bp, Oryza sativa
  Clone ID: TF_OsC264665_1
cgggctgcaggaattcggcacgagggcgacgcgttctcactcgctcggacaagctcctccatctctcgatcgctcacgagcagcggtggacatggccggccacgaggtgaactccagctcgtcgtcgtcgggggcggagtcgtcgtcgtcctcgtcggggcggcagcagtacaagaagcggcccgcggggcgcaccaagttcagggagacgcggcacccggtgtaccgcggcgggcggcgccgcggcggggcggggcggtgggtgtgcgaggtgcgcgtcccggggaagcgcggcgcgcgcctgtggctcggcacgtacgtcaccgccgaggccgcggcgcgcgcgcacgacgccgccatgatcgcgctccgcggcggcgccggcggaggcggcgcggcgtgcctcaacttccaggactccgcgtggctgctcgccgtcccgcccgccgcgccgtccgacctggccggcgtccgccgcgcggccaccgaggccgtcgcgggcttcctccagcgcaacaagaccacgaacggcgcctccgtcgcggaggccatggacg

SEQ ID NO: 20930 - DNA, 822 bp, Oryza sativa
  Clone ID: TF_OsC101322_1
cggacgcgtgggcggacgcgacactgcaaaccactctctcggtctctccatccatccacctctctcgatcgtctcatgagctagcgcgccccgcgcgtacagccccgcatgtctctctccttggggtttagcgccggcgccggcgtcggtgccgatcgcctcgccgccgcgcccgcgctccaggccgccggtgctctgccgccacgcgtggacgtgtctctgtcgctggcgcgcgcggccaacgggcagccgtcgtcgtacctcccgctcaacgagaacgactcgctggacatggtcctcttcgacgtcctccgcgaggcctccgcggtggcggcgctgtcgtcgtcgtcgtcgtcgtcgccggagctgggcgcgcggacgacggcgccggtggtcgccggccaccccgccgggcgcaagggtggcggcggcggaggcggaggcaggggagcggcggcgaggggcggcgccgctggcgggcggcactaccgcggtgtgaggcggcggccgtgggggaagtacgccgcggagatccgtgacccgacgcggcacggcgcgcggctgtggctcggcaccttcggcacggccgaggaggccgccgcggcgtacgaccgcgccgcgttccgcatgcggggcgccaaggcgctgctcaacttcccgccggctgtcgccggtgacggcgcccgtcgcggcgccgccgcggccgcgaagcaggtcggcatgagcgacgtggtaccaagagcatgtcatgtagtttgttactctgtgcttagtgctcacattttttatgatatctttcgtggtgtgataccaattccgtga

SEQ ID NO: 20931 - DNA, 1473 bp, Oryza sativa; identical to SEQ ID NO: 11186
  Clone ID: TF_OsC399311_1

SEQ ID NO: 20932 - DNA, 1728 bp, Oryza sativa
  Clone ID: TF_OsC53745_1
aatccgcccccagcctcccccttctcctcctcctcccctttctctctacccgaggcgacccacgcgaagcgaacccccgcgcgagacgagagtagtaaaccctagaaacctagaggagatccccaccaccaccatgacggtggatcagaggacgacggcgaaggcgatcatgccgccggtggagatgccgcccgtccagcccggaaggaaatggcgagcccggggatctcgcggagaccctgcttcagtccaagagaccgtcaagcggtgggccgagctcaacaatcagcaggagcttgatccacagggtccaaagaaggcaaggcaggcacctgcaaagggttcaaagaagggctgcatgaaggggaaaggaggaccagagaatacacgttgtgacttccgtggtgtgaggcaacgtacctggggcaagtgggttgctgaaattcgggagccgaatcggcaaagtagactctggttggggaccttcccaactgccgaagctgcagcttgtgcttatgacgaggcagccagagcaatgtatggtccaatggctcgcactaattttggccagcatcatgcccctgctgcttccgttcaggtggttgcacaagcagctgtcaaatgtgctttacctggtggtggcttaacagcaagcaagtctagaacatccactcagggtgcatcagcagatgttcaagatgttttaactggtggcttatcagcatgcgagtccactacaacaacaattaataatcaatctgatgtcgtctctaccttacataagccagaagaggtttctgagatctctagtccacggggagctccaccagctgtcctggaagatggttctaatgaagacaaggctgaatcggttacctatgatgagaacattgtcagccagcagcgtgcccctcctgaagccgaggctagtaatggaagaggcgaggaggtctttgagcctctggaacctattgccagcctaccagaggaccaaggagattattgttttgatattgatgagatgctgagaatgatggaagctgaccctacgaacgagggtttgtggaaaggcgacaaagatggatcagacgccatcctggagcttggccaggatgaacctttctactacgaaggggttgatccaggcatgctggacaacttgctcaggtctgatgagccagcatggttattggcagatcctgcgatgttcatctccggtggcttcgaagatgactctcagttctttgagggcttgtgatttccccttggcggcagccggccatactaaaattttctggtgctttggtcggctagctcctgcacatcgccctcaggatcagcaagagaaacactggaccggattgggttcgttggtggaactggatgagcatctagtagctaaggaaaaaagatccttttatttagttctgtaggcaatggaactccttgagaactccgtttcagtgtttgttaatttgataacgcttgcttgtttgtgtgtgtatatcgatctcttttgaagccatgagaaaaaaaaaaaggactggagaaaatgtgtataaaaaaaaagcgttcttcagcctttcttagccttcatattttacctatgcacgtgggatgttacagttttagagcttgtgagccttctctaaaaccggggattaaaatgcgactaggcacgatatgttcaatctaaaccgaactccactagggtgtatcctcgtgcca

SEQ ID NO: 20933 - DNA, 1196 bp, Oryza sativa
  Clone ID: TF_OsC77854_1
tttttttttttttttgtttgttttttttttttttttttttttttttttttgtttactattcctttttatcattatgccaaagagtaatatcaaccgaacacccccaacatcacatggtcctatctctggagctggtaaacaccagcatgacaacacggcagataagaatatctcgaaaaacacatacaagcgcgggaaaactaaaaagggccaacttggtgttaaaaagaaaataaataaaacaaaaaacaatttacaagttgtattcttttatctatcgtccagcgagcttcgcagccttcgatggaccctctagtagctttggaacctctgatgaggcttctaattttttcaaaccatcttcacagtagttactaatatcaaagttggtcacagcatgggcaccacgaagctcgatggcagctaggtcataagcttcagctgcctctatctccgtttcaaaggtaccaagatagatgtctttggtgtctctactttctccaatcctaccaatccgtgcttgccatctaccatcctttcgccttgttacacccctatatgatgaagttcctcttgagaaacagctgctctgccttcttatgtacaccacaaattcatcttgggacatggtcttcatcctctcgatttctttctcataatcagaaacattgaagttaagtttggtgtttggccctgcaccccaatatttaagggctgcaaggtcatgtgcccttgcagcattctcttcagtaacatagcttccatgcttccccttgcgcttgcggccctcgacctggctgctgttgtcccagaggtgcgcctcgaacttgccgctccacttcaacctcgtgacgccgtggtaccgcgacgaccgcggcgcggcgtacttgcgcatggtctccgccaccagcttccctcctcctcctcctcctcctccctccgccgccgcagccgctttcccatcatccccgccgccgtccgcgacggccagctgctcgtcgagcgccgcgatctcctcgccccccgccgcggccggctgctcctccgtctccggaggaggaggaggcgcggggtccgaggcggcgggttgcacggtggccatcgccgcgaggtgaatcttcttcttcttggatttctcctcggcgaaatcttcgagagctcgtcgcggcgcaaaccctagccgccggcccttgtcc

SEQ ID NO: 20934 - DNA, 700 bp, Oryza sativa
  Clone ID: TF_OsC154008_1
gcactgcgcactgagcacctcgacacggcgcgcgcgcggccatggtgaagaacacgagcaacatcgccatgatctatctccattctccagctagcttctcatgtagtaataagccgatggcaaattcgtccaatcgatcggcaatacaacgagtacgtcgaagaggagccaagtagtcagtgaggccgtacaagggggtgaggatgcggagctgggggtcgtgggtgtcggagatcagggcgccgcaccagaagcggcggatctggctgggctcctacgccacgccggaggccgcggcgcgcgcctacgacgccgcgctgctctgcctcaagggctccgacgccgtcctcaacttcccctcctccgcctcgtctcgccgccgcctcgacatccaccgggggggcacggactcggcggcgggcgacatgtcgccgaggtccatccagcgcgtcgcggccgccgcggcgggggcattcgacgccgccgccgccgccgtcgtcctccggcggcggtgacgtgctggaccacgcgacgacgccgtcgtcgtcgtcgtctgccgcggccaacgtttgctcgccgccgctggagggggaccatgagctgtggacggagctggacgcgttcgcgtcgccgaagttcatggatctaatggccccggcggcacggcgttctcgtcgccgtgggaggagcccgaggagga

SEQ ID NO: 20935 - DNA, 1452 bp, Oryza sativa
  Clone ID: TF_OsC6832_1
atgcgcagcagcagcagcaaggccacacccacaacctccccggcgttccccgtcctcggctttccccccagtgccaagagtccaagacccaacaagggggaggacggaggaggcgaggcagaggcatctcaccgaagggggaagggcgacgccatgtgggacctcaatgactcgccggcggccgaggccgcgccgccgccgctgtcgccgtccgccgacgactccggcgcctcctcgtcctcggccgccgccgtcgtcgagatacccgacgacgccgacgacgactcggccgctgtggttgtcgtcacgcgccagttcttccctccggccgtcccgggcggcggcggcgaccccgcccccgggaacgcgcgcgccgggtggctccgcctggccggagccgccccgccggtcgctgcagcggggccggcggcgtcggcggcggtgtccaagaagagccggcgcgggccgcggtcgcgcagctcgcagtaccgcggcgtcacgttctaccgccgcaccgggcgatgggaatcgcacatatgggattgtggcaagcaggtctatttgggcggatttgacactgctcatgcggcggctcgggcgtacgatcgggcggcgatcaagttccgcggcgtggaggccgacatcaatttcagcttggaggattacgaggatgacctgaagcagatgagcaacctgaccaaggaggagttcgtccacgtgctccggcggcagagcacggggttcccccggggaagctccaagtacaggggcgtgacgctccacaagtgcgggagatgggaggctcggatgggccaattcctcggcaagaagtacgtctacttggggctgttcgacaccgaggaggaagctgccagggcgtacgaccgcgctgccatcaagtgcaatggcaaggatgcggtgacgaacttcgatccaagcatttacgccggggagttcgagccgccggcagcggccacgggtgatgccgccgagcacaacctggacctctcgcttgggagctcggcgggctccaagaggggcaacgttgacggtggcggggacgacgagatcaccggcggcggtggcggtggcgcgggctccgaccagcgcgtccctatggcgttcgaccttgactggcaaacggcggcggcgaggagcaccaaagctaagttcttgagcaatggtgatccggggacagcgggaggcctgtcactgacgatcggcgcaggcatggccgggcactggcctccccagcagcagcaggggtggggcaacgccggcggcatgagctggccgctcccgccgcacccgccgccgccgccgaccaacgccgcggccgccgcaaccgctacagcagctgcagcatcatcacgattccctccctacattgcgacgcaagcctcaacctggctgcagaagaacgggttccattccctgacccggcccacctaa

SEQ ID NO: 20936 - DNA, 2275 bp, Oryza sativa
  Clone ID: TF_OsC58470_1
atggccgaccaacgccggagatttcgcggcggaggagattggcaggcgagcgtcgacgatgtggtggacgacggtggcgagctcgaggccgcggcggcggcggcggcgaggggatcggtgctgtccggggagtaccaggctcaggagatgtccacgatggtgtcggcgctgacctgggtcgtcgccgccggccacgacgaccacggcggcgggcagtggtctggccttgtggacgtgccggcgacgacgctcgccggcggcggcggcggcgactacgggcatggcgcacaggggagctattattactacggcgcagcgccgacgtcgacaccggagttcgtagcaggagggcagcaagagcagctcagctccgacgtgccgcagggcggcgctagtctcggtctcgccatggacgagcactcgcccacatacaccgtcgaagcgtcgtcctccgccgatcagcacggcggcggcggcggcgggcggctgattgagaagcagcagttgctggtagattaggcagatccaaatacgaaagtcagtgttcacaaggccgcccgcgtctggctcggcaccttcgagaccgccgaggccgcggcgcgcgcctacgacgaggccgcgctccgcttccgcggcagccgcgccaagctcaacttccccgaggacgcgcgcctcagcagcccgcccgccggcgccggcgccggtggcgccaccgcagcggcgcagacggtgccggtggcctacccggccagcgcggtctcggactacttgcacggcggcgccgccgctgccatgagtagctctttggggccttactcctccatccccacctcctcggtcaccgtcgcctccgtgccgtcgtcgtcctctgccgcgtcgtcttcttcgggttacggcgcgccggcggagcacggcgaggcggtgcagtggaccagctggccggacgctcagctgcagccggcgcccgcgcgggcggagcaaaccacgggcggggcgaccacgccgacgacccgcgcacacgccggcttcttcgtcctcttcttcttcttcttctgcttccacccccgcgacccgacgccgcccaccacctcggtttcgttggcatcgtcatcctccaggtccacggccactagctaccatctagaagcttccggaagcttcgggaaggaagccgccccccgcgccgccttgccgggcctcgcaatgccggaggagaaggagtacgcgcccgtgcccctcggccaggcgccggaggcggtggaccccgaggacccggtcaagtcgccgccgcggcccacctcgccggcgaactccacccgcaaggcatgttttgctgttcttcaaagctgggtgtcaagaaaatttatgacaggatgcgtagttcttttccctgttgctgttacattcttcatcacctggtggtttgttaagtttgttgatggatttttcagtccactgtatgcaaagcttggatttgatatatttggccttgggtttttgacttccttgctattcatattcctagttggaatatttgtttcttcatgggtgggttcaactgtcttttggattggagaatggtttattaagaaaatgccttttgtaaggcacatatattctgcatcgaagcaagttagcactgctgtttcaccagatcaaaatacaacggcatttaaagaagttgcaataattagtcatccccgtattggtgaatatgcatttggattcataacatcgacgatgatccttcagactgacaaaggtgatgaagaactgtgcagtgtatatgtgccaaccaatcatctatatatcggtgacatcttcttggttaggtctgaggagattataaggccgaatttgtccattcgagaagggatagaaatcattgtttctggaggaatgaccatgccgcaggtgattgcagcaccaggacaaacaccccataagggtcagagcacccgtttaaacagaatgatgagtgcgtgagtacatcaggtctgcccagagttgctgagagagggcaaatcggtggatgacaaagctggaacaaggtgattgagaagcagcattgctggtagattaggcagatcaaaatacgaaagtcagtgttgactagtccgcatcgcttaggtttgctcgctgagtgaaaagttgtgtaatctttcaatcacgctccaaatgtatatcagtactgtgaccaatagtatttatactcctttcaaaagaaaaaaaaatcgatagcatttgtaccttgtttaaaaaaaaaaaaaaaaaa

SEQ ID NO: 20937 - DNA, 1385 bp, Oryza sativa
  Clone ID: TF_OsC2062_1
gctggatgagccagcagccgcccccgcccgcggttgcttcccctccccaccacgtcaaaacccaaccccaaccatgatgctcctgcgccaccaccaccacccccacagcggcgccgccaccaccagcagcagctgcagcggcggcggcggctgttagagaggagggcacacaccaccaccgacaccgacacgctcgccatgccaccaagcgaggcggcggcgtgaggcgacgcagatctgaacggaggaggaataggaagaagggaggaggaggggagggagaggagttggaagacctggaggaggaggagatctctttcttgttcccgctcgatggagcggggggaggggaggaggggagattgctccgtgcaagtgaggaagaagagaacgcgaaggaaaagcgatggccctgattcaatcgctgaaaccatcaagtggtggaaggagcaaaaccagaagctccaggaggagaatagctccaggaaagcgccagccaaggggtccaagaaagggtgcatggctgggaaaggaggtccggaaaattcaaattgtgcttaccgcggtgtcaggcaacggacatggggtaagtgggtggctgagatccgtgaaccaaaccgtggaaggcgcctatggctaggatcatttcctactgcgctggaggctgcgcatgcatacgatgaggcggcaagggcaatgtatggtcccacagcacgtgtcaattttgcagataattccacagatgccaactctggctgcacatcagcaccttcattgatgatgtctaatgggccggccactataccttctgatgagaaggatgagctggaatctcctcctttcatcgtggctaatgggccagctgtgttgtatcagcctgataagaaggatgtgttggaacgtgtagtccctgaggtgcaggatgttaaaacagaagggagcaatggcttgaaacgtgtttgtcaggagcggaagaatatggaggtatgtgaatcagaagggatcgttttacacaaagaagtgaacataagttatgattatttcaatgtccatgaaattgttgagatgataattgttgaattaagtgctgatcagaaaacggaagtacatgaagagtaccaagagggagatgatgggtttagccttttctcctattagagtagtagtcatgctgcgggtcaataggaatatttcattctagctgctaggggatacttcaaatatctgcaacctgaagctttgtagtcatttacggttttcgtcttactgggtaatagctttatatatactataagccaactggtacaagaagttgtactgtgtgttgagtgcactgtggtaaaaatgaatctatatttaatgagcttactctgtcaaaccaaaaa

SEQ ID NO: 20938 - DNA, 1693 bp, Oryza sativa
  Clone ID: TF_OsC45729_1
agaaaaagcagcagaggacatttcatatctcatctcacctattgccagtacatgcaccagtcccaaaacgacattgagccaaaagatggcacacagaaatcacccaaaggccaacccccatctccactctcgaagtggcagccatgcatggcaacagtgcagggcgccactctagtggccagaggcagcacaagtgagggaggaggtgaaagagacaaggcacaataggggtgatcagaaactatgacagagtacagtggaacagtgaccactgggaagctatctccactgtcagcaatggaggcaggcggaggaatagttactggatagcaagaaaagggcaaagcttcgctccactagacactggtgcgagtgggccccagctttagtgcccactgttcaaattacaactctggtagcacggtcacgattcgtggtttcgcactcagaaatgaagataaaagaatcatgagcgtgagaattctgatcataaccaggtggaacatagagagggatatcatatggagaaggtccctctctggacaaacgacgaatgttatcagcaagcggcggtggatgcacggtgaggtttcgcctccaccagaataggtggcagtcaggcggtcggggggaagtagaactggtggtggccgggaaatggatgggggcgggaggaaggcgagcgggcggcgtcggcgacggtgcccgtagagaatcctgatgatgctgcagtagggagtaatggcaaaggggagccctgcatttgccatgaccacgaagtagggaacgactggggacccaactcaggtcttttctccataggtacttccctgaggttcacaaagaagcccggacaaggagatgcatataaatgtggatgctgggacatcgatgtgccctgaggaagcacaggccactgaggacttattggctgagtaacaacagaacttgaagcttcaggagaatcacaattcaactggaacccagttagggtaccatcacttttcagctcatgaacgttaggctgtgaaattctcagatttaagtcaatgatgtctccatcaaccacttcattgtcggtttcaggtagaacatctccatcataagaactaggatcaaaattagtaacagcttcccttccattgaagcggatagctgcccggtcatatgctcttgcagcctcaatttcactgtcaaacaatcctagatagatgtacttcttgccgagcagctggcccatccgagcttcccaccggccacacttgtgcagtgtcacaccccggtactttgagctcccccttgcaaatcctgtgctttggcgccgaagtatgtgcacaaactcctccttggtccaattgcgcatctgcttcaagtcgtcctcatagtcattcagattaaagttgatatccgcgtcgaggcctctgaacttgatcgccgcgcgatcataggccctcgctgcggcatgagctgtatcgaaaccacccaggtacacctgcttcccgcagtcccagatgtgcgactcccatcgcccggtcctcctgtagaaggtgacgcccctgtactgggagctccgagacctcgggccgcggcggctcttcttcccgccggcgggggacctctggctctgcgccaccccgagatccgccgcgcggcgcggccacggcccctccccagccgccgccggcatcggcat

SEQ ID NO: 20939 - DNA, 1617 bp, Oryza sativa
  Clone ID: TF_OsC3062_1
aaaaaaagaaagaaaaaataaatatctgccacgcaattacactgttccgtttccacgcgggagacgtgccattcaaggcagctcacgcacaaagcgagcgcccgccttgggccccacgccaccaccatttactactactgctcacttcactagggagtacaaactccgctgggtttttttttactgcgccgaaataataataataaaattaatataatactagtagtaataacattgctgctggttgctgctgatgccccgtctcccgccaacttttcccgccccgagagcgcgaaatgggtggaggggggcagcggcgtcatttcacgctgacggcgttgctcgccgtcagccccgccgtcacgaagtcctccccttcccaccacggcagccagtcgaactccgccgccttggtggaaggcggcggcgccgagaggtcgcccagctcgacgaggaggtgctcgaaggatggcgcggtcacctcgtccgctgccgcgtaccggagcacggaggtcggcgacgcgaacgggttgaacgagctgtcgttggcgcggtcctcctccggtggcgccggcgtcggatcggggacggaggccttggcggcggcggcggtggaagagcttggggtcttgtccggggtggtgtgtcggcgagggtggagcttcatctgcttggccttggcggagggggtgtcggagtcggaggggaagttggtgacggcgtgggagcccttgatgcggagcgcggcgtcgtcgtacacggcggcggcctcctcggcggtgtcgaaggtgccgagccacagccgcttctgcaggctcgggtcgcggatctccgccgagaacctgccccacggccgccgccgcacgccgcggaaccgccggctcgccgccatccccgcgcgccgccgggccagcgccgccgtcgccgtcggaaccagccgcctcgggtgcttcggcgccggcgccggcgaggcggccccgacgtcgatgtcgatgacctcccggacgcgcggcctggagcgctcgtccccggaggagtcggtgtccgtggcgtcggcgtccacgaagtagacgcggacacgcttgggccgaggcatgctagccccaacacggcggctcctgccggcggcgagggagtccgccggagacatcgccggaggacgcatatccaccgcccgctacgaggacgtcaccccaaatctcatccaagaaaacgcacgaaccaacccagcaaacaaactcacccgaattggaggtaaaacccaaacaaacaagacctcaaatttctccttcaaacttcccaaatcaacttcaaaaaaacacaaaagaaaatcccaaagatttctcagatctaagcactcccccagtgagtgaactatcactaccaccactagctcaccgctcactctccaagaaccgggtcaaacaagcaaaggcacccggaaaatcccaaacccccaaaacctcaaaaccagagagatccaagaactcctcaaccgaggcaaaagaaaacacgaaaccctccgtcgatctcaggataatccggggggttttaagaggggttttagctttgaggttaagggcgggaaagggagaggagggggatttcctcgtgccg

SEQ ID NO: 20940 - DNA, 660 bp, Oryza sativa
  Clone ID: TF_OsC329744_1
atggcggcgctcttcgaggccgcggagacggcggccatcgtggctgcgctgacgcgcgtcattgccgacggcgggcgtggaggcggcggcgccgtctgcgtgccgccgcccgcgccgtcgttggtcgtgccgccgcgggcgggaacgggcggcgggcggcgcgtcgacgttgcgcgggaggaggagatggtcggcgtcgtctccgcgggagatcacgccggcggggcaagcgtggccgaggcggcggcggcggtggtggtggcggcgccggcgacagcgcgcaggtaccgcggggtgaggcggcgcccgtggggcaagtgggcggcggagatcagggacccgaggaaggcggcgcgcgtctggctgggcaccttccgcaccaccgaggacgcggcgcgcgcctacgacgccgccgtgctccgcttccgcgggcgccgcgccaagctcaacttccccgaggaggcgtcccgcccgcgccgcccgtggaagggtcacgacgtcgatcacatgtcctgctcgccaccatcgatcgcgaacgctcgctttctgggttcgtggatcttcggacctccgccgccgtcgcggtccgtcgcggcggcgacaacgactctgcttggtgggagccatggaagcaacggagcagataatgggagggaatag

SEQ ID NO: 20941 - DNA, 1054 bp, Oryza sativa
  Clone ID: TF_OsC198236_1
ccgccgggccaggcccccccgcgccgcgctcgctcgctttgcaagcaaaacgccccaactctcccgcacgcacacgcgcccttccaccgactcgtcagcttagagcaccgcaagcgcgcacagcagcaaagatgtgtggcggcgcgatcatttccgacttcatcccgcagcgggaagcccaccgcgcggccaccggcagcaagcgtgccctctgcgcctccgacttctggccgtcggcgtcgcaggaagccgccgacttcgaccacctcaccgccccctgcaccttcacccccgaccaagcggcagaggagccgaccaagaagcgggagcggaagacgctgtaccgtggcatcaggcggcggccgtgggggaagtgggcggcggagatccgcgacccggcgaagggcgcgcgcgtctggctcggcacgagcgggcgggccgaggcggcggcccgcgcctacgaccgcgccgcccgccgcatccgcggggccaaggccaaggtcaacttccccaacgaggacccgccactcgacgacccggccgccgacggccacagccacggcggcgccgccatcccgtgcagggagttcatggactacgacgccgtcatggcgggcttcttccaccagccctacgtcgtcgccgacggcgtgccggccgtgccggcggaggaggcgcccacggtggcgtacgtgcaccaccacctgccgccgcagccgcagcaggacgcggggctggagctctggagctttgataacatccacacggccgtgccgatgtgagatcgatctgatgatcattcagatcgatgctagctcatgtgtttttaattatatcttcacagcagaaacaaaaaaaagttcaattcagtttattttgttgttatacgttttaaaatgtttcattaggttttcatgttataggagtgatttatcggattgaactctcaagtgaccgacttctgagttcttcgtgtaaagatgaatgctccaaggaataaaatgcaatttgtatttaaaaaaaaaaaaaaaaaaaaaaaaaaaaaaaaaaaaaa

SEQ ID NO: 20942 - DNA, 218 bp, Oryza sativa
  Clone ID: TF_LIB3433-061-P1-N1-C8
ggcggcgccgcgacgggcgccgtcaccggcgacagccggcgggaggtggagcatcgccttggcgccccgcatgcggaacgcggcgcggtcgtacgccgcggcggccttctcgggcgtgccgaaggtgccgagccacagacgcgcgccgtgccgtgtttggtcacggatcttcactttgtacttcccccacggccgccggttcacaccgttgttgtgcc

SEQ ID NO: 20943 - DNA, 887 bp, Oryza sativa
  Clone ID: TF_OsC3842_1
ccctaggaagaaggaaacccatagacgtgcaggatgttatcacccacctcattctttgcaaacgttgttgttgctattgttgccatcgtgacaggttgacttgctggcaggatgaagttggtccagaaaagagggtccgcagaaggatcagcagggttccaggtatttttcatttgtgcagtaacagaggccaacgtgtatggagctctttgcacaagcaacccattcacgttcatgttcactgcagttgtgtcatgtccagttgcaggtactggggtaactgtctttccttcatccatttctttgctaaaagtacattcttcagatagtttggtagatttttctgagaagcttttgaaggcatcagactgagttaagatatcacatgctgataggaccacggaagagggctttgagttagaatgtaggccatgggaaggaaacttataaggctcagtccgttgcattgagctttcaatagcacggatttcatcagtaacctcttccattttagatgtatctgactgccgtgtcttttttgggagccaccaccttatgtaatttgtcagatcaattttcctctctaagccaaaggttcctgcaaatttcccatccagcgtgatgtccttccctaaataagcaaatacataatgaacataagcaggaaagtttatttgtgtcccagctccccagtatttcaatgcagcaaggtcataagctcttgctgcagcctcttcatcatcatatgcaccttgtttcccttttttgttctgattctgattccatgtgcttttatcccagaggtgagcttcatatcggcctgtccacctatgccgggtgacgccgcggtagatggagctgcgcttcccggcggcgcagggcggcat

SEQ ID NO: 20944 - DNA, 411 bp, Oryza sativa
  unsure (1)..(411): unsure at all n locations
  Clone ID: TF_286671
cacgcgctcgctcgctttgcaagcaaaacgccccaactctcccgcgcgcgtctggctcggcaccttcgccaccgccgaggcggcgncccgcgcctacgaccgcgccgcccgccgcatccgcggggccaaggccaaggtcaacttccccaacgaggacccgccactcgacgacccggccgccgacggcacagccacggcggcgccgccatcccgtgcagggagttcatggactacgacgncgtcatggcgggcttnttncaccagccctangtngtngncgagggttgtcggncgtgcgggngaggaggngnnanggtggngtacgtgaanagganttgtngntgagncgtagtaggacgngggggttggagtttggagtttgataagatnagaaggnggtggatgtgagat

SEQ ID NO: 20945 - DNA, 1377 bp, Oryza sativa
  Clone ID: TF_OsC23083_1
atggaggaggggtttgtggctctcaagaggacggagcatgtcgaggtgacgtccttggcggtggcggtcgaggcgacgccgtcggcgaaggggggaaaggggaaggttgtggtgggtggtggtggcgccggcggcggcgttgggccgacgagggtgagggtgttctgtgatgacttcgacgcgacggactcgtcgagcgatgaggatgaggaggaggtgaccgcgcggcggagggtgaagcgctacgtgcaggagattcggttacagcgcgcggcggcggtggccgtgccgccggtgaaggtgaagggcgaggaggtgttcccggccgcggtgtcggcgaagatggcggaggccgcgaaggcgagggtggtgttggcggctgggaggaagaggaaggccggcggggtggacggcgccgagccgcggttccgcggcgtgcggaggcggccgtgggggaagtacgcggcggagatccgcgacccgtggaggcgggtgcgggtgtggctcggcacgttcgacaccgccgaggaggccgccaaggtgtacgacacggcggccatccagctacgcggccgcgacgccaccaccaacgtccaccagtccggggactcggcaagcctcgacgtcccacccgaggtcgccgagcgcgtcccgcagccgccgggggcgtccaagaacgcctccccggccacctcctacgactccggcgaggaatcccacgccgcggcggcctccccaacctccgtcctccgttccttccctccctccgccgtcgtcgcgaccgccgacacggccaacaagaagcagccgccgccgccgcctctcgtcgtccgcgagaccgacgagtcggtcgacgtcttcggctgctccttctccgacgacggcggcttcgccggcgagctcccacctctctacaccgacttcgacctcctcgccgacttcccggagcccccgctggacttcttgtccaacctccccgtggagcccttctccctggctcccttctccagcaacaatgggtcaccggacctccacctcgacgacgccccatcgccggcggcggcacaagtggacgacttcttccaagacatcaccgacctgttccagatccccgtcgtctagtgcagcagcaagaactgtaaaacaccggattaggagactaatccggcccaattttgtttgcgttttctcttttttttttcttctttattttttcgtttttagaggagaggagagttgagttaatgattccccgtcagtctagctgcggcagaacacccaccaccgcttcgtcaggggggaaagccttgacgaggcgagagagatgagaaagtcaaaagagagggcataaaacgggatccaatgttgttgggggtt

SEQ ID NO: 20946 - DNA, 1100 bp, Oryza sativa
  Clone ID: TF_OsC6641_1
tttattttattgttgtgcattacaaaaagtacacaaaaattgtttgttcaatacagtttagtagtcaactctatggataatttacaaactctgctttgttcaattagtacaccagagccaatagaaaatagaaaaagaaaaggagaaaaaaaaaactctagttaatctgccttctttgtttcaagctattccaacggctgggatctaatcacaacgttcaaaaactagacgctgcaccggaaaatggcgggaaccaggtgtccgcttcatccagcttcatcaggtcctgcaagccatcccagagctggttgctgccggcttcgtccgcgcccatctgccaatccaccggcgtcgtcgtctcctcggcatccgcgctgcacggcgacagagtcggagtcatctgctctgccgttgtcgtcgccgccgtgacagcatcgccgccattgccgtttctttggctgggcatgggcaaaggctcggagcacgggaagttgagcttcgcgcgcgcgccgcggaactcgagggcggcgcggtcgtacgccctggcggcctcctcggcggtgtcgaacgtcccgagccacttgcgcaccgcgcggcgcgggtcgcgtatctccgctgcccacttcccccacggccgatgccgcacgccgcggtacacgttcttcttcctcctccgcctaaccctcttcccgcctgatcctcctgccaccgcggccgcagcagcagcagcagcataatccgtcgccattaccgcctcctcgttccccgccgcctcggccccaaagaagtcgcacccgagacagccgtcgatgccgcacagagcacacgcctccccgcacgccaccgtgacgatctccggcggcggcgtggtgcacccggacaccacgtaccgcagagccgcgacgatgatgctgtgctcctgctcggacgagatccaccgcgcggagctcggagcctgatgactacccccacgctcatcaagcttggtcttgcaagaatcctgcctcgccgccgccatggccggtatcaccttctccgtcatgagtgttccagtgatcagtagggagctaagtgagccggagctagtagtgtgcctcgtg

SEQ ID NO: 20947 - DNA, 712 bp, Oryza sativa
  unsure (1)..(712): unsure at all n locations
  Clone ID: TF_OsC6832_2
agaagagttcgtcacgtgctcgcggcaagagcacggggttccccngggaagctccaagtacaggggcgtgacgctccacaagtgcggangatggaggctcggaatgggccaattcctcggcaagaagtacgtctacttggggctgttcgacaccgaggaggaagctgccagggcgtacgaccgcgctgccatcaagtgcaatggcaaggatgcggtgacgaacttcgatccaagcatttacgccggggagttcgagccgccggcagcggccacgggtgatgccgccgagcacaacctggacctctcgcttgggagctcggcgggctccaagaggggcaacgttgacggtggcggggacgacgagatcaccggcggcggtggcggtggcgcgggctccgaccagcgcgtccctatggcgttcgaccttgactggcaaacggcggcggcgaggagcaccaaagctaagttcgaccagaactcgaaccatccccagatgcctccggtcctgcaggtcacccacctgccattcagtcccaggcatcatcaccaattcttgagcaatggtgatccggggacagcgggaggcctgtcactgacgatcggcgcaggcatggccgggcactggcctccccagcagcagcaggggtggggcaacgccggcggcatgagctggccgcacccgccgcacccgccgccgccgccgaccaacgcc

SEQ ID NO: 20948 - DNA, 1540 bp, Oryza sativa
  Clone ID: TF_OsC7160_1
ctagaccacttgccagctcaactagcactattataccaaccattatgctaatgctgtctcatatctaatgtgtgttaatagtttattagctctccaagaacaatccaatcttcagtagtacaaatatatgagagagcacaaagcttcaagcctccttcagactacaagccattaaacagagacgaccaacgacttaaccacacttcttctttgtgctgtccaacctccattgttgggtgtgaaagctttggctcatctgccatgtgtggaggatccattctcggcgaccttcacttgccggtgcggcggacagtgaacgccggtgacctgtggggagacgccggcaagggtagagatggtggcgacggcttgaagaagaggaaggggagttcttgggatttcgatgttgattgcgatgatgatgatgatgatgactttgaggctgattttgaggagtttgaggatgactatggcgatgatgatgatgtgggtttcggggacgacgaccaagaatccgacatgaacggtctcaagctcgccggattcagcaccacgaagctcggcctcggcggcagcaggaagaggaagacgcgataccgagggatccggcagcggccatgggggaaatgggcggcggagatcagggacccccgcaagggcgtccgcgtctggctcggcacgttcggcaccgccgaggaggccgccatggcgtacgacgtcgaggcacgccgcatccgcggcaagaaagccaaggtcaacttccccgacgccgccgccgccgccccgaagcggccacggcgttcttcggcgaagcattcgccgcagcagcagaaggccaggtcgtcgtcgtcgtcgccggcgagcctgaacgccagcgacgccgtgtccaagtccaacaacaaccgcgtcagctcggctgggagcagcaccgacgccaccgccgccgccatcgccatcgacgacggcgtcaagctcgagctgctctcggagacggatccttctccgcccatggccgccgccgccgccgcgtggctcgacgcgttcgagctgaacgatcttgacggatcaagatgcaaggacaacgcattcgatcaccagattcacaaggtagaagcggctgtcgctgatgaattcgcgttctacgacgatccgagctacatgcagctgggttaccagctcgatcagggcaactcgtacgagaacatcgacgcgctcttcggcggcgaggccgtcaacattggtggactctggagcttcgacgacatgccaatggagttcagagcttattgagcatttgattctatttaggagggagtgaattatttgggaggaagaatcgatgttgtaacttgtaaaatctctgatgatgatctctgcatcatatgatcaatttgagtgcagttttgtttttgtaaatacgaattctttattatgatgttaggttcttaatttgcccttcttcatcagggatttgttcaggcttgggttgtaacccctgattgcacgagggaaagttcgcgttttttgttgtcacccaaaa

SEQ ID NO: 20949 - DNA, 600 bp, Oryza sativa
  Clone ID: TF_jC-osroLIB3475060g11b1
cccacgcgtccgcccactcgtccgttcctctgtttcctttcctactacagtagagtagctccatttccatttgagttttgatttttgaggatatatgatgcagccaccgtacacgtacagcaacagctaccaccatatccatagcagcttgccgccggagatgagcgaccgcgacgtcgacatgcacatcctcaccgctctcatggccgacatggccgattcgtcatcctcctcctcctcctcctcatcatcatcatcatccgacgactccgacatgcgagcatcagcagcagcagctgagcctgagcaccggaggagccctgcaccgccgacgccaccgaggcaacagcagatgatcggggtgcggaagcgtccatggggcaagttcgccgccgagatccgcgactccacccgcaagggtgctcgcgtgtggctgggcaccttcgacagcccagaggccgccgccatggcctacgaccaggccgtcttctccgtccggggcgccttcgccgtcctcaacttccccctccaccgcgtttcaggagtcgcttccaggccactccccttcgggcgccgcccgggagggaatcgcccgggtta

SEQ ID NO: 20950 - DNA, 1433 bp, Oryza sativa
  Clone ID: TF_OsC703_1
cgcgccatagcgacctctctcccggagaaagaagagcgcgccgcgccatgtgcggcggtgcgatcctcgccgatttcaccccggcgagggtgccccggcggctgaccgccgccgagctcctgccggtgaccccgactccccccgccgccgagaggagaaccacccggaagcgcaagtccgacgtcgacttcgaggcggagttcgagcttttcgaggacgacgacgacgacgatgagttcgagctttccgacgatggcgacgagagtttggccgtgtcatgtgtgtcgtcccccaagtcgaaggcagtaccttcgttttctttttcgtcggatgtctcctcgagctccaggccgcggcggcgcgtggcggcggcggcggccggtcgtcggaaggcgagcaagaagagcaagtacaggggcgtccggcgccggccgtcggggaggttcgcggcggagatcagggaccccaagaaggggcggcgcgtgtggctcggcacgtacggcagcgccgaggaggccgccatggcctacgaccgcgaggcccgccgcatccgcggcaagggcgcgaggctcaacttcccccgcgacggcgatggctcccctcgccggagtaacgaccggccctgctggaccatcgacctcaacctccccgcggcggccgtctccggtgacgacgacgacgccatggccgtcgacgccgcagacgcagacgcaggcagtgctggccgtgcagcagcctatgcagatcaagaagcactgagcgcggcaaagtgcaagatcaagcagtgtcctcgcgacgaacagatggcgagcgccacacctgagctcatggaggaggacgcgagcagcagcagaaacatggtgcccctgtccatggcgctgcagctgcagtatgcggcgatgatcgccgaatgcgaccgcgagatggaggagatcgccgccgtggagagggacctcgagaggcgcaggaggcaggtgttcgagcgcagaggccacctggtcaggcaggcctctcttctgctcgactgacgatcttgctgaactgaactctgaatgtttgagcttgtctgaagtctgaactctgcactatgccatatggtgtttcaccttcactgtgaggctgacatgtgggccagacgtccgtttgccttgcttgcttttgagctgcaactgggcgttgtgctgcaagcctgcaaagtgcctgtgtaaagtttgtgggattgtgtgtgtggatcttgtatccttgtgactttgcaagctttaattttgtgaggaacaatagtattttagattggtgtgtaaaatatagaaataaataatagtagcaactaaattttggttttcagctcttcatcagatggtttgtcatgggaacaaaatttcaaacatgagcaaattaaggtcaaaaaaaaaaaaaaaaaaaaaaaaaaaaac

SEQ ID NO: 20951 - DNA, 1918 bp, Oryza sativa
  Clone ID: TF_OsC4185_1
tcacgcctccgcctctgcctccgcctccggcgccggcgtcacctcctccctccgcggcatcgcctccagcgccggcgccgcctcctccctccgcggctccacctcaagtgtcggcgtcgcctcggtcttccccagtcctacgattgagttttgtttttttcacaactgaattttcgatgaagatttgcacattaatacagttaattcacagtagttctattacaggtagttaccaacaattgattacaacaacctacatgcacaagtatttgtacatttgtagagttgtacaactactacactaacgagtcactgcttactagacatcggagacgccggacacaaaaacgacgccggcgagcagcctccggaacctaaaaaaccaacacaaaaagaaaaggatctacacaagaacgaacatataatccatcgcctcgccgccgcgcagaatgcctaaaacctcatctgcgccggccggcaatggcgggctatggaagagaagagctagttattgttgttgagcagcgagtcccagtcgatctcgtacgacgggtacttggtgagcgcgaacccctccgcctcgtcccacggcacctcgctgaagtccagctgctccatctccgccagcggcgacgccgccgcagacgacgacgacgtctccgagccgccgtcgtcgccgccgccggagtggtcggagccggaggacgacgacgccgcggcgaccaggggcgcattgatgggcatggccctgccggcgccgcccctggacctggatgaggcgttcttggacgcggcgatggtgtcgcagatggcctggagcttggcgtccacggcggcgtcgagcgggccccgcgacgcggcgttgtccgggaagttgagccgcgccgcgtcgccgcggaggcggtacgcggcctggtcgtaggtgagcgccgcctcctcggcggtgtcgaaggtgccgagccagagcctggtgcggttgcgcggcagccggatctccgccacccacttgccccagtgccgctgccgcacgccgcggtacagcttctgcgcccgcgccgccgccgccgccggagcagccgccgaagcgggcttcatgggctgggcccgcgggccgagccccgactgggcctgccgctgcatgtggagttgggcctggacgcgctggatctgggccgggctgagctgggccgggcccatgtagtggaacccgtggactccggccgaggagaagttcgccggcgccggcggcaagccgggatgaaacggcggcggcgcgatcttctgcatctgcggcgacggagcctctcccagcgcccgcatcagatttccttctatagcagctgccatcgaatatctttttttttgtggattttttctaacctaaaaatctgaataacaaaccacctgttctttccaaaatccaagaactggcagacgaaaagagaagttctagatctactaatcactttacaaggggggtataagctaagctaactagcacaaggaggtgtggaaaaaattaaccctcttggctaccaaatcagaccaataatcttacaccaagaacagatcagaacaccagaaactaaaaggctctggaactctctgtcctgtacaccaacagaagctcaaaaacaaaggaaaaaaaaagattgatcctcagatgaagtgatctacctgctggaagacccaagaactcgctcagatctacggctcacctacctctctcaaacctcacagagatggagtctgggtgattagggcttttggattggattaggctttctggatgtgtgtgttcttgatggctcggagtagtgggtctcagcctcctgctggcggattccttagcccctgccgtcggggagcggcccgtgcgcgcgaagcttcctcccgggccactgcactgtgggcccat

SEQ ID NO: 20952 - DNA, 2092 bp, Oryza sativa
  Clone ID: TF_OsC819_1
gcctccagggccggcagtgccggccgcccccctccccccccgcatgcctctccctctgcgccctccgcgtgagcggcagcaagtgttcactgcgttcttcttctcgatttatctttcttggtttcttgatctgtagcttattagcggccatgtgcggcggagcaatcatctccgggttcatcccgccgtcggccgctgcggcggcggcggctgcggcggccaagaagcagcagggcaggagggtcacggccgacgtgctgtggccggggatgctgcggaaggggaaggcggcggcggcggaggaggactttgaggccgacttccgcgagttcgagcgtggcatgagcgacgacgaggcggaggggggcggcggcgaggaggaggaggacgacgacgacgtggtcgtggtggtccccccgccggcggcggcgaggttcgtcgtccgtgccgcggccaaggcggcgcccccaactgcagatgggatgttgactacaaagcttgtccaacatgatggacctactgctagatcagcaaagcacaagaggaagaatcagtacagggggatccgccagcgtccctggggcaaatgggcagctgaaatccgagaccccagcaagggtgtccgtgtttggcttggaacatataacactgctgaggaggcagctagggcatatgacgctgaagcccgcaagatccgtggcaagaaagccaaggtcaactttcctgatgaaccagctgttgctcagaagctctccctgaagcaaaacgctgccaagcaagagaaactagctccacctctgaagacctgtggcgatgatgctttctttcagctaaacagttcagacaatgatttgtttgcaatgcttgcaaaggtgcctgcaaagccggcagagcctgttgatctcatgcctccagtcaaacctcttgcttccactgagacattcgagatgaacatgctctctgatacgagcagcaactcatttggctcttcagactttggttgggaggatgacaccctgaccccagactacacttcagtcttcgttcctaatgctgccatgccagcatatggtgaacctgcttacctgacaggtggagcgccaaagagaatgaggaacaactatggtatcgccgtgccccagggaaatggcatgcctaatctcgcacaaaacatgcccaccttcgatcccgagatgaagtatttgccattaccttatgttgagagcagctcagatgaatcaatggacaaccttctgcaaaatgatgctacacaagacggggcaagcaacgagggcatctggagccttgatgagctgctcatggcagctggtgcctactgaggagacgaaatgttctggtcagtgtggtctgtcactagcaaaccatgttgaatgtgtatggccaagatgaagagctggtgatgtctgctatgttttgtagagggatgctaccaaagtaatgctagaatattacaagctgctatcagctgtactctctatgacaatgtttatactatgtttgctgtatggtgtggtctatgatttgaagtatgttggagactgattcaaataactgccttggccatgtgtgtgctgtaatgtgcttattaagttatatagttgtgctcatattgcgtatctaaaaaaaaaaaaaaaactagagactagatctcccccccggcccagttctgcctgcccgggctctcaacagcccctccgtcgctcccgagatctagtgtttgccagtccctttcgttgagagcagctcagatgaatcaatggacaaccttctgcaaaatgatgctacacaagacggggcaagcaacgagggcatctggagccttgatgagctgctcatggcagctggtgcctactgaggagacgaaatgttctggtcagtgtggtctgtcactagcaaaccatgttgaatgtgtatggccaagatgaagagctggtgatgtctgctatgttttgtagagggatgctaccaaagtaatgctagaatattacaagctgctatcagctgtactctatataacttaataagcacattacagcacacacatggccaaggcagttatttgaatcagtct

SEQ ID NO: 20953 - DNA, 1599 bp, Oryza sativa
  Clone ID: TF_OsC45661_1
gcccgagcggcccgacttccgccccatagcatcgccaacagaaggaagcaagagatagttcgagtcgagttgagttgcatccgtacgtactggggtagaggagagtaggagtgtgctagtgtgtgaggtctactgaaatggacagctccagctgcctggtggatgataccaacagcggcggctcgtccacggacaagctgagggcgttggccgccgcggcggcggagacggcgccgctggagcgcatggggagcggggcgagcgcggtggtggacgcggccgagcctggcgcggaggcggactccgggtccgggggacgtgtgtgcggcggcggcggcggcggtgccggcggtgcgggagggaagctgccgtcgtccaagttcaagggcgtcgtgccgcagcccaacgggaggtggggcgcgcagatctacgagcggcaccagcgggtgtggctcggcacgttcgccggggaggacgacgccgcgcgcgcctacgacgtcgccgcgcagcgcttccgcggccgcgacgccgtcaccaacttccgcccgctcgccgaggccgacccggacgccgccgccgagcttcgcttcctcgccacgcgctccaaggccgaggtcgtcgacatgctccgcaagcacacctacttcgacgagctcgcgcagagcaagcgcaccttcgccgcctccacgccgtcggccgcgaccaccaccgcctccctctccaacggccacctctcgtcgccccgctcccccttcgcgcccgccgcggcgcgcgaccacctgttcgacaagacggtcaccccgagcgacgtgggcaagctgaacaggctcgtcataccgaagcagcacgccgagaagcacttcccgctacagctcccgtccgccggcggcgagagcaagggtgtcctcctcaacttcgaggacgccgccggcaaggtgtggcggttccggtactcgtactggaacagcagccagagctacgtgctaaccaagggctggagccgcttcgtcaaggagaagggtctccacgccggcgacgtcgtcggcttctaccgctccgccgccagtgccggcgacgacggcaagctcttcatcgactgcaagttagtacggtcgaccggcgccgccctcgcgtcgcccgctgatcagccagcgccgtcgccggtgaaggccgtcaggctcttcggcgtggacctgctcacggcgccggcgccggtcgaacagatggccgggtgcaagagagccagggacttggcggcgacgacgcctccacaagcggcggcgttcaagaagcaatgcatagagctggcactagtatagagttagcactattagctcgatcttctctagctagtgtcttttttgctcccatgcatcataattcaggtggtagctagcttagtcccttgttgatcctatctactaatctcacttggttttttttgttaatttattcgcccatgttcttgcttgctttgctgtaaatcttttcatcccaagtgtacactaatgaagcatagccctagaaggctagaccaactgacacacaagaagaagaagaaacatttgaaattatccatcaaaaaaaaaaaaaaaaaaa

SEQ ID NO: 20954 - DNA, 473 bp, Oryza sativa
  Clone ID: TF_OsC149947_1
aaaaaaaggaagggaaaaaaagagaggaaaaaacaaggggaggaaaaggaagagggggaagggagacgccactgccaaaccctagccgagcaccccctcccctcctcctcccccatcggagcctcctcgcctcgccctcgcccaccaagcccccgcgcgcgcgcacgtgcatccggcgatgcggaagtcgaagcagccgcagccgcagccgtcgccggagatccggtaccggggcgtgcggaagcggccgtcggggaggtacgccgccgagatccgggacccggcgaagaagaccccgatctggctgggtaccttcgactccgccgaggtggcggcccgcgcctacgacgacgccgcccgatctctccgcgggcccaccgcgcggaccaacttccccttggccgcgccgtccgcgcccccgccccggccgccggcggcggcggcggcggccgccacgtccagccacagcagca

SEQ ID NO: 20955 - DNA, 673 bp, Oryza sativa
  Clone ID: TF_OsC160593_1
gcacgaggctgcaacctggcaacgcgcacccacgtcggcgaagtgctcgatcactgcccccattggcggcggcgacgatcacccgcgaagccgccgccgccatagacaagcctacaagctgatggcgaggccgcagcaacgataccgcggcgtgcggcagcgccactggggctcctgggtctccgagatccgccaccctctcctgaagacgcggatatggctgggcacgttcgagacggcggaggatgcggcgcgggcgtacgacgaggcggcgaggatcatgtgcgggccccgcgcgcgcaccaacttcccgctcgccgacgccaccgcggcggcggcggcggccgccgcgtcctcgtcgttcctctccgccgcgctcgtcgccaagctccaccggttcaacctggcgtccgtgcaggccacgcagcggcagagggaggccgccgccaccgccgccgcggcctcttcggcctccgccacgacgccgccgctcggcaatgccgccgccgccgacgacgacgcgcggaccaccacgacgtacggcgcggaatggagcggcaggttcctcgaggagcagcacgtcgagcagatgatcgacgagctgctcgactccaacttctccatggagatctgctactagcactgtgtgacacacacacacacactctgttct

SEQ ID NO: 20956 - DNA, 219 bp, Oryza sativa
  Clone ID: TF_2799366
ggcacgaggaccccaagaagcggggctcgcgcgtgtggctcggcacgtacgacacggccatcgaggcggcgcgcgcgtacaaccgcgccgccttccgcatgcgcggcgccaaggccatcctcaacttccccaacgaggtcggctcccgcggcgccgacttcctggcaccgccgccgccgcccccgccgccgataacatctacccacggcaaacggaagc

SEQ ID NO: 20957 - DNA, 624 bp, Oryza sativa; identical to SEQ ID NO: 11214
  Clone ID: TF_OsC363381_1

SEQ ID NO: 20958 - DNA, 834 bp, Oryza sativa; identical to SEQ ID NO: 11215
  Clone ID: TF_OsC60460_2

SEQ ID NO: 20959 - DNA, 1110 bp, Oryza sativa
  Clone ID: TF_OsC267094_1
gtttatcggcatagatttaaagataatgacatgtcaagacctgacaaggaaaataaaagggattcaaaagcacaggctggtgatctgatggatgatggtggaatgtagctcggtcgccggcgacgtacggacggcggcggcggccgtgatttcatgtgcggtggtggcaaggtggcgagcccgccgggaccacgactgccgcggctcgccggcgccggcggcgaggaagaagaggaggaggcggcggctggaatgctgtcgaggcatggacaggcgagggagatgtctgtgatggtgtccgcgctggcgagggtggtcgccggcggcggcggcggcgaggcggaggagtggtggccgccggcgtacggcgcggcgccgctgccaccgtctacttcccctgcatctcacgagcacgcagcagccatggcggcagggcagtacgcgccggcgacgtcgtcggcgatggcgtcaccgcgcgagcaggcctcctcgccgtcgtccggcgacgccgccggcggcggcggcggcggcggcaggaagcggtaccgcggcgtgcggcagcggccgtgggggaagtgggcggcggagatccgcgacccggtgaaggcggcgcgcgtgtggctcggcaccttcgacaccgccgaggccgccgcgcgcgcctacgacgacgccgccctccgcttccgcggctgccgcgccaagctcaacttccccgaggacgccgcgctcctgccgcctccgcctccgcctcctgcgccggcgccggcgccgccgcagtcgcaggggatggtcggcgtcggcgaggagtactccgagtacgccaggttcttgcagggcgccggcgagccgccgcatttcctcgagcagataatggaggactcgcctcggccatcgacggcggccggcgcgtcgtcgtcgtcgtcggggcagtcgtcgtttccgttgttctacagcttcgctggacatgagcttggcggcaacgaagcgaaccttgcccgcccgccggagagcggcggcgctggtggtgacggtgggaggggctcctcgccgccggtgacttggccgggctatgggtggggtgcgccgccgccgtgggacccatcgagatag

SEQ ID NO: 20960 - DNA, 1387 bp, Oryza sativa
  Clone ID: TF_OsC143388_1
gttaccaaccattactctctcataaagaactcggagaatgcatgcttttacatccatctaacaaatctagtcctctcatcgttcttcctcttctaatttgcacccaaaacatgatcaaagaaaaagaaaaagaagaaaaaagagaaaacaatggagatgcatcccatattcccataccaccaaatctaatcaacgaacaaaagaaaaaagatcagagcagaacgcgatcagacaatctgcgacgtccatctccgtctctccgtctcatcccagccgtccgtgcttaccttattcttccagaagcgaaagagagcaggacagaatccggcggctactgcgtgtgcggcggcggcgggtggtggtgatagctcgactccgaccatgacgccgccgtcgccgggtagaccagggcgttctcccagttccactcctccgccgccgacatgctctggtgcgagccgccgtgggacgagtagtagttgcccggcgcggaggaggtggaggaggggacggtggccacggaaacagagggggtagggaaagagtagtaggagccgaggaagccgctcatggcgccgccgccaccgcctccgtagggattggtcatggagccaccgccgccgccgccgccgtagaacggaagaagggtgccttggttgggggtggcggtggtaagcctcccctgcagaagcatctggtagcgcaggtactcggcgctctgggaggcgccggggtagatggccgcggaaggcgatgccgccgcgaccggcgccgggggcggcgccgcggtggtggtggtggcggcggtcgggtagaggcgcgcgtcctcggggaagttgagcttggcgcggctgccgcggaaccggagcgcggcctcgtcgtaggcccgcgccgcggcctccgccgtctcgaacgtgccgagccacacccgcgccgccttgtgcgggtcccggatctccgccgcccacttcccccacggccgctgccgcaccccgcggtaccgccgccgcggcgtgtcgggcccctccgcgttcccgccgccgcccaccggcgagtggtgctcgtccatggtcgccgcgctcgcgctctgggtgtccgagctctgctccgatcctgcgaactccggcgatggcgcgcccccgcaggcgtatcccgccagctcgtgcattgcctgctcctcccgcctcctctcctgcacgccacgcgccgccgccgccgccgctgacgacgacggcgacggcgacgaccacgcccactggtcgccgtcgccgtcgccgccgccgccgccgccgcccgccacgacgcgcgccagcgccgacaccatcgtcgacatctcctgcgcctggtaataccccgacatgagctccgacgcccccgccaccgtcat

SEQ ID NO: 20961 - DNA, 230 bp, Oryza sativa
  unsure (1)..(230): unsure at all n locations
  Clone ID: TF_569065
ggcactacagaggtgttcgacagcggccatgggggaagtgggcggcggagataagggacccgaagaaggcggcgagggtgtggctggggacgttcgacacggcggaggacgncgccatcgcctacgacgaggcgncgctccggttcaaggggaccaaggccaagntcaacttccccgagcncttccagggccgcaccgacctcngcttcctcgtcacccgtggcatcccc

SEQ ID NO: 20962 - DNA, 783 bp, Oryza sativa; identical to SEQ ID NO: 11224
  Clone ID: TF_OsC407003_1

SEQ ID NO: 20963 - DNA, 2041 bp, Oryza sativa
  Clone ID: TF_OsC19777_1
ggcggtcgcggcgcccccgggctgcaggaactccgcgcgcggcgcctcaaccccaccccaagaacaccaaagccacatcccatcccatcccagtccacggtgaggttgagcgatctgagaaaaatcatcagcgacgagcagcaacaggtttgttctctgaacttctctgatctttttagaagcaggtaacacacaagaaaggtcctgtcccaagaaggtacttctttcgggtttattagatcgaaagaggagttcttgtgcgtacaggttctttctcatcccatcaacttctcctaggaggaacagagatccagagaaccttttttctcttctggattcttgccgatttttaggcttcctttgcttttctaaggccagaaagggttgttttgcaatacccttctagttcatcctctcaaatttttcttctttctattcaaaagctctttctttctttgcaccctttgtttctctacttttattgaggaacagggctgatttttcacttcttgcatccaaaaagcaccccttttttctttcctgtttttaagatttccatacccttgccatcttcatcttctacctccatccagtcctcatggccgcagcaatagacatgtacaagtataacactagcacacaccagatcgcatcctcggatcaggagctcatgaaagcgctcgaaccttttattaggagcgcttcttcttcctccgcttcctccccctgccaccactactactcttcttctccttccatgagccaagattcttacatgcccaccccatcttatcccacttcctctatcacaaccgccgccgccaccaccacctcgtctttctcgcagctacctccgctgtactcttcgcagtatcatgctgcttcacctgcggcgtcggcgacgaacgggccgatggggctgacccacctgggcccagcccagatccagcagatccaggcccagttcttggcccagcagcagcagcagagggccctggccggcgccttccttcggccgcgtggccagccgatgaagcagtccgggtcgccgccgcgcgcggggccgttcgcggcggtcgccggggcggcgcagtcgaagctctaccgcggagtgcggcagcgccactgggggaagtgggtggcggagatccgcctcccgaagaaccggacgcggctgtggctcggcaccttcgacaccgccgaggacgccgcgctcgcctacgacaaggccgccttccgcctccgcggcgacctcgcgcggctcaacttccccaccctccgccgcggcggcgcccacctcgccggcccgctccacgcctccgtcgacgccaagctcaccgccatctgccagtccctcgccacgagctcgtccaagaacacccccgccgagtcagcggcctccgcggcggagccggagtcccccaagtgctcggcgtcgacggaaggggaggactcggtgtccgccggctcccctcctccgcccacgccgctgtcgcccccggtgccggagatggagaagctggacttcacggaggcgccatgggacgagtcggagacattccacctgcgcaagtacccgtcctgggagatcgactgggactcaatcctctcataaacaagcagaagcagctactactagtctattactagtactagtagtagtcttcgtcaagctagagtcactcaactcaactagctgtgtaatcttctctgaattccgtggcttccatggctcggtggcattttagacgtcggccatggctgctgcgagtagcagtaactagtcagtactcagtagtagtaaggtcgttggtattacgtcgtcgtgcaagtgtcgttggtgtactcagtgatctgatctcctggttgagctgccggttgtttttttcacggcgcggccggtcgagaattaagctgtaatcccttgttacatgttggaaattcagtagcttatgtaactatatgtacctttctcaaaaaaaaaaaaaaaaaaaaatatgtgagtaattgtgtaaaaaaaaaaaaaaaaaaaaaaaaaaaa

SEQ ID NO: 20964 - DNA, 512 bp, Oryza sativa
  Clone ID: TF_uC-osflcyp143g12b1
ctccctctctctcttcttcttcttccttccctctcaacccgacgacccacgcgaagcgaactctcgcgcgagacgagagtagtaaaccctagaaacctagaggagatccccaccaccaccatgacggtggatcagaggacgacggcgaaggcgatcatgccgccggtggagatgccgcccgtccagcccggaagaaaatgtggaggcgaggaaagtactggaaaccttgattccgtccaaccgataggaaaaagcgaccacggagatcacgcgatggacctacttcagttgcagagaccatcaagcggtgggccgagctcaacaatcagcaggagcttgatccacagggtccaaagaaggcaaggaaggcacctgcaaagggttcaaagaagggctgcatgaaggggaaaggaggaccagagaatacacgttgtgacttccgtggtgtgaggcaacgtacctggggcaagtgggttgctgaaaattcggagcccgatcggcaaagtagactc

SEQ ID NO: 20965 - DNA, 1004 bp, Oryza sativa
  Clone ID: TF_OsC116_2
atccaacgtccgcctaaagaaaaacacgcacacacttcttctgcttccctccccttgtttccgctccacttcccttccaagcaagaaaaccgaggcttcagcttagctaggaccgaccgatccgatgtgcggcggtgcaatcatctacgactacatcccggcgcgccgccggttgtgcgcctccgacttctggcccgacgccgacgactccgacccccacacccccgctcccgagaaaccgccgcgcgcgaagagggagcggaagaaccagtaccgcgggatcaggcagcggccgtgggggaagtgggcggcggagatccgcgacccggtgaagggggtgcgcgtctggctcggcacctacccgaccgccgaggccgccgcgcgggcctacgaccgcgccgcgcgccgcatcaggggcgccaaggcgaaggtcaacttccccaacgacttcggcgccgcccccgcgccggccgcggcggcggcgaaggccgtccctcgcgtcgcgcccacgccggccgtgctcccgccgcccaagatggaggcggtgtccgagggcgccggcgcctgctcctccgacgaggtcaaggagctgtccgaggagctgctcgcgtacgagaactacatgagcttcctcggcatcccctacatggagggcggcgccgcctccgccgccggcgccgaggaagccgcggcgcccgccgggctctggaccttcgaagactacgagctgccgtcgctagcgctctagtaaaaatgtcacaataaaaatgacatgtatgtgaaaaaatttttccctacccgtagtaagtaaccagtgtctttttttaccgtactctatgcgttatttttgttgaaattaatccattgttgaagttgtaactgtgcatggtcggcgccagtctcagtgaagcttttgctgaatccaagtttttctctaatgtaaatatgaaatttccagttaactcagcttgaaattctaaaaaaaagtgctaaaagcactatgg

SEQ ID NO: 20966 - DNA, 726 bp, Oryza sativa
  unsure (1)..(726): unsure at all n locations
  Clone ID: TF_8955884
ggatcggcacgagcggcgacaccatagtcttctcccgctcggcgtacggccccgacaagctgctcttcatcgactgcaagaagaacaacgcggcggcggcggcgcaacaatcgtcccggtacaanggggtggtgccncacccaaacnggangtggggggcgcaaatctaccaacggcacncncgggtgtggctcggganattcccccacaaaaaagcggcggcgcgggcctaccanatngcggcgctccngtnccgggggcgcgacacngccaccaacttcccccgggccgcggcgtctgncgcccaaactcccgttcctctccgcgcactccaaggncgaaatngtccacatgctccngaancacacctacccccacaaactccccaagggctccccccnggcgccgcatnggcgcccncccccanccacccgtcctgggcgcgcgaaccnctgttccaaaaaggcgtgacacccancnaatncgnaactcaacncctccttgtgccccagcacaccccaaaaaaantcccctcncccgcgggaantccaatccnctccnccncncacggnaaggggtttnctcacttcaaganggnaaggaagttnngatccgtcctatgaaacancaaatctttacaaggtgacatctagaagcccccgcaaagcacaacgncacacttagttcctatcgggatcacgaagggaaggaatcnnaagactttcc

SEQ ID NO: 20967 - DNA, 1421 bp, Oryza sativa
  unsure (1)..(1421): unsure at all n locations
  Clone ID: TF_OsC164210_1
atggataaccacgccgtcgcggtccagcaacgcgacacggcgccccggccccgcgcccgcgcgcgcgcctccgtatccagtatccagggggggggggggcctggctgggctgaccacgtcgccctcccacgcccgccacgttgccacccgcgccgccctcccaccccatgtcggcgaccgctcgcgttcgcgtcctcctccatccatccgcatcgcgccgtgctgccaagcggcgcgccgcctcacgtgtcggccggggcgcgcgacacgggcggcgcggcggggctcgcgcgaccccaccactcatttccccaggagaaaaagccgaagccaagacacgcaggtgtcgcctcgcctcgcctcgccctcgcgccgctgcggaattccgcgaggatggataggagggaggccaccgtcttcttgcccccgccgccgccaccgcagccgacgcagccgcagcagcagcctgcggcggcggcggtgagggctccggtaggcgggaggggtgggggaggagggaggcagtatcgcggggtgcggatgcggaagtgggggaagtgggtggcggagatccgcgagccgaacaagcggtcgcggatctggctcggctcctactccaccgccgtcgccgccgcgcgggcctacgacaccgccgtgttctacctccgcggccgctccgcgcgcctcaacttccccgaccagctcgacggcgcgggtggtggtggcgcgggcgccggcggcgccgaggaccacagggagctcaccgccgccgtcatccgcaagaaggccgccgaggtcggcgcccgcgtcgacgcgcagcactccgtcgtcggcgccgcggcgcccgtgccgctccagccgccgcagcccccgccgccccagcgccgccggaccaagaaccccgacctcaaccgggagcccaccccggacacctccgacgacgagtagtaatccgagctgattttgcctcccttcttccatccatctagttcgtagtccttagccaccccaagacacagagagagagtagcagctagtagctatagctagtcagcgaagcggatagcgccaaggaggcggtcgtggacgggggcgcacgcaaggtgttcggcgaaatgcgattgaggtcggaggagcccacaagtatatccaataatggagccgcgacgtcgccgtcaagccggggaagtggtggttagcaagtaggaatctagagctcagctcgtcgtctgttccggcgacggcgactgtactaggagcgtgcgtgtcagcgtgagcatgtagctaaaagcaagacggctatgtacctcacccttttcgcttaagcgttggtttgtaaagggaaaatacccagcaagcaagacaaaaaaagctgcttcaagaanctctcgaatcaaaaaaaaaaaaaaaaaaaaaaaaaa

SEQ ID NO: 20968 - DNA, 1516 bp, Oryza sativa
  Clone ID: TF_OsC3461_2
cacacttcgtccgcaaaagcgtccacgaacacgttaaaaaaaggtcgaagagaagtgggagacccaaaccgcgaacaatgtgtggaggcgccatcctcgccgagttcatcccggcgccgtcgcgcgccgcggcggcgaccaagcgggtgaccgccagccacctgtggccggccggctccaagaacgccgcccgcggcaagagcaagagcaagaggcagcagaggagcttcgccgacgtcgacgacttcgaggccgccttcgagcagttcgacgatgactccgacttcgacgacgcggaggaagaagacgaaggacacttcgtgttcgcgtccaaatctcgtgtcgtcgccgggcacgacgggcgcgcggcggcgagggcggcgagcaagaagaagcgggggcggcacttccgaggcatccggcagcggccatgggggaagtgggcggcggagatccgcgacccgcacaagggcacgcgcgtctggctcggcacgttcaacaccccggaggaggccgcacgcgcctacgacgtcgaggcgcgccgcctccgcggcagcaaggccaaggtcaacttccccgccacgcccgccgccgcgcgcccacgccgcggcaacacgagagccaccgccgtgccaccgccggcgacagcacccgccgccgccccgccgcgcggactgaagcgagaattctcgccgcctgctgagaccgcgctacctttcttcaccaacggcttcgtcgacctgacgaccgccgcggcgccgccaccggccatgatgatgacgagctccttcaccgacagcgtcgccacgtcggagtccggcgggagccccgccaagaaggcgaggtccgacgacgtcgactcgtccgagggcagcgtcggcggcggcagcgacacgctgggtttcaccgacgagctggagttcgacccgttcatgctgttccagctcccctactccgacggctacgagtccatcgacagcctcttcgccgccggcgacgccaacagcgcgaacaccgacatgaacgccggcgtcaacctgtggagcttcgacgacttcccaatcgacggcgcccttttctgactatcactagaccacggagccggatagggagcacatgaagaagacggtggggatgtttagatccacggccatgttcatatcacagacgatggctcccctgaagcaccaatgttgcatgcagctgcgagggatgatgcctcagtgcaactgtgacaccagttaccagatgatgcagagcatgcaacaagttatttgtgctggactcgggcagcagcagatgatgatgaacatggcgatgcagatgccatacatgtgcaacatggcccctgtcaacttccaactctcttcttgtggttgttgttgatcaaacgttggttacatgtactctagtaataaggtgttgcatactatcgtgtgcaaacactagaaataagaaccattgaataaaatatcaatcaatttcagacttgcaactattgggtatttggatttcc

SEQ ID NO: 20969 - DNA, 622 bp, Oryza sativa
  Clone ID: TF_OsC160593_2
tcactcctcgctctcccgccgcgagcgcgcgctctctctcgccgcgaccacgcgcaatccgtcgccgagctcgaggacgtcggcaatggcgcggccgcagcagcggtatcgcggcgtgcggcagcgccactggggctcatgggtctccgagatccgccaccctctcctgtagtccagcgtcgccctgggcacgttcgagacggcggaggacgcggcacgcgcgtacgacgaggcggcgcggatcatgtgcggcccgcgcgtgcgcaccaacttcccccacgacgtcgccgacgaggccgcgccgccgccgccgccgcacagcgccgccgcagcctcctcgtcgttcctctccgcggcgctcgtcgccaagctccaccgcttcaacctcgcctccgtccaggctgcgcagcgcggcaacagcaacgacgacgactccaccacctcctcctccgccgccgcgtcgtcgcgcgccgtgattccgtcccttcccgccgccgccggcgcattgggcaatgcggcggcgacggcggagtggagcggcgggttcctcgaggagcagtacgtggaccagatgatcgaggagctcctcgactccaacttctccatggagatctcctgctga

SEQ ID NO: 20970 - DNA, 2434 bp, Oryza sativa
  unsure (1)..(2434): unsure at all n locations
  Clone ID: TF_OsC1774_1
ccgccgccagctttgactagcagctagcaagtgtacacacatctataaattgtagtaaaccaccttagctgaggtgatggccatggcgatgatgagaagggtggtgatggtggtggcggtgctgtgtgcggtagcaactatggccatggcacaagaggcgtccaacgtgcgtgccacgtaccactactaccgtccggcggaaaacaattgggatttgggggccccggccgttagcgcgtactgtgccacgtgggatgctgacaagccgcttgaatggcgccagaagtatggatggaccgccttctgtgggcccgttggtcccactggtcaggatgcatgtggcaaatgcctcctggtgacgaacacggcgacaggggctcagatcactgcgaggatcgtgcccacgcgtccgcccacgcgtccgcccacgcgtcgaaccgattgagggaaaaaaaaagagaaaaagaaaagaaaaaaaagaagaagaagagagaactcgaactctcgcctaccatttcgcccccctccgcaagcaatccaccactgcatcggcggcgagggctcaccggcggcgagccatgtgcggcggcgccatcatccaccacctgaaggggcacccggaggggtcgcgccgggcgacggaggggctcctgtggcccgagaagaagaagcccaggtggggcggcggcgggaggcgccacttcggggggttcgtggaggaggacgacgaggacttcgaggccgacttcgaggagttcgaggtggactccggggactcggatttggagctcggggaggaggacgacgatgacgtcgtcgagatcaagccggccgccttcaagagggccctctccagagataacttgagcaccattaccactgccggatttgatggtcctgctgcaaagtctgccaaaagaaagagaaagaaccaattcaggggcatccgccagcgcccttggggtaagtgggctgctgaaatcagagatcctcgcaagggtgttcgtgtctggcttggcactttcaacagtgctgaagaagctgcaagagcttatgatgctgaagcacgcaggattcgtggcaagaaggccaaggtgaattttccagaggctccaacaactgctcagaagcgtcgtgctggctccaccactgctaaagcacccaagtcaagtgtggaacagaagcctactgtcaaaccagcattcaacaatcttgccaatgcaaatgcgtttgtctacccatctgctaacttcacttcaaacaagccgtttgttcagcctgataacatgccatttgttcctgcaatgaactctgctgctcctattgaggaccctatcatcaactctgaccagggaagcaactcatttggctgctctgactttggctgggagaatgataccaagacaccagatattacatcaattgctcccatttcaaccatagctgaagtcgatgaatctgcattcattaagagcagtaccaacccaatggtccctcctgttatggagaacagtgctgttgatctgcctgatttagaaccctacatgaggttccttctggatgatggtgctggtgactcaattgatagccttctcaacctggatggatcacaggatgttgtcagcaacatggacctctggagctttgatgacatgcccgttagcgatttctattgaggaattcgaagtcttctagtcggagcatgtacacagggaaaaaaaaggaataaatactattggagattgggaggcacctgcatggcaccttgggggtagcatatcgttatgtttagcttagatgcaaaaggctgcatcctgaaactctttggtgattggacctgttccctatccgctgtctatgtatggcagccatctatgagactcaagaactgcttttttttttccgttctagttttctgtcgttgctacctgtatatggctatgaacatcgtgaatccatggccattatgttttaatctatgttgttgactgctctttctttcggtctttgctgtgctgcgctatgttggtgataactagctaccatattgattttctgtacataattcatttgttgaatccgaaattaaatagtgcattgactatatatttatatattatatgtccacagccacgcccaaggctaccagaagggccacctcatccgccagtaccagctcgaaccctgcgcgccacaccagcagctacccctatctacccctcctatcacttcccctactcccacccccccctccgacgcgcccgcattcctctannnnnnnnnnnnnnnnnnnnnnnnnnnnnnnnnnnnnnnnnnnnnnnnnnnnnnnnnnnnnnnnnnnnnnnnnnnnnnnnnnnnnnnnnnnnnnnnnnnnnnnnnnnnnnnnnnnnnnnnnnnnnnnnnnnnnnnnnnnnnnnnnnnnnnnnnnnnnnnn

SEQ ID NO: 20971 - DNA, 1138 bp, Oryza sativa
  Clone ID: TF_OsC1713_4843
tttttttttttttttagatggaagatttatgatgtatatatgaattgatttgatgttataacagcaggggcaccaagggcaggagtactgctgatgaaccactgcattgcctcttcatcaagaactgcctcttgccccatttccacctgcctctcccgcttcctggcaatctgccgccgccgccggtgatgtccatgcctgaacagcctcactgacgctgtgttgcttcgcctgcttgtaatttggcttctcgtcgccggtggcctgccgccgtgtttgttcttcttgcagtcgatgaagagcagcttgtcggggccatactgcctgagccggagaaggccacggtgtcgcctggtcggaggcccttctccctcacgaatcggctccaccccttggtgagcacgtaactctggctgctgttccagtacgagtaccggaatcgccacaccttgccgtcgccgtcctcgaagttgaggagcacgcccttgccggcggcgtcggagctgtggcggcggagcgggaacgggaaatgcctctcggcctgctgcttgggcaccacgaggcggttgagcttgccgacgtcgctcggcgtcacggccttctcgaacagcggctcgcgcgcccaccgcggcgtcggctgcgcgcgcgagccgcggcggaggccctgctggagctcgtcgtcgtaggtgtgcttccgcagcatgtccacgacctccgccttggagtgcgcggccaggaacgcgagctcgccggcggacgcgccctccgccgccggggcgcggttggtgacggcgtcgcgcccccggaagcggagcgccgccacgtcgtaggcgcgcgccgccgcctcctcgtcggggaacgtcccgagccacacccgcgcgtgccgctcgtagatctgcgccccccaccgcccgttcggctgcggcaccacccccttgtaccgcgacgacggccgcgtcgccgtcgtcgacgacggcagccgcagctccgccgcctggacgacgtggatcaactcgtcttcctccattgcggccaactcctcctcctcctcctcctcttgctttgaatcggtcgtcgacgacgacccaccggagccggagttgcaggagaagacgaccatggcagcttcttgctccat

SEQ ID NO: 20972 - DNA, 860 bp, Oryza sativa
  Clone ID: TF_OsC6641_2
tcaattccaagaatctgacgactgtgggaaccagctgagcccgccttcgtccagctgcatcaggtcttgcaagccttcccagagctggtcccctgtctcgccgccgccgccgccgccgccgcctcctcctccctgcggccaccgcgtgtgctctacttgctcgtcggcgtctgcgctgcgcggcgacggagacaatgtgtcggacttggcggcggcgctggcgtcgccattgctgtcgtcgtgcgcggagagctgctcggggaacgggaagttgagcttggcgcgcgggccgcggaactcgacggcggcgcggtcgtacgccctggcggcctcctcggcggtgtcgaacgtccccagccacttgcgcaccgctcggcgagggtcgcggatctccgcagcccacttcccccatggccgctgccgcacgccgcggtacttgttcttcttcttcctcctcctcctctgccccgccgcggcgccagccgccgccgcggcggccgccgccgccaccttctccgcgccatcgaacgacaccaccccggactccccggcgaagaactcgcacccgaggcactggtccatcccgcaaaccccgcacacctccgcgcgcgccgccgggaacacctccggcggcggcgtcctgtagccggagatgacatggagcagcgtcgcgacgatcacagagtgctccctctcggccgagatcgccctcccggcgaagggacgcggcggcggcagcggcggcggtggctctgcagtggcggagctcggcgaggcatcgtcgatgtggccgtcgaatcggatcatgtactcctggttgcctcccatggcggagatccggttggtcatgtgagttatgt

SEQ ID NO: 20973 - DNA, 2183 bp, Oryza sativa
  Clone ID: TF_OsC48348_1
tcaggcggttggcgggaagtagaaggggtgatccgccgggaacggcggctgccggcgggtggcggcggcgacgccggcgccggcgccggcagagaatcctgatgatgctgcagcgtggagcaatggcaagtgagaaggggcctgcatttgccaagcctgtgttgggaacggcatggggccctgctcagcccggcgggccgttggcctctcctgtaggttcgggaggaagccaagacaatgagatgggtacaaacgttgatgctgagggggcagtggtgtgctttggtgatgcacagtccattggggagacgagcccattggctggtggactgtaatatttgaagattcaggggaatcacaagttaactggaggccagttgtggcgacatcgcttttggagtcacgcgcattaggttgcgaaatccgcaaatccaaatcaagatcgccatcaacaattgcctcatttccggcgtctggtaaagcatccacattgtaggatgcaggtcggctccggcggcggcgtcgataggagcctttggaacattttttgggcgttttatgtgtggatgcaaatacagtcatgaatcccaattaactaatcactacaagaaacacccggccgcccgccggcgcagacgaaaacgttgaaacgccgggacggccagaaaaaaattgccggttcccgcaaatttcagtgggtgatggcttcttctttttatcaaggtggtggtgatggcggcttgacgacgaagacgacggcgccgtcgggtcgaaccggagggtggcagtgtgttgggcagcagctgctgtcgtggcggctttggagaatcctgatgatgctgcagcggaggacgacgacggcgacgacgacgaggaggagaagaagggcaatggcagcgtgtgaggaggagcagggtgatgatggctcacctgcttccatgcccagcttggaacagctaccccctctgatggcttcctcttctgatccgatgatctggatgcatcctcattatttgggaataggggatgaggttgggcagtccagattggcggatgctcggtcagaagagggaaccgatgaggacggctagcaagttcagagggagctgcatcattctttgctctcttgaattcagaaccttcaaatgatccatggtggatttgcaggccaagggagccgctatccctcttggggctctgctgtgaggctgcaggctgagatatgctcaggttcagatccacatcggctccttgagcagcagcatcagtaggcagctcaccatcatatgtgctgggctcgaagttggtgacggcttctctgccattgcatttgatcgcagccttatcataagctcttgcagcttcaacttcggtgtcaaatagcccaaggtatatgtacttcttgccaaggagttggcccatgcgtgcctcccagcggccgcacttgtggagggtgacacccctgtactttgagctgccgcgggagaagccggtgctctgtcgccggagaacgtgcacgaactcctccttggacaagctcttcatctgcctcatgtcctcctcgtagtcgctcaggttgaagttgatgtcagcctctactcccctgaacttgatcgccgccctgtcgtacgcccttgcagctgcgtgagcagtgtcgaatccacctaggtagacttgcttgccgcaatcccagatgtgggattcccagcggccggtgcggcggtagaaggtgacgccgcggtattgcgagctgcgagagcgcggcccgcggcggcttttcttggccgcctgaggctgcggctgcggcggcggcggcggtggcgccgggggaggcgcgtgggcgaggattcgtgtctggtgtggcacggccgctgcgcgagggcggcatcctccgccgcgcggcgcggcggctgccacgccggcgccggcgacggcgccgcgggaggcggaggcgggaggagctgacgcgtcacgatccccgaggcggccggcaactgatgctgctccccggagcactcgtcgtcgtcggggctgctcgcgaggaggtcgaaccggaataatcctccgccaccgccaccgccaccgccgcctccggcgtccccggagtttagcaccgaggagcggcttcgagcggtggcgaggcaggagcagcagcaaccacagcaccaggtggtggtcgccat

SEQ ID NO: 20974 - DNA, 2125 bp, Oryza sativa
  unsure (1)..(2125): unsure at all n locations
  Clone ID: TF_OsC34060_1
cttcgcttcgcttccaaatcgcccgcaatttcncccccaaaaacctcccctccccccaccaccaccattaataaacccctcctcctcctcctcttctccggccggggcctcgccatctcaccgccaccgcctcctcactcactcacttcctgccacgtcattcgcgccatcgatcgcgtcgtcgcctcagctgcctagaggaagaggaggagtagagctcgtcgtctccgccgccgcagctggtgctcgctgttgatttatgtcgcctgctctaccccccttctccatggttctgagctccagtcgccgccaacggtttcttcctgctcccttctcatcctcctccttcaaaattggtatacgaggggcgcaagaacacagcaaaatcccttcacgatctccagatttggatttggggtgaaatactttggctttcttcatttagactggtgacaattgaagatagcccccaaattgccttaagatttggtttggcttgagtggatcaagtacagaatccgaacttttgcaacctgacattcttctagttcacaaagtcggccagatttgagatttctctcggacatctctgtacacacaggagctctcttttgctccagttttaaacagaagttggacaaaggctctgtttctggttttttgagtttctgcgataagcttagagagcagacaacaaacttttgtcctgattcatctaaactcttacctgactgcaatcaaggccaattgtaatccaataatctctgatcttgttctggttgcacgttgagatgatggtgccctcttcacggaaagtccgtgttttctgctctgatcctgatgccactgactcctctgatgaagatgaccagaataagaaggaaaggagattttcaagggaaatactaattccaatggaaaactccaaggcatccaaacctgttaagacccttgttcaatgtggcacaaagactgtaaaggattccgagaaggaaccgacgagcaaatacaggggtgtgcgccggcgggcgtggggcaaatgggctgcagaaatacgtgaccctgtgcgaaaatcaaggaaatggattggcacatttaacagtgaggaggaggccgctgcggcatatcttgcacaatcaaaccagttccatgaagagttgatggccttgaaaatccaatcttctgtatcagagcaggaagatttgtcaagctctgttactatatcctgcgtgtcctcatctcagtcatgtgaccagaagattcaggcaaagccacaagaacacaagagagtgtcagtggtggttaaccgtgagaccgttgagcagaagtttaaggcacagccacaagctcagaagattaaggcacagccagaagtgcagaagagagtgtcagtgaagattagccatgagactgaggatgagcacttgctgaacttgccgtccacgcctaaaggcaaagagatttcgatgggcgctgttcttggcaggatagatgagattcctgtgagcaactgtgtgggccatattgatgaatttccacctgatgatttcactaggcttgcagatgcgttcccagttagtgattttatcggcatggcagatgtgccactgggcgatgattacattggccttgcagacatcagccacctgccgctgcctatcacagatctgaagttcgacctcaatgcagaactcaactgggacgggttcgactttgcttcattggaacaagaactcaactgtctttgatggcttgaatcctgttctatgtgaaaacctcttgttgattgaattgagtgcaggaggtagattcaggtatccatctttcacattgctggcaggccgagtgtatgatctggagattttcatctccaattttgccggaaaattgtacagtccccctacagcaaacaaatgagtaccgcagtatttatgtatatgttcaccaatctcaaaaatgttaatgagattgtggtgacagaccgtccttgatctcagtttggttgtgtatttgttggacgccattattatatttgttaattttgatattgttcttgtgataaagaagttatgtacaaatgtaaatataggcctgataaaatccagttattgtaaataaccttact

SEQ ID NO: 20975 - DNA, 1163 bp, Oryza sativa
  Clone ID: TF_OsC111_3
cccaagcatcagcatcacaacccaccaatcgaatcgatcgaacaagacacgacaccatgcgccgccgcgtctcctcctcctcctcctcctcctcgtcctcgtcgccggcgaggcatcacaaggcgcggcgcagcaggaggaagctcgccgtcgacgaggactgggaggccgccttccgcgagttcctctcccgcgaccacgacgacgacgacgacgaccacgacggtcagcatgtcgttgttgcgccgttgatccgtggtagtgacaagtgcgtccacggccacgaggtggtggcgtcgacggtcggcggtggcgcaagcggcggacgacgacgagccgacgacgacgacggcgagcggcggcggcggcggcggagggagaagcggagctacccgtaccgcggcatccggcagcggccgtgggggaggtgggcgtcggagatccgcgaccccgtcaagggcatccgcgtctggctcggcaccttcgacaccgccgagggcgccgcgcgcgcctacgacgacgaggttcgccgcatctacggcggcaacgccaagaccaacttccccccatcgccgcccacgccgccgccgccggagaagccagcggcggagaggagcccctcgacgacgccgacgacgaccacggaggactccggcgactcgcgcatactcatcgagtgctgctccgacgacctgatggacagcctcctcgccgccttcgacatgaccaccggcgacatgcgcttctggagctaacgaacaacagagcagattcagggcaacataaacggcacgtttttgcaaccttgacatgcgactcgcctaataatcttgtcaaacaagggccgccagcttaattagctttttccaaaggtggggaacaattttgggggatgcaattaggacgcacagagatgaccccaacttgtcaatgggaattgaactctgatgacctttgtaatgataatcaaggcaccacattgtggggttaagcaaagttttggcaaattagctttgccttgcaggaataaatcagcatttctttttttttcctttcactggaccccaataaggtaatttgcatacatatgtcccatggatcgaacaatatgaaaagtaattgtatagtgttggttgcagaggttatcaacacttattcgggtt

SEQ ID NO: 20976 - DNA, 987 bp, Oryza sativa; identical to SEQ ID NO: 11235
  Clone ID: TF_OsC393619_1

SEQ ID NO: 20977 - DNA, 957 bp, Oryza sativa; identical to SEQ ID NO: 11236
  Clone ID: TF_OsC393619_2

SEQ ID NO: 20978 - DNA, 1497 bp, Oryza sativa; identical to SEQ ID NO: 11082
  Clone ID: TF_OsC917_2

SEQ ID NO: 20979 - DNA, 225 bp, Oryza sativa
  unsure (1)..(225): unsure at all n locations
  Clone ID: TF_3106746
ggccatgggggaagtgggcggcggagataagggacccgaagaaggcggcgagggtgtggctggggacgttcgacacggcggaggacgccatcgcctacgacgaggcgtccgttcaaggggaccaaggccaagctcaacttccccnagcncntccagggccgcaccgacctcngcttcctcgtcacccgtggcatcccccccccnnnncacccacnncctacncct

SEQ ID NO: 20980 - DNA, 1245 bp, Oryza sativa
  Clone ID: TF_OsC2775_1
ttttttttttttttttttactgcaataattttctactatattttattctaatcgaagaacatgtctatatctcacatcaaaggtcttatttagatgcaacatactaattccacaacaccttatcgaagcctaccatactgcatcacatatatcagcaaccataccgtatatacacatcataaccttaccaaatcaggtcacatgcagagtcatcttcacatcataagttcaatactaaccaaaattacacaataccaagtttccaatgatgctatgcataacaataaagctgctaacgatagtaattacggataattggaccctcaggccccgccaacttcttccacacaggcggacacagcatggaaggcacggacacgggttccacagcccgatcgcttcttacgcttgcctgaaatcatcgtccacattggctccggagcaagcacctggacctcacagctactggcctcctccttgacccgaccgccacagctctcaccttcctccttcacccgtggaagaagggtcggcttagctgtcccaattggcaaggtgattggcctcacagctgcttcaggcggtgaaatagttggcttgggtagctccggcggcagcgagtagcagcggacggaggcgaagttggtggcggcgctggaaccgcggaggcggacgctggcggcgtcgtatgcggcggcggcctcctcagcggtgtcgaaggtgccgagccacaggcggcggcggaggtgagggtcgcggatctccgccgcgaacctcccccacggccgctgccgcacgccgcggaaccgcgcggtcggcctcgcctcccccgcccccgcctccatcacgcggcgcttcacgcccccaccaccaccaccaccaccacccaccttacccctccgccgcggccgaggctgcgccaccgcaaccgcctcgtcctcgctggaggacgagtcggtggcgtcggcgtcgcgcacgaggatacgcaccacgcgtccccgcggcgccgcccccgccgccagctcgtgcaggctagggtttgtacccatgcctcgggaaacccacctcaatccatacagggtgttcgatcgatgtggctacgcgtagcctccgcgccccgccatgggagcgtggggggtggaaggcgaggtgggggggctagggtttagggttagggtttggttccgatcgatgcggcggcgtgcggcggggtggggttgcaatggaagcgcactagtttagagc

SEQ ID NO: 20981 - DNA, 993 bp, Oryza sativa
  Clone ID: TF_OsC143164_1
ctagacggcggccacggcaacgtggccgcacgggatagacgatgccgtggcgtacaggctcgccgccatgccgtcgcgctggacgcagaagctgccgtcgtcgagcatcatgatctcccgtaggccgtcccagatctcctggtccttcgccgccgccgccgtcctcgcgtgctctggcgcgtgcaccggcgacgacgcgttcgagccgcagttctcacggaggttgtgatggaggagtggacgtggctgctgcgcggccgtggacgccgggaagttgagcttggcgcgctggccgcggaactcgagcgcggcgacgtcgtaggcgcgcgcggcgtcctcggcggtgtcgaacgtgccgagccacttgcagacggcgcggcgcgggtcgcggatctccgccgcccacttcccccacggccgacgccgcacgcccctgtacctgctcccctcgccgccgctccgcctccgcggcctcctcttgcccacgccgcccgtcacgccgccgctggccaccgcgcccgtggtgcactccccctcatcctcctcgtcggtagccgcaccggcaaccacggtcgccatcgtcggctccggcagcagcgtcggcaccgtggtgtcaccggacacgacggagatgagcgcgcggatgaacagcgagtcctcccgctcgctgttggggagatggaacccgccgccgccgcgctccaccctcggcaccatggtggtgcgaaacggtgcatctccagcgagacgcacacggagacgacggctgctgggctcgcggggcacgttctcatcgtggggtgggaactggtgcggcacaagggagagacgggctaggacggcgctgtcgccgtcgccatcgacgtcccgccgccgcgcgcgtcccatcgccgctgccgcgccgcgcgccgtctcgtcgcctcgcgccgcgagcccgcgccttgcgccccgcgctgcgccgctgccgcctgctgtgccgcgcgccgtcgccat

SEQ ID NO: 20982 - DNA, 2434 bp, Oryza sativa
  Clone ID: TF_OsC1639_1
ttttacgcgtggggccgttttggtcggggttttagcgagcgcgtgggaggccggaggcgacgacgacgaccgcgccgccgtcggagaagaaggccgcggaagcaccagtaccagcacccgtatatgtcttctagccccttctccgatctggtggtagtcgtgctcctcgtctgcgccgtcgtcgccgcagccgtcctcctccccctcgtctgcgcccgccgatctatgcaccagaggctccacggctggaacaagtccacgtcgatgctcagggacgggttcggggtcaagtattccgggttcctccacataaggccgtgtggtttctgtcgaggagattgacggattcgatcgattcgtgttcgtctccgtcaaatttttgcacaagagaaaaaaaaagtttcccccttttagagtttttccccttcagttttgtcagttttggtgaggaattttagagttcttttccggcaagagttagaagaagagagaaatggccccttccaagcagcagcagcagctgatgctcctcaagaaggtgatggcgaagaagcccaagacgaagaggctatccgggtttggccttaaaccctctgctgctttctccaggccccatgtgccgtcggcggcggcctccctgcagccaagccgtcgcgtccgcgtcgtgttcgaggaccctgacgcgacggactccgactctgacgacgacgaggacgccggcgccgcctcaaagaagcgctactttgagctcttcattggcaagccagcttcgtcgacgaagcaggcctctccggcgtccaccgtcgctgcctacgccaacatcggcaaggttgggagcacctgctaccgtggtgtgcgcctccggaagtggggcaagtgggcggcggagatccgcaaccccttcaccggccatagggagtggcttggcacctttgacactgctgatgcggcctccgccgcctaccagtctgcctcccgcaacttcgccgaagagaagcgccgccgtggtgtggcctcctctgcctcacctgctagttcggcgacccctactccgactgcgtcctcgtcgtcctcgacttctgccgcgccattcgcccacccttcgccgtcgtctgtgctcgaagccaccaagccagctccaaagccagagtcgccgccgctgccggagcaagctgcaactcccctcctggtggaggctaccaacgagaccgccgagctgccggatgacccagagttctacaaggatatactgcgcggtctacagctgccggacattgacccgatggatttccgagctgggctggatgctctggatatctccgatgtgccggcttacatgaatggcgaacaagacgtactcttcactgaggacatgctgcttggagacttcgctgaagaagatgacctcgacctcgacgacatcggtgatgacttctgcgaggatttcccagagatacccagcggctacgacttcggccgtggtgatatgttccggcaggtggatttctgcgtgtgaattaagagcttgctaaagttattcatgttggtgtgatgggcctgtgagtgtgggtgcttgggaggagatttcttgggttttttccccgagcaaaatcaatctgctcgtgcccttgagatttcagttccgcccataagaactccaacgcacatttagcattcggagagtaattttgttaggttaaaagtatggtaagttataggtggtatgttatgtttttctttttcttttctcaatgttatctggtacctaagtttgtcaagaaaatcatagtggacaagtcaagtatttggggctgtcgtctctgttatggaaagaaaaataagtttttgattacacgataaaaaaaaaaagtcaaatttttgcacaagagaaaaaaaaaagtttcccccttttagagtttttccccttcagttttgtcagttttggtgaggaattttagagttcttttccggcaagagttagaagaagagagaaatggccccttccaagcagcagcagcagatgctcctcaagaaggtgatggcgaagaagcctaagacgaagaggctatccgggtttggccttaaaccctctgctgcttctccaggccccatgtgccgtcggcggcggcctccctgcgccaagccgtcgcgtccgcgtcgtgttcgaggaccctgacgcgacggaccgacctacgcagttttgacaggatctatgcttcgtgttgccgatcaggagtatactactgctactatccctctggctattgccgcttacggcgaagacaaaacatcaaaatcgcaaacgtgtccatatactactactgctggtgacaagtccgtcctcctgcgagaagatccaaagctgccgcgtctgaccgaccagctgccggtcgacatggtgagctccgcccccgatttctcaacgttttcctga

SEQ ID NO: 20983 - DNA, 703 bp, Oryza sativa
  Clone ID: TF_OsC257865_1
gcacgagtcccctctcctctcgccccccgcacgaggcccattcccaatccccaccgcctcgattccgattcccatctcctcgattcccgagcttggcgcgggcatgcgtcgcggcggcgcggcggaggaggacgcggaggcggcgaggttccgcggggtgcggaagcggccgtgggggaggtacgcggcggagatccgcgacccggcgaagaaggcgcgggtgtggctggggacctacgactccgccgaggacgccgcgcgcgcctacgacgcggcggcgcgggcgctgcgcggggccaaggccaagaccaacttccccctctccctcccccacgcccaaccccagctccaccaccaccaccaccaccacctcacctaccccgccgccgctgttgtcgccgctaggccggccactagcagcctcagctccaccgtcgagtcgttcggcacccggccgcggccggtgctcccgccgcggccgcccccgccgccgccgatccccgacggtgactgccgcagcgactgcgggtcgtcggcgtcggtggtggacgacgactgcgcggacgccgccgcctcgccctcgtgccggctcccgttccagttcgacctcaacctgcctcctggtggaggcggcggcggcggcggcggctttggctgtgcctacgacgacgaggagctgaggctgacggcgctgcggctctga

SEQ ID NO: 20984 - DNA, 531 bp, Oryza sativa; identical to SEQ ID NO: 11135
  Clone ID: TF_OsC366234_1

SEQ ID NO: 20985 - DNA, 1227 bp, Oryza sativa
  Clone ID: TF_OsC155_1
cagacgcgtacgtccacgcgtagaagaacgcgtccggagccagcgactgtgccaatgtactactcctaccccctctcctactcctgttaacaagttgtgctgctatatagaggagcagccgagcaagtgtgttgccacaagaaaagccttgtgagttggtaattgatagtagcaagacaatgtgtgggggagcgatcatcgccgacttcgtcccgcccgccggcgcccgccgcgccgctgcctccgacatctccgacaacgccgtcctctccgctgccggtgccggtgacgagtcgttcgcggcggccaaggcgccggcgccggggaggaagacggcgtaccgcggcatccggcgccggccgtggggacgctgggcggcggagatccgcgacccgaggaagggcgcccgcgtctggctcggcacctacgccaccgccgaggaggccgcccgcgcctacgacgtcgtggcgcgcgacatccgcggcgccaaggccaagctcaacttccccccgaccatcggcgccgccgccgcgccaccgccgcccaagaagcgacgcaaagccgccgccgcggcgaaccaccaccaccaccaccaccagcaggagagctcaggctcctcgtcggcgtcgtcgctgcctcccaccccgccgccggccgccgagcaccagctccgcgagtgcatgtccgggctggaggcgttcttgggcctcgaggaggaggaggacgacggcggcgccggtgagccatgggacgccgtcgacatgatgctcgagtaggctcgccgggaatggcagcgttgccatgctcatgcatccaagcttattcatgcatgcagcagcaagatatacaactttagtactactactatgttaattactacttactgcgtaggtaaatgaaataaaatggggttggttaattagggtgttcttctgggaatccttggctttgctaattgctagtactactatgtactttggcgttaagcattgcattgccaggtgatgcatgtcatgtaatcgtggtaattatatggccgtcctcctagagctagctagcagattagatttactatataaagtggtagtagaaatatatgtcctcctagagctaactagtgtcttgtaatgatttcagacttcttgggcaacatgagcaatgcatttcgacttccactttacatctatttaaaaaaaaaaaaaaaaaaaaaaaaaaaaaaaaaaaaaa

SEQ ID NO: 20986 - DNA, 1153 bp, Oryza sativa
  Clone ID: TF_OsC111_1
gcacgaggcacaccttcaataacttgcaaggataactcaaactacttgaatcagatcagacaaaaacatcataagaatatcacgatgtgtggaggagcactgatcccgaacgactatggcgacaagccgccgccgccgccgtcggagtcgtcggagtgggacgccacaacgaagatgaagaagaagaagaagcgtggtggcggcggcgacgacgactgggaggccgccttccgggagttcatcgctggcgacgacgacgacgacgacggcggcgtttccatgttcccttctggtgcagggacgatggagacgaccacagaggtggcgccggcggcggcggtggtggagaggccgcggcggcggcgaagggtgaggcggagctacccgtaccgcggcgtccggcagcggccgtgggggcggtgggcgtcggagatccgcgaccccgtcaagggcgcccgcgtctggctcggcaccttcgacaccgccgtcgaggccgcgcgcgcctacgacgccgaggcgcgccgcatccacggccacaaggcaaggaccaacttcccgcccgacgagcctccgctgccggcgccatcgcaggcgccgttctgcttcctgctcgacgacgacgacgacgacgacggcgtggcccgtggaaacagcccggcgtcgtcgtcggcgccggacagagcctccgcttgcacgacgtcgtcgacggtggcgtccggcgagcgaggcgatgagctcatactgctggagtgctgctccgacgacgtgatggacagcctcctcgccggcttcgacgtgtccagcgaaccacgcagtgttttgggaatggttaattagcagcgcgcacgcctgattagatcggtacatgtgaagtacaagagaagtagttactactagctaggagcaaattaacttggagtgcaagaataaaatatgcatgtctctgcactactactgtagtgttagcaagtttgctcattgttctgttgtatcctttcatgtccatttcagacttcccaatgctacataaggatgtacatatgtatgatgttgtgtgccttgttaatcaatgaatgtaaatatctttatattgcttttgtacaacaaaaatggttatgttgagactatctatacggaataatgtatcatatat

SEQ ID NO: 20987 - DNA, 994 bp, Oryza sativa
  Clone ID: TF_OsC111_2
cacacaccttcaataacttgcaaggataactcaaactacttgaatcagatcagacaaaaacatcataagaatatcacgatgtgtggaggagcactgatcccgaacgactacggcgacgacgactgggaggccgccttccgggagttcatcgctggcgacgacgacgacgacgacggcggcgtttccatgttcccttctggtgcagggacgatggagacgaccacagaggtggcgccggcggcggcggtggtggagaggccgcggcggcggcgaagggtgaggcggagctacccgtaccgcggcgtccggcagcggccgtgggggcggtgggcgtcggagatccgcgaccccgtcaagggcgcccgcgtctggctcggcaccttcgacaccgccgtcgaggccgcgcgcgcctacgacgccgaggcgcgccgcatccacggccacaaggcaaggaccaacttcccgcccgacgagcctccgctgccggcgccatcgcaggcgccgttctgcttcctgctcgacgacgacgacgacgacgacggcgtggcccgtggaaacagcccggcgtcgtcgtcggcgccggacagagcctccgcttgcacgacgtcgtcgacggtggcgtccggcgagcgaggcgatgagctcatactgctggagtgctgctccgacgacgtgatggacagcctcctcgccggcttcgacgtgtccagcgaaccacgcagtgttttgggaatggttaattagcagcgcgcacgcctgattagatcggtacatgtgaagtacaagagaagtagttactactagctaggagcaaattaacttggagtgcaagaataaaatatgcatgtctctgcactactactgtagtgttagcaagtttgctcattgttctgttgtatcctttcatgtccatttcagacttcccaatgctacataaggatgtacatatgtatgatgttgtgtgccttgttaatcaatgaatgtaaatatcttt

SEQ ID NO: 20988 - DNA, 1008 bp, Oryza sativa
  Clone ID: TF_OsC10760_1
ccctggcggaacccgcacccttcagcaacagcttagaattcagctcagtaaatctgttgattgctcgtttcaaatcatcatcggtgtttcgtttcttgatttcttgatccatccatggcgacgacagtggattggtgtggccgtggcagcaatcttcctgctgcgatgtatgacatggtggtggatagcaaggagctaatgggcgcgcttgctccgtccatggtgtccttctcctacccgtgttccgagcagagcgcgagctcgcttcttgctggcgccaactacctgactcccgcgcaggtgctccatgtccaggcgcagctacagcgcctgcgccgcccgggcgcggcgagcggctgcctcgccgcggcgccgccgctgccgatgaagcggcatggcgcggtggcggtggcggcggcggcggcggcgcgggcgccggtcaagctgtaccgcggcgtcaggcagcggcattggggcaagtgggtggcggagatccgcctgccgcgcaaccgcacccgcctctggctgggcaccttcgacaccgccgaggaggccgcgctggcgtacgacagcgccgcgttccgcctccgcggcgagtccgcgaggctcaacttccccgagctccgccgcggcggcgcccacctcggcccgccgctccacgccgcggtcgacgccaagctccacgccatctgccacgggatggacctgccccaaccccaaccccaaacccagagcaatgcgacgacgacgacgatgtcgacgacggcgacgaacaccccaagccccttcttctcctcggagagcccggtggtcaagagcgagcccgtctgctccgcctccgagagctcttcctcggccgacggcgacgtgtcatcgacgggctcctccgacgtcgtcccggagatgcagctgctcgacttctcggaggcgccatgggacgagtccgagagcttcctgctgcacaagtacccgtcgctggagatcgactgggacgcgatcctttcctga

SEQ ID NO: 20989 - DNA, 4887 bp, Oryza sativa
  Clone ID: TF_OsC396045_1
tcattcgtaattggatgatggttcgttgaggtcaaagtcaaacactatcggcctctcattcccagcagcaccttgggtcaacgaggatgcgacatcggtggcagcctgagccgacgaggagggaacgtcgatggcagcctgagctgatgaggaggggacgttgatgaaagcctgaaccgacgaggaagggacgtcgacagcggcttgagctgacaacgatgcgacgtcaacggctgcctgagccgacgaggatgcatcgtcagcagctagagacgacgaggtgtcaacgtcgaggagcattgacatcgagctcagcagcacgggctcgccctgctcaccgtcgggcacatcagcgaagaagatgtttggatcaaagtccagagcctcgtggacggcgtagtttgtcggcacaccgccaggagggatcaccacctggaagaaggaatcgctagccgccggccgtgccgccggcggtggcggcggcgcatgcgatggccctgcagtgtaggagaagacaccgttggggaagagagttgccatgacaacttcatgggctgtcagaacccgcttttccggtaaaggcgtagctgctgcggttgcgagctcaggcgtcgctggaaccggtggcggtgcagctgcgccagaggcagcgagtgtagaaggcaccggcgaaatcacaacatttggttgcattaacggtgcagttgctagtgctgatgcagatgcaggcaccaatgccggttctgtagcaggtgtgggtgccgacggcgatggagtacccacggtcaccgcagtcggaatgcgtccgcgtccgcgcccgcgcccattccaaactccacggccacgactagcaaaggttgcctcagcaacacgcccgcgtccgcgttccggtccaccgcttttggagagggttgaggctgtttggagcttcctcttcttgggtacaggtgcagcagctgcggctgcaactgcaggcggcggcatcgggaccaggatggcttcaggcaccgccgtcggcggtgccaccgccggtgcagcagcagaggcgcctggcgcgagtgtggatgaccccggcgaaatagtggcattcggctccattgttggtgctgatgcaggcaccggcactggagctgcagaaggtggcagtggagcacctgcggtcaccaccgccgaagtaagtccgcatccacgcccacgcccacggtttccacccgcaacggcggcatcggcaacacgtccgcgaccacgtgcacgtccacggccgcgctctccaccgcttgcgaagagggttgaggctgtctggagcttccttttcctatcgggtgcaggtgcagcaactgcggttgccgctgcaggcagtggcggcggtggcggcgggatcgcttcagctgccaccggcgccggtgcaaatgcggctgcagcagaagcgctggctgcgagtgtggacgacaccgtcgagatcggtgcaggtgcaggtgctgatacaagtgccttcgccggagtggcagcaggtatgggcgccggcggcggtggagcacccacgatcaccaccgtcggagcgcatttggtttcggacccacgcccatggccacgaccggcagcgttggcgatggcaacacatccgcgtccccgtccaagtccgtgctctctgctgcttgcagagagagttgcgggtgtagcaggcggtggtgcgagcgcttcaagagccgccagcgatggagccggtgccggtacagcataagcgggcgcgagtgcggatgacggcggagaaatgacagcattcggctccaccggcggcgcaggtgcatgcacagcaggtgtgggcaccggcagcggtggagcaaccacggtcaccgccgtcggagcgcatttgcctccgcgcccacgcccaccaccgccaccgcgcccatgtccggtaccgacaccgcggagaagtccacgcccaccaccaacaccgacactggcgccgcgcccgcttccccttccaccaacaaatgcaccttgggtcgacgaggatgcaacatcagtggcagcctgagccaatgaggcgggaacgtcaatggcagcctgagccgatgaggaggggatgtcgacgacagccagaaccgacgaggaagggacatcgatggcagcctgagctgacgatgatgcgacgtcaacggctgcctgagccgacgaggctgcatcgtcggcaaccagagtcaatgagttgtcaatgtcaaggagcgtcgatgtcaagctcagcaacacgagctcgtcctgctccccgtcgggcacatcggcgaagaagacgtttgggtcaaagtccggagcctcatgtatggcgtagtttgtcggcacaccgccgggagggatcacctcctggaagaaggaaccgctagccaccggcggtggcggcgcatgtgatgacccggcagtgtaggagaagacaccgttggggaagagtgttgccatgacaacgtcatgggctgtcagcaccggcttttccggtaaaggcgccgctgctgcggttgtgagctcaggtatcgccggcaccggtggccatgcagctacgccagaggcagcaagtgtgggcggcaccggtgaaatcacaacatttgactgtattaacggtgcagttgctgatgctggtgcaggtgtgggcgccgacggcgatggagtacccacggtcacctcagtcggaatgcgtccgcgtccgcgcccgcgcacactccaaactccacggccacgaccgacaaaggttgcctcggcaacacgcccgcgtcctcgtcctggtccaccacttccggagagggttgaggctgtccggaccttcctcttcttgggtacaggtgcagcagctgcggctgcggctgcaggcggcggcatcgggatcaagatcgcttcaagcgccgccgccggcggtgccaccgccggtgcagctgcagctgcagcagaggcgcctggcgcgagtgtggatgacacgaccggcgcaataatgtcattcggctccagtgatggtgctgatgcaggcgccggtgctggagctgcagaaggcggcggtggagcacccacggtcaccaccgctggagttagtccgcatccgcgcccacgcccacggctgccaccggcaatggcggcatcggcaacacgtccgcggccgcgtgcacgtccacgtccgcgctctccaccgcttgaggagaggcttgaggcagtcaggagcttccttttcctttcagctgcaggtgcagcagctgtgcttgccgcagcaggcaatggcggcggcgggatcacttcagctgccgccggcgctggcgccggtgcaaatgcagctgcagcagaggcgctggctgcgagtaccggcgagatcacagaactcggtgcaggtgcaggtgctgatacgaacgccttcgccggagctgcagcaggtgtgcgcgcctgcggcggtggagcacccacggtcaccgccgtcggagcgcgtttggctccgctcccacgcccacggccgcggccggcgaccgcagcgttcgcgatggcaacacatccgcgctctccgccgcttgcggagagggatgcaggtgcagcaggtggcggcggcgcgagcgcttcaagagccgccggtgctggagccggcgccggcgcagcataagcgggcgcgattgacgctggagaaacgagagcatccggctccaccgacagcgcaggtgcatgtgcagctgctgatgcaggcgccagcgtcggggctgctgcacctgcagcaggtgtgggcaccggcggcggtggagcaaccacggtcaccgccgtcgtcggagcgcgtttgcctccgcgcccacgcccgccaccgccaccgcgcccaagtccacggccgccaccaacaccggcaccggcgccgcgtccccgtccaccaacaaatgcagcttcatcagatccagatgacgtcggagctggcacctgcaccggcaccggcaccagagcaacatcagatgacggcggcgcgggcacctgcaccggcaccggagatgcatcagataacgtcggcgctggcaccggagctgcatcagatgacggcggcacgggcacctgcacaatcaccggagatgcatcagataacagcgtcgctggcacaggagctgcatcagatgacgacggaggcgctgccacctgcaccgtcaccggagacacatcagacgaaggcggcggcgcaggcagcaacaggagaggagcaggagcaggagcctcgctcgcctccgcctctgccgccgccgccccacgttcctccaccacacgctcgcggcgagctcgagctcggtcgaagaacgctagcatggaccgcatctccgccgaaagcggcgacggcgtctgcgcgggatcgccgaagttggtcgccgccgcctccccgcgcagcacccgcgccgccgcgtcgtacgcccacgccccctgctccgccgtgtcgaacgtccccagccacagccgcccggcccccgtcgggttgtggatctcggcgacatacctcgtcccaaacctcaccctcaccccacgatacttcgtctccgggtcaatctcctcccactcctccgccgccgcctgacgacgccagcgccgccgctccacggcggggacgacgcgaacctcgccctccaccaacggcgaaaccaaaacctccgccgacgccgacgacgacaccacctgatccccctccatgacgggcacaatcacgagctccaacccggaaccggccctcaacctctccctctccccgggcgacagcagaaatccgccgccgccgcccgcggcggcggcgcggcggtactcgttcccccgtacctgcacggcgaggcgcgccgactgctgggagtactccaccagcaagcctttcatcgcctccgctactctctcctccggatccat

SEQ ID NO: 20990 - DNA, 543 bp, Oryza sativa
  Clone ID: TF_OsC332429_1
atgagcaccaccaacagctcatcctctgtctctgtcccagccatggacgcccatggacaggaggaggaggaggagccgatgcaggtgcagcaacagcaggcgttccgcggggtgcgcaagcggccatggggcaagtttgcggcggagatccgcgactcgacgcgcaacggcgtgcgcgtgtggctgggcacgttcgacagcgcggaggaggcggcgctggcctacgaccaggcggcgttcgccatgcgcgggtcggcggcggtgctcaacttccccatggagcaggtgaggcgttccatggacatgtccctcctgcaggaaggggcgtcgccggtggtggcgctgaagcggcggcactccatgcgagcggcagcagcggggcggcggcgcaagagcgctgcacctgcaccggcggatcaggaaggcggaggaggggtgatggagctggaggacctgggacctgactacctggaggagctgctagccgcctctcagcccatcgatatcacctgctgcacaagcccaagccaccactccatctga

SEQ ID NO: 20991 - DNA, 1200 bp, Oryza sativa; identical to SEQ ID NO: 11101
  Clone ID: TF_OsC341110_1

SEQ ID NO: 20992 - DNA, 727 bp, Oryza sativa
  Clone ID: TF_OsC251034_1
ccgggctgcagcacgtcgggcgaggcctcgctcgcttactcggtgtttaggcatggacgtttctgctgcgctcagcagcgactactcgtcggggacgccgtcgccggtggcggccgacgctgacgacggctcctccgcctacatgacggtgtcgtcggcgccgcccaagcggcgggcggggcggaccaagttcaaggagacgcggcaccccgtgttcaagggcgtgcgccggaggaaccccgggaggtgggtgtgcgaggtgcgcgagccgcacggcaagcagcggatatggctcgggacgttcgagacagcagagatggcggcgcgcgcgcacgacgtcgccgcgctcgcgctccgcggccgcgccgcctgcctcaacttcgccgactcgccgaggcgcctccgcgtcccgcccatcggcgcaagccacgacgacatacggagggcggcggctgaggcggccgaggcattccggccgccaccagatgagagcaatgcggccaccgaggtggcagccgccgcatcgggcgccactaattcgaacgccgaacagttcgcctcccacccgtactacgaggtcatggacgatgggctggacttggggatgcagggctatctcgacatggcgcaagggatgctcattgacccgcctccaatggccggtgatcctgccgtaggtagcggcgaagacgacaacgatggcgaggtccagctatggagctactga

SEQ ID NO: 20993 - DNA, 923 bp, Oryza sativa
  Clone ID: TF_OsC303620_1
gacctgtcgacctcgtgctcacactctgtagctgctaagcttggtagctcgccatggccatggcgaaggagctccaagaaacctcctcgtcttcgtcctcctcggctgcctccacgtcctcctgctcctccgccgtcacggacgcgtggtcgtcgccggccagacccaatgctgtggccggggggaagaggaagaaggaggtggtaggagaggctgatgaggctgcaggcggcggcgcaggagaggaggaagaggaggaggcggaggcggcggcggcggggaagtcgtcggcggcgacgaagaagaggaagcggagcagcgacgggaagcacccggtgtaccgcggcgtgcggatgcgggcgtgggggaagtgggtgtcggagatccgcgagccgcggaagaagtcgcgcatctggctcggcacgttccccaccgccgacatggccgcgcgcgcccacgacgtcgccgcgctcgccatcaagggccgcgccgcgcacctcaacttcccggacctcgccggcgtcctcccgcgcgccgcctccgcctcgcccaaggacgtccaggccgccgccgcattggccgccgcgttcaccacgtccccgtcctcgtcgccctcctcctccttgtcggccgacgacgtcgcgccatgcgtcgtccacgccgacgccgacgagcagcctgccgctgccgccaagaacgacgacgacgacggctcaaccaccgcgccggtggcggcggcggcggcggcggcggcggcggatgagcagcagctgttcgacctgccggacttgctgttcgacatccaggacgggccgttcgggttcccggcgatgtgggcgccgctcgccgacgtcgacgaggtcaatgcggagctccggcttgaggagccattgctttgggacttgggagtaacagatgcttaa

SEQ ID NO: 20994 - DNA, 1145 bp, Oryza sativa
  Clone ID: TF_OsC375_1
agccccgggctgctggatttcggcacggggcacacacccaaacccaacctcccaaaacacccacccggtttaccagagatccgcgcccgccacttgtaaacctgctgcacccatggcgcccagagcagctacggtggagaaggttgctgtggcgccacccaccgggcttggtcttggcgtcggcggaggtgtcggagccgggggtcctcactacaggggcgtccgcaagcgcccgtgggggcgttacgcagcggagatccgtgaccctgccaagaagagccgggtgtggctcggtacctacgacacggcagaggaggccgcccgcgcctacgacgccgccgctcgagagttccggggtgccaaggcaaaaacaaactttccgtttgcatcacagtcgatggtcggctgtggcggcagccccagcagcaatagcacggtagacaccggtggcggcggggttcagacgcctatgcgggccatgcctctgccgccgactctggacttggatttgttccaccgcgcggctgctgtgactgcagtcgccggcaccggcgttcgctttcctttcagaggatatcccgttgcacgtccagcaacgcatccttactttttctatgagcaggctgcagcggctgccgcagctgaggctggataccgtatgatgaagcttgcaccgccggtcaccgtggcggcggttgcacaaagtgactccgactcctcgtcggtggttgatctcgcgccgtcacctccagcggttacggcgaacaaggcggcagctttcgatctggatctgaaccggccgccgccggtagagaactagctcaggatgggttagctgacgactttgtagtttctctcttattttcttctttgatggatatttctctccgatgttttggtcctctgtgtttttgtttagtagcctgtgagagacggaagagccttgtaaatagtttttctgccgagggcgaaattcatcttgggatctgttaattagaacagatcatgccggcgatgagatggactaaaccgtggagtgtatgtattcctttatattagtatgaagaaattattcagaaagtcacaaaaaaaaaaaaaaacactgagtttgattgacgttttcacgtgccgaattcctgcaaaaa

SEQ ID NO: 20995 - DNA, 702 bp, Oryza sativa
  Clone ID: TF_OsC120_4
cagtccaccacagcgcgcggcgccatggacgactcgtcgttcggttccgagccgaccacgtcctcctcgggcggggaggcgccggcctccccgccgtccaccgcgtcgtcgtcctcagacggcgccggcggcaagaagaagcggccgcgcaaggacgggcaccacccgacgtaccgcggggtgcgcatgcggagctggggcaagtgggtgtcggagatcagggagccgcggaagaagtcgcgcatctggctgggcaccttcgccaccgccgagatggccgcgcgcgcgcacgacgttgccgcgctcgccatcaagggccgcgccgcgcacctcaacttcccggacctcgcccacgagctgccgcgcccggccaccgcggcgcccaaggacgtccaggccgcagccgcgctcgccgccgccgccgacttcccggcctcctccgccaatgcgggcgccagcaataaccccgacggatcggacgacgcgagcgccgggtccgcctcgccgcccccgccgccggacgccgctgacgacgcgctgttcgacctccccgacctcctcctcgacctcagatacggcccgcccagctcgggcctctcgtgcgcgtcgtcttgggaagacgaagtgggcttaatctccggcgccggtgccgccgccgccggcgtgttccgcctggaggagccacttctgtgggagtactaa

SEQ ID NO: 20996 - DNA, 1371 bp, Oryza sativa
  Clone ID: TF_OsC7483_1
atgagcacaaaaaagcgagcgaggtgggacccacctcctgaggaggaaaacggtgggcccacccgtcagtcggcgcaggtccggtactacagcactgcgagactgccggtggggccctcgggtctcaggtggggagcagttgctgccgtcctgcagccgcatccgcccaccccgtgcacccggtctaccgtacgcctccccctacctgcagatgggccctacctgtcagtgaaagtactgttcccggttcacgtgtcattgtcactactcgatagtatttcaaatttccgggtgctgtcttcaagcaatgcctcgaaaacagagctagttaagaaatattgccaaacgatggatggcatccttgatcacttggaggtggccctaaacagagcttttcctcagattactccagatggtgaactaagtaaagtgcttgaagaacttggcgctaccatcaatgaagcgactgagctagttggaggctggaatcaaatgatgagcaagatttattttgttattcaggctgattcaattattgccaagatgcagatatatgtattcgaattatgccaaattgtcaattctctcatgcagattgagtcaatgcatttggaggatcttgaacacgatagctgtggaaaaatttcagatgtcattagggaggcttccagggctttagcaggggaagttatgccaaattcagaggaatttggaaagattcaaactactttgagcttatccacaaatcaggagttgctgatggaatatgttgcacttgttaagattaaaacaaaaggtaatcatgaagataacaaagaaatggatgatattaacgatattgttgaattagtcaaccatatgcttgacaaacatgtggaagaaaagcaaacacgtagcattaatggagtgaccattcctgctgatttttgttgtcctctttcccttgaactaatgtcggatccagtgattgtggcatctggtcaaacgtatgagcatgtttttatcagaaaatggtttgatctgggatacaacatttgtccaaagacacgccaaatattgggacacaccaaattgattcctaacttcactgtcaaacagttgattgaaaattggtgtgagatgatagagtgtcatcatttgggccgtgtcgtgcgcgacggcggcggcctccggcgtggcgtaggaccccagccacagccgctcccgcgtgccgggcacccggatctccgacacccacttcccccaccgccgccgccgcacgcccctgtacctgcaccgctcctcctcctcgccgccgccgcactccgcccggctcattgcctcctccggcgagctgagatcaacctcaccgtgatctctctccgttcttga

SEQ ID NO: 20997 - DNA, 1134 bp, Oryza sativa; identical to SEQ ID NO: 11107
  Clone ID: TF_OsC371165_1

SEQ ID NO: 20998 - DNA, 2014 bp, Oryza sativa
  Clone ID: TF_OsC16652_1
ctcccctcgagaggccgagagagccgagctacagacctccgcgctgacgccaccacgcggggcgaccccaacaaaagaaatggtgatgcgaacctcctcccccgaacgcccaactaaacaagcatcagctactcgacccacctatctggcctggctcactctttctccgtttattttttatttactcttcgtaactaaaaatgccatttccaccacgtgggtgagtgcgcgcgccggcggaaagttcaacgaagcgtcgtagcgagcgcggccacctacgtaaagctcgccccgtctccgcctcggcttgccattcaactcgaacacaccacacactgaagtgtgtaaccaagtttgagacagaggcgaggtcgggtcagcaaggaagacggcgatgacggcgcgaagcatgttgcggaaccacccggaggcgtcggtgctcgacaccatccggcagcacctgctggaggagccgcgcggcggcggcggtggcgaggcggcggaggcgagcttcgggagcctggtggccgacatgtggagcgactcgctgccgttccgcgacgacgacgccgacgacatggtggtgttcggcgcgatgcgggacgcgttctcgtgcgggtggctgcccgacggcgtgttcgcggaggtgaagccggagcccctgctctcgccggactcgtcgtcgtacgacgggtcctcttgctgcttcggcttcgcggacgtgtcggagccggtgacgccgagcgacgcggcgtcgggggcggcagaagcggcggccgcggcggcggcggcgacggcggagcacgggaaggaggaggaggccgcggctgcggtggcgagggggaagcactacaggggggtgaggcagcggccgtggggcaagttcgcggcggagatccgggaccccgccaagaacggcgcgcgcgtgtggctcggcacgttcgacaccgccgaggacgccgccctggcgtacgaccgcgccgcctaccgcatgcgtggctcccgcgcgctcctcaacttcccgctccgcatcggctcggagatcgcagccgccgccgccgccgcagcggcagcggcagccggcgacaagcggccgtcgccggagccggcgacctcggagtcgtccttctcctcctcatcctcctgcaccaccaccaccacctcctcctcaacctcctcctccggctccccgaaacggagaaagagaggcgaggccgcggccgcgtcatgtccatgcccctggtgcccccgccttcccagctgaactggccggtgcaggcatggtaccccgccgccgcaccggtcgagcaggtggcgatcaccccgcgcgtggagcagctcgtcatctaaagcgcgcgacgcacagtgaagcaagcaaaccaagccagcaatggtcgacgtcatatcaccttgacgccccaacggattgaccagcgagcacgagccagccattgctttgcacggcgcgagacggcaaagggatcaggcgatggaaccccgtgagcgcgacggcgcaagcgagcagcatccccgcgaaagctccaccggatgcaaaattgcaaacgcgataagctcgcgggtgcaactggtgaaattgggtggtgcaatcgtgtgtgggcgagctctagcagatagtagcgtggtggtggtggtggtattgttgtcccggcgcaactcgcccaagtgggggggtgaggaggatactctgtgtctactagcgtgttcttgtcagggaatgcacggtgtcgtcaagtgtgcaaatcctaagggtcataattcgcgtcattgtcactagtggatcacccgagtgagtttgtgagggtttcagtgaaaaaaaaaaactgtacaaacgatgtcttgtggtgtggagaagcagcagagatgaagaacaatcaatcatcccctttgttcttttgatcttaggagtccaaatgataggtctaatcagtaatcacaaggtcgcaaacatttaaacccagaaaaaaaaaaaaaaaaaaaaaaaaaaaaagggcgg

SEQ ID NO: 20999 - DNA, 972 bp, Oryza sativa; identical to SEQ ID NO: 11115
  Clone ID: TF_OsC418377_1

SEQ ID NO: 21000 - DNA, 966 bp, Oryza sativa; identical to SEQ ID NO: 11118
  Clone ID: TF_OsC343773_1

SEQ ID NO: 21001 - DNA, 430 bp, Oryza sativa
  Clone ID: TF_rsiced_10763.y1.abd
gcacgagggacacactgccacagacacaatccatagcttagctcctctccactggagggatcgatcgatcgatggactgggcgtactccggcaacagctacggctacggctactactcgtcggggacgtcatcccctccggcgggcggcgaggacgcgtacatgacggtgtcgtcggcgccgcctaagcggcgcggggggcggaccaagttcaaggagacgaggcacccggtgtacaagggcgtgcgcagccggaaccccgggcggtgggtctgcgaggtccgggagccccacggcaggcagcgcatctggctcggcaccttcgagaccgccgagatggcggcgcgcgcgcacgacgtcgccgcgctggcgctgcggggtcgggccgcctgcctcaacttcgcggactccccgcgcaggctccgcgtccc

SEQ ID NO: 21002 - DNA, 1133 bp, Oryza sativa
  Clone ID: TF_OsC16240_1
ttttttttttttttttttttaagaacaaaataacgtaaatttctcattaatcagagattgatgatcaatatgttacatcgaacaacaaaatgttttctttttcttttcttgtttttttccttctttctttaaaggaactgtaacaccgggagtagtagccttttcctcatacctatctccccgtgcaaaaaggacacgatctatgtacacctagttgatcaatcctggcaattaaacggacgattaacctcttactattacacgtcgctctagacttttctacgagggatttgtgggggggtcttgtcgtcgtcatcgggcgctgcaacctacgcctcctcgatcggcggcggcaggttcaggtcgagccccacgccgacggccggcgaggcgtccaccacggatgacgacgagccggtgtcgctctgctcgtccaggcgagctacctccttcttgacgctgacgacggccggccggcgaggcaccggtgccgcgacggccacggtcaccgcgaccctggggtcgaggaacaggaacggctgggcggccaccatggccgacatcccgaggctcagatcgagcgaaggcgaggcgggcacctgggccttggccgcggccgccaccggggcggcggcgggcgtgtcccgggaggacgactcgaccgtgctgctggtcgggctgacgacggccagcgccgccgccttgggcagcggcggcggcggggcgtggtggtgggcgtgcgcgaaggcgacggggaagttggtcttggccttgggcccgcggaagtggagcgcggcgctgtcgtaggcgcgcgccgcggcctcggcggtgtcgaaggtgccgagccacacccgcgccttcctggccgggtcacggatctccgccgcgtacctgccccacgggcgcttcctcacgccgcggaacctgggctccatgccgtctcctccgccctccgccacggcgacggcgacggcctcggcggcgttcctgggagccatgtccgttcttgttcgggtcgagcaccacgagcagagcgagctaaggcgggcgagagcgccaagtgttcgaccggtggatggtgggtggttggtttggcgccggtggtgcgtcctcgtgccgaattcctgcagccc

SEQ ID NO: 21003 - DNA, 395 bp, Oryza sativa
  unsure (1)..(395): unsure at all n locations
  Clone ID: TF_jC-osflLIB3479036h12b1
cccacgcgtccggtccatttctttgcagtcctcgcatgcgcaacgtgtccactgtttagatggatgcacacggtgacgagtcgttcgcggcggccaaggcgccggcgccggggaggaagacggcgtaccgcggcatccggcgccggccgtggggacgctgggcggcggagatccgcgacccgaggaagggcgcccgcgtctggctcggcacctacgccaccgccgaggaggccgcccgcgcctacgacgtcgcggcgcgcgacatccgcggcgccaaggccaagctcaacttccccccgaccatcggcgccgccgncgcgccacccggcgccaagaagcgacgcaaagccgccgccgcggcgaaccaccaccaccaccaccaccagcaggagagc

SEQ ID NO: 21004 - DNA, 1443 bp, Oryza sativa
  Clone ID: TF_OsC11135_2
atggagcaggagcaggatgaagaggaggaggaggcggaggcctcgccccgcgagatccccttcatgacgtcggcggcggcggcggccaccgcctcatcgtcctccccgacatcggtctccccttccgccaccgcttccgcggcggcgtccacgtcggcgtcgggctctcccttccggtcgagcgacggtgcgggagcgtcggggagtggcggcggcggtggcggcgaggacgtggaggtgatcgagaaggagcacatgttcgacaaggtggtgacgccgagcgacgtggggaagctgaaccggctggtgatcccgaagcagcacgccgagaagtacttcccgctggactcggcggcgaacgagaagggccttctcctcagcttcgaggaccgaaccggcaagctatggcgcttccgctactcctactggaacagcagccagagctacgtcatgaccaagggttggagccgcttcgtcaaggagaagcgcctcgacgccggggacaccgtctccttctgccgcggcgccgccgaggccacccgcgaccgcctcttcatcgactggaagcgccgcgccgacgtccgcgacccgcaccgcttccagcgcctaccgctccccatgacctcgccctacggcccgtggggcgcggcgcgggggcgttcttcatgccggcccgccacgctcttcgagcatcaccgctttcgccagggcttcgacttccgcaacatcaaccccgctgtgccggcgaggcagctcgtcttcttcggctccccagggacggggattcatcagcacccgcccttgccaccgccgccgtcgccacctccgcctcctcaccaactccacattacggtgcaccacccgagccccgtagtcaccgccggcctgcccatggttgtcgactcggtgccgcacgtcaacaacccagcggcggcatcgaagcgcgtccggctgttcggagtcaacctcgataacccacatccggacggcggccagtcgtcgagcggccacgacgccaatgcattgtcgctacggatgcccgggtggcaaaggcctgcaccattgaggtcgctggaattgcctccacacatgccggctggtgcagctggagcggagtcctctgccgcgtcgtcgccgtcgtcatcgtcgtcatccaagagagaggcgcactcctcgttggatctcgatctgtgaaggagggatcaggccacctcgatcgatcgggagcgtaccaaaggaaagttcaaaaaatccatcttccgtctgctgccttcttctacttctccaccttttgcaattctccatcataactttgatcatagagttagcataacttttggtttccttttttgtttttggccattcacattcttatgtttgtttgagaatatatagagaaaaattaggcgaattaatgaattattaatgtttttatttgggttt

SEQ ID NO: 21005 - DNA, 483 bp, Oryza sativa
  Clone ID: TF_LIB4309-024-R1-K1-C1
caggtgtgggggttcaccggtgagcgagcttggacgtggcggagggcggaattgtgggggttctttcagttctccgagcgattcggggaagggggagaggagaggtggtggatgtgagatccgatggctgctgcagcgacggcggcggcctcgccggttgaggggctcaccggcggcggcggcggtggtggtggaggagtggacgggctgttcgtggagctgtggcgcgcgtgcgcggggccgctggtgacggtgcccgccgtcggggagagggtcttctacctcccgcagggccacatcgagcaggtggaggcatcgacgaaccaggtcgccgagcagcagggggctccgctctacaatctgccatggaagatcccgtgcaaggtcatgaacgtcgagctcaaggctgagcctgatacggatgaggtgtatgcgcagctcaccctgcttccgggagagcagcaggatgggaatgggagtggt

SEQ ID NO: 21006 - DNA, 2604 bp, Oryza sativa
  Clone ID: TF_OsC1713_3674
ctagttcggacttccattcggatcaacaagcttcaatccccagctcacgtcgtcgcagtgccgaacgtggggcagtattgtcccggtgtccactccgcgcttcgtcttgcagtcgtagaacggcggcgagtggaagcacggctccatggacacgtcccgtccgcacggcgggtccggcaccgccgtgatgttcaccggcttgtacatcacccacggcctcagcccgccgagcccctgcgccacgtacccgaacgtcgaccagccgctggtcaccagcacgtcgcacaggctcaggaggtacatctccgcccacgccttgccgtcgtgcgacttctcgccgaagtgctggtactcctcgtggctcggctggtgcacgctcacgtcctcgccggtcgccgtcgcgcgctcccagtacatagccttgacgcgctcgtagaaccacggccggagagaggtgatcaggacggccttggagttgttgctcccgccgtgcggcgtcgtcggtggcgtgggcatggccgcgtcctccaccgcgtcgagtacctccgggagcagcttctccttccacgcgcacgacgtgatctgctcgaggacgacgtgcggcgacttcgcctgccggtggtcgaagacgcgcacctggacgccgaccagctgccgcgccgtcgcgaggtacgcgcggtagtaccgcgcgacgaggccccagacatggttggccgggtggaacaggtaccggccgaggtggtggaacacggcgtcgcgctccgggaagagcgcgtcgagctcgtcctggaacgtggtgaccaggaacagcgacggcacgatgtaggtgtccgtcctcatcaccagccactggatgttcgacagcagccgctggtcgtcgtcgcagaagaacatcttgtcgccgtcgccgtagtcgtggtccaggtggaggtacgcgaacgccggcatctgcgccgcgggcatgtcaccgtcagtactcccgtccgtcccgagcaccttgttcttcagcatgttgccgtagctctcggcggtgtcggcgctgaagttcgcgtagctcgacgccagcgggaagtcgcgtgggagcagccacgtcgtgccggggaacggctcgcagaagagctcgtccatctcgttgctcgggtcgacgaggaggacgcggccggtgagcaccgcgtagaggaaggccgacgcggcggcgaggatgcggttcccgaggccgcggtacgagatggagaccacgtacttgcactgctcgtcgtccggcgagtgcgcgtcggcctcggcggcgccgccgtccctcagccgttgcacggcgcggttgtacgactccgtgttggggccgcaccgtctctggagctcctcgtgcatccgcagccgcgccacgaggtgcggagatggtcgtcggcccgggttccggcggtacaggtatgactcgtacctgctgcgacatgatttctcgtcgaatccttcgggcaagaggccgccgaggagtttgtcagcggcgcttcgtgccaatggaatcgatttatcgtcggaacctcgacgcagggccttggtggcggcgatccagacggcggggcgccgcccgccaagaacggcgaagaccgtcgccatgacaaaggcggcgagcacgacgtaggccacggagctccatcgcttctcggcagcagccaccgccgcagctggcttcctcttccgcggcacggagcgctccagggactcctcgcccgcctccagcggcctgccgtcgcactgctgctgatccgctcctcgcgccgccgcggcgctctcggcgcaagccttgggcttgcgttgctgcacctgcattgctgttatatcgccttcgctgagcggacggtgtagtgtggtgcacacgcattgcctcttcatcaagaacgcctcttgccccatttccaccgccctctcccgcttccggcaatcgccgccgccgccggtgatgtccatgccgaacagcctcacgacgcgtgttgcttcgccgcttgtaattggcttctcgtcgccggtggccgccgccgtgttgttcttcttgcagtcgatgaagagcagcttgtcggggccatacgccgagccggagaagactatggtgtcgccggcgcggaggcccttctccctcacgaatcggctccatcccttggtcagcacgtaactctggctgcttcccctcgccgtcctcgaagttgaggagcacgcccttgcagagttgcaggtggccgcggcggcggtggcggaggcgtcggagctcgtccgccgcagcgggaagtgcttctccgcgtgctgcttgggcaccagcaggcggttgagcttgccgacgtcgctgggcgtcacggccttctcgaacagtggctcccgcgcccacgacggcgtgggctgcgcgcgggcgcccatgccgcgcccccggcggagcccctggcggagcttgcgcgatggtaggccagcttggagacagggcaggcggtggcgcggtcgccgtcgccactccggcccccggccgccgctgccgccgaggcgttcgaacggggaagagaaaagggggagagaagagagagaaggagggaggaggaagggaaggataaaggatgacat

SEQ ID NO: 21007 - DNA, 5667 bp, Oryza sativa
  Clone ID: TF_OsC788_1
atgcggctcgaagaagaggtggagcgggaagacgacccccggcaggaatcaagattcttagatgtaccggcttccttggttgcaagctaggaacacacaacccacacgcctcgctgcctcgattgattgattgattccttggagaagaagaaggaggaggaggagatcgagcagccgctgacgctcgtcgtctacctcccgatctgatccgaggagcgaagcgaacaggggcaagatgcattcgacgaatctgctgctggaggagcccatcaggatggcatccatcctggagccatccaagccgagctttttcccggcgatgaccaagatcgtggggacgctgggtcccaagtcgcgcgccgtcgacaccatctcctcctgcctcaaggccggcatgtcggttgccaggttcgatttctcgtggggagacgctgagtaccaccaggaaaccctcgaaaacctcaagctcgccatcaagtccaccaagaagctctgtgctgtcatgctcgacactgtcggcccggagttgcaggtggtgaacaagagtgaggctgcaatctcccttgaagcgaatggcactgttgttctcacccctgaccaggggcaggaggcctcctccgaattgctgcccatcaacttctccgggcttgctaaggctctgaaaccaggtgctacaatttttgtggggcaatacttgttcactggcagtgagactacttcagtttggttagaggtttctgaagttaaaggagatgatgttggtttgtgtgataaaaaattctgcttctctggctggttcactgtccacccgtagattgttctcagcttcatatcgatttaagtagagtgtttaatgaggagacggaagttgttagacgagggagatcttcaaaaaaggattgacttggccctctatgcgaatgaatggcaacgtttaaagtgtatgactgtgacgagcatcttctacaaaactaaggaggagtcggtcagagtaaattttaccatatgatccgaaaatgtagtccgtcaaaaacaattactctgttcggatgaggttcaggatgaggtttgaaggagaagaggcaccagagcagagtgtttactggtactataattggcagtgagaatctcgacccagtgtggcctgaatcaagttggagatccctgaaggtgcggtgggatgaaccatcaactattccgcggccagatagagtctctccttggaaaatagagcctgcttcatcacctcctgttaacccccttcctctttctagggttaaaagacctaggccaaatgctcctccagcatctcctgaatctcctattcttacgaaagaagctgctagtaaggttgacactgatcctgctcaaccacaaagaagtcaaaacggtacggtcttgcaaggtcaagagcaactgaccttgaggagcactcttacgcagagtgacgactctgatctaactgctaataagacaatgaggcgggcttcttgcccaaatgcagccaaagcctacctgttgaaattttagtctattccccctataaaacatttcatctagggtggaatttctctggctcatttgaagcatgacaaatcggctcatagatatagggctctttccgctgctttctgatcccaaagcatccagctggattcaaacaacctctatcataatgaatccgttttgaaggttgctcttgctgacggtcaagtttctggtgcgaaaaagtcgcatttatcgcgttgttgtctgccagaaaatgggacattccgcggttgagaagatcagatgacgttggactattagacaaggagcgtgtgctcgtcgtcgagtaaactatgacatgttctgccagattttgactgggccaaaaaggtcgcttcttggctatgtataatcctatagcttcaaatgcgcagtttttcctatggtgtattcataggattttcccttgcagcttgaaaccattatgatttagttgaagtaaattaaatttgcgcgagttttacctaatggtgttaatcagagggatttaccttaacatatattgaaacaactacgttttagttatgtaaagttatcagatttcaatgcatcatatcacttcgatgggcaaatggaataatgaaatcggtaatgtaccctttggtcttatcagaaaaaaaaaataaaaaaagcggtcaaaaaactcaacaaagttccaaaagatgttcaaagcaagaagcagacgaacaacaacccgaaggatgtacatgtcccccaggccctggaaccaatggatgatcttattgcatcaaatggatacaggcgtcgggaatcacacaatattgagcgttatacccattttaatgactacgaggagattgagaagtggaaactcctgcatgacactaatggggctaggcatggcatagagaccacgaatgttgcagaggcgtacaatgaggaatttcgcaactttgtgccggtacatttatattttatcgaaggaggagttctgcacagtacatcgaagttgaaaaggcccaaggaaagatgactcttcaaaaaatgagaaaggtcatctgccgatgcccaacaaatcagataactaggttcagtgaagcgagatgatacaagaggtagatcgcatggagtcttgagagagagatgccattctgcgggtcccagtcaagtaaaccccctgatgtgttggtgatcacccctgcccccccttttgcttatctgatggctgatgcaatgcaaaccctatggctttagctagtatgagatgtagactgcctattgtttatccttttgttcctttttcttctcttggcagaaagatttagggccaagatttatcattattgctattgcccctctcaactcctcccaactctctgatgtaaatatttatctacgtagccagccacccagccagaagtagagcagtagtagtagagttaccccctaccttgtattaaccagcagcctattcccccggataaatttgtgtaagctctgtagctcgagataaaaaaaaatggcgatcgaacgaacgaacaaatggcgtatgtattgtctgatctttgatataaatatttatcaatgaatgtatcataaatggaaacaaagcaacaacgtgcgaggaggaatagaaggggctctcaagatatggaagaggagtggccttacccgttgcttagcaaagagatcgatgcacggcatcgtgcaaagaagatatatgatgggaattcttgctctagtctagctgtcctgataccgcgtacagccggatggttgtcagctgcaggtcttcttaccttcgtgcagatgacgcaggcaaggatgcattacgacgcaagagaacctaaacaaaaactaatgggggcacatagcaaacgacgccaaaatatcgacaagtccctacttatggcactggttgataggtggaggccagagacacatacattccatctaccgtgcggtgaaatgaccataactttgcaggatgtgtcaatgctcacggggctgccactagccggccaggcaattgtacttccggaccctccggaagattggagagatgatattgtatcacgatatgcctgtattttgtcacggtacgctaccggtgatacagacgatgatgaggacaaaatatttttctctgaaaaagaaactcatggccccacattgaagtggttgtcacagtttgaggtgcgatatatgcccgacgatgtccaggagtaccaactgacgttgtaccttgaggcttatctactttggctgtttggttgggtcatgttcaccggctcgcacgggaaccctgtggacgccaggctaatcccccttgctcgccaaattgctgaaggtaatatatcgccttctacacagtttacctggggatcagccatccttgcagccacataccgtggtttctgcgacgcttgtattaagaccgggcaaagggaggcgattttcacggggtgtccacttttggtcatgttgtggtcatacgagcgcttctcgttcggacgtccatacatgagcgtggccgtggcccacaaggatgattacactgacgcagttgatgatcgtcctaccttcggaactcgatggtgctacggaccgccacagtgggcaagaatccaggtgcacaatgtgtacgagtacttcaccgaggcgttcgaaagccttagggaaaacgaagttcggtggactccgtacacgaacgaagaggccattttgcgtgcaccacatggagtaagcatcttatgctaccgcgatgaagcgtactggatgacacgaaaaatgctggtgtacgacatatttgtcgaggggcaaaataggcaagctgacaataggttttgtcgatctatgcactcaaggatgaccccatggatagaggcgtggtcccaggccttgaatgatgtcgtccatgagaccagggcatacgaccacaacacttacaaacaatacatggcctggtacacatcgcagactcgcatccggctgcttgcaccggaggatcccgacgagcgaggtccaccaacaattgatcaaatatatgatatgcagctagcaccccccgctcacttgacgaccgacattgcaggggagctagtaaaggaggcgaaaacattatgggagaagcttagagatggaatggcgggtacgaatcaggaagtaatggctgcggtcgactccctccgccgaaaaggaaagcgaatcatgcgcctcgcatcgtgccgtcattcctcggacatctataatccggcaacatcaagaaggacgttcgagccaatgcgtgagcgtccctctacctcttcccggccgtccacctcatcccgcccttcagcatccgcgcgacgatccagtgatggtcgtgtaggagtaaggtcaacttcctttcgtgagccacccactattccgactatcccaaaaatcactgaaatttctgaacgcctaggaggctttggttcaactcaagcacaaccggaatgggtacccccatatagctctacgcccatcacctctcaatggcagggtgagagtgcgtcgtttgctgagggaacgcgaatggtccgtcccgtgcctcatatgcctcctgctaggccacaaatgattcgtcaaatggctcccgatgtgccaacctcacactggcaaggaggatttgcaccatttgcagggactagccaaggtatccctaccataccccaaatgtctgcagattttatcggtcaaggagggtttacgtcgttaggcgggcctactcagccggttccactgcatgcacctacatatggcaccaacccatggcaaggacaatccatggattacggtgggtcatttcgccctgaactaatgtcagggtttaggccttacactacatcgtacggcgacatgtcctgcttcggtggagggtcgtcatcggtacccaatgagcttcgcacttcacaaactgatgatgcaccccaagtgacacagcccatacaaccagaggttggcgaaggaaacgacaatgacccgcgtagatctaaccgtgagcgccatgagccgaaccgtctgtcactctcaggcccgcgacatgccgtaggacaaaggaaaaaaactacaaaaaaacgaggtggcacatctatgactacgactgaccatgacgatgatgacgagtacaactga

SEQ ID NO: 21008 - DNA, 3120 bp, Oryza sativa
  Clone ID: TF_OsC789_1
atgaagctctcgccgtcggccggcggcgtctccgaccagccgccgtcgccgccggaagttgcagaggagcagaagtgcctaaattctgagttgtggcatgcatgcgccggccctctcgtttcgctgcctgcggtcggtagtcgggtggtttattttcctcaaggccacagtgagcaggtagctgcatcaacaaataaggaaatggagtctcagatccccaactatcctaacctgccgccgcagcttatatgccagctacataatgtgaccatgcacgccgatgcagagacggatgaagtctatgcgcaaatgacgctgcagccactcagcccgcaagagctcaaggatccattcctacccgccgagctaggcactgccagcaagcagccaacaaattatttctgcaaaacgttaactgctagtgacacaagtacacatggtggattctctgttccccgtcgagcagcagagaaagtatttcctccgctggatttcactcagcagcctccagctcaagagttgatggcgaaagacctccatggaaatgaatggaaattccgtcatatctttcgtggccaaccgaagcggcatcttctgactacgggttggagcgtctttgtaagtgcaaagagactggttgctggagactctgtcctttttatctggaatgacagtaatcagctgcttctgggaattcgtcgggcaaataggccacaaacggtcatgccatcatcagtattgtctagtgacagcatgcatattggtctgcttgctgcagctgctcacgccgcatcaacaaatagccggtttactattttctataatccaagagcaagcccttcggagtttgttataccactggctaaatatgtaaaggctgtctaccatacccgcatatcggtgggcatgcgtttccggatgctttttgaaacagaagaatccagtgttaggagatacatggggacaataacaggaataagtgatcttgatcctgttcgttggatgaactcacactggcgctctgtcaaggttggatgggatgagtcgactgctggagagagacagccaagggtgtctctttgggagatcgagcctctgacaactttcccgatgtatccatctccttttcctctcagactaaagcgtccatggccaacaggcttaccttctttatatggcggaaaggaggatgacttggcttcttctcttatgtggcttcgagatagtcaaaacacaggtttccaatctctgaattttggaggacttggtatgagtccgtggatgcagccaaggctggatagttccctacttggtctgcaacctgacatgtaccaaacgatagcggcggcggcggctttacagaacaccactaagcaagtatcacctgccatgctgcagttccagcagccgcaaaacattgtcggtagatcttctcttctatccagtcagattctgcagcaagcacagcctcaatttcagcagatgtaccaccaaaacatcaatggcaactcaatccaaggccatagtcagcctgagtacctccagcaaccgcttcaacattgcccatcatttaacgaacagaagcctcagttgcagccgcagcaacagcagcaagaatcacaccagcagcaacctcagcatcaacaaatgcaacaacagaaacacttgtccaactttcagactgtaccaaatgcattgtcggttttttcacagctttcctccacccctcagtctacaccctccacattgcagacagtttcaccattctcacagcaacataatttccctgacacaaatatcagttgtctctctccatccaatgtctcatccatgcacgatacactgagatcattcccttcagaagctgcttcagacctcccaggtgtgccaagaatcacccctgtacctgtctctgacccatggtcatctaagcgagttgcagtggaatctacgatcacttctcgcccacatgacatttcatcacagatagagaacttcgacttgacaccttctagtattcctcaaaactccacgttagcaccactgcctggaagggaatgcctggtggatcaagatgggagctctgatcctcaaaatcacttcttgtttggtgtaaatatagactcacagtcacttttgatgcaagatggcattccaagccttcacaatgaaaacagttcaagcacaattccatattccacatccaacttccttagcccttctcaagatgattatccattgagtcaaacactaactactccgggctgcttagatgaatcaggatatgttccatgttcagataatgctgatcaagtgaagcgaccgcatgcaacctttgtgaaggtttacaaatctggaaccgttggaaggttgctcgacatcactagatttagcagttatcatgaacttcgtagtgaggtagggcgcctttttggccttgagggccagttggaagaccctttgagatcaggctggcagcttgtatttgttgaccgagaggacgacgttcttctagttggcgatgatccgtggcaggaatttgtgaacagtgtgtcttgcataaagatactttcgccgcaggaggttcagcagatgggcaagccgggcattgaactcttctcgacttctgcaaggagacttggcaacagctgtgacaactacatgagcaggcaggaatcaagaagcctaagcactggaatcgcgtcggtgggctcagttgagttctgagaaatagggagctcatagcacccggcgttaggcgtccagttctgtacgtctctgtagctcttagttctgtgacctggaacccaagcacataggtcaagtgtagctctaagttatgcgctgtctggtaattatgtcatattacattgacttttagtggtacctattacattttggtatacatgccgacactttgtttcctggaatactgatcatgttaacttagggcatctaattattaggttcatgttgagtagtgctgtagtgccgcaggcgctagctttggccatattctgtatattgatgatgttttcctcctgcaatgtactgttaatgacagcaagtaaggttttccatgcaactgtgaaaattcagttcaagaactattgagcttat

SEQ ID NO: 21009 - DNA, 3021 bp, Oryza sativa
  Clone ID: TF_OsC788_8
ctctcctcttctcctctccacaaaaacatttctactgcttgctcgcgtccgattccccacctccctttccttgccttcctcgctgcctcctcctcttcctcctccgtctccgctagggtttccgcgccgccgccgccccgatccgagatgccgccggccgccatggctccccctcccccgccgcagggctcctccacaggggatccgctctacgacgagctgtggcacgcctgcgcggggccgctcgtcaccgtgccgcgggtgggcgacctcgtcttctacttcccgcaggggcacatcgagcaggtggaggcgtccatgaaccaggttgccgacagccagatgcgcctctacgatctgccctccaagctgctttgccgtgtcctcaacgtcgagctcaaggcggagcaagacaccgacgaggtctacgcgcaggtcatgctcatgccggagcccgagcaaaatgagatggcggtggagaagacgactcctacgtccggccctgtgcaggcaaggccgccggtgaggtccttctgcaagacgctcaccgcgtctgacaccagcacgcacggcggcttctctgtactccgccgccacgctgatgagtgcctccctcccctggatatgacccagtcgccacccacacaggagctcgtggccaaggatctgcacagcatggactggcgcttccgtcacatctttcgcgggcaaccgaggaggcatctccttcagagtggttggagtgtgtttgtcagttccaaaaggcttgttgctggggatgctttcattttcctcagaggagagaatggtgaactccgtgttggtgttagacgagctatgaggcagctgtccaatgtgccttcttcagtcatatctagccaaagcatgcacctgggagtccttgctactgcatggcatgctatcaacacgaagagtatgttcaccgtctactacaaacctaggacgagcccttcagagttcattataccatatgatcagtatatggagtccgtcaaaaacaattactctgttgggatgaggttcaggatgaggtttgaaggagaagaggcaccagagcagaggtttactggtactataattggcagtgagaatctcgacccagtgtggcctgaatcaagttggagatccctgaaggtgcggtgggatgaaccatcaactattccgcggccagatagagtctctccttggaaaatagagcctgcttcatcacctcctgttaacccccttcctctttctagggttaaaagacctaggccaaatgctcctccagcatctcctgaatctcctattcttacgaaagaagctgctactaaggttgacactgatcctgctcaagcacaacgaagtcaaaacagtacggtcttgcaaggtcaagaacaaatgaccttgaggagcaaccttactgagagtaatgactctgatgtcactgctcataagccaatgatgtggtctccatccccaaatgctgcaaaagcccaccccttgacatttcagcagagaccccctatggataattggatgcagttgggaaggcgtgaaactgactttaaggatgtccgttctggctctcaatcttttggtgattccccaggcttctttatgcagaattttgatgaggctcctaaccgtcttacttctttcaagaaccagtttcaggatcaaggttctgctcggcacttctctgacccatactactatgtatctccacagccttccctaactgttgaatcaagcacacagatgcacacagacagtaaggagttacatttctggaatggccagagtactgtgtatggtaattcgagagaccgaccacagaatttcagattcgaacagaactcatcaagttggttaaatcagtcatttgcccgacctgaacagccaagagtgattagaccgcatgcatcaatagctccagttgagttggaaaaaacagaaggcagtgggtttaagatttttgggtttaaagttgatacaaccaatgctcctaacaatcacttgagctccccgatggctgcaacacatgagcctatgcttcaaactccatcatcattgaatcagttgcaacctgtacaaactgattgcattcctgaggtatcagtaagcacagctggaacggcgactgagaatgagaaaagcggtcagcaagctcaacagagttcaaaagatgttcaaagcaagactcaggttgcttcgacgaggagttgtacaaaggtccataagcaaggcgttgcacttggcagatctgtggatctttcaaagttcagtaactatgatgaactcaaagctgagctagacaagatgtttgaattcgatggtgaattggtgtcttcaaacaaaaactggcaaattgtttatactgataatgagggtgatatgatgcttgttggagacgacccatgggaagaattctgcagcattgtgcggaagatttatatttacaccaaggaggaggtccagaagatgaattcgaaatcaaatgccccaaggaaagatgactcttcagaaaatgagaaaggtcatctgccgatgcccaacaaatcagataactaggttcagtgaagcgagatgatacaagaggtagatcgcatggagtcttgagagagagatgccattctgcgggtcccagtcaagtaaaccccctgatgtgttggtgatcacccctgcccccccttttgcttatctgatggctgatgcaatgcaaaccctatggctttagctagtatgagatgtagactgcctattgtttatccttttgttcctttttcttctcttggcagaaagatttagggccaagatttatcattattgctattgcccctctcaactcctcccaactctctgatgtaaatatttatctacgtagccagccacccagccagaagtagagcagtagtagtagagttaccccctaccttgtattaaccagcagcctattcccccggataaatttgtgtaagctctgtagctcgagataaaaaaaatggcgatcgaacgaac

SEQ ID NO: 21010 - DNA, 3271 bp, Oryza sativa
  Clone ID: TF_OsC790_1
ctgcaggaatcggcacgaggattgctgcgacggtccaggtttggttagttgttgagggaggaaaaaatggaagatatttctgggcgcaagagaggaaggcaggtgtttgctgctgctgctgggagcatgatgggaagctgaccagcagcttctccggtatcctggtgcggcggagtttcgtgctctttggcgacgggtgcactggtgattggagatgaagctctctccgccggcgtcggcggatatgccgcaggccttgccggagaacgacggggaacaaagatgtctgaactcggagctgtggcatgcatgcgctgggccccttgtgtctttgccagtggtcaggagcagggtcgtctactttccacagggccatagcgagcaggttgcggcatcaactaataaggaagttgatgctcaaatcccaaattatccaaacttacctcctcagttaatctgccagcttcataatgtcaccatgcatgctgatgcagagacagatgaagtttatgctcagatgacattgcaaccattgagcccggaagagcaaaaggagcctttccttccaatggagttgggtgctgctagcaagcaacccactaattacttctgcaagacattgactgcaagtgacacgagcactcatggtggtttctctgttccccgccgggcagctgagaaagtcttccctccactagatttttcacagcagcctccggcacaggagctgattgcaagagatttgcatgataatgaatggaaatttcgccatatatttcgtggtcagcctaaaaggcatctcctgacaacaggctggagtgtgtttgtgagtgcgaaaagactagtagcaggagactctgttatatttatctggaatgataacaatcaacttcttttgggaatacgtcgtgcaaatcgccaacagactgttatgccctcttccgtgttgtcaagcgatagcatgcatataggtcttcttgcagcagcagctcatgctgcagccacaaatagtcgcttcactattttctataaccccagggctagcccttctgaatttgtgattccattggccaagtatgtgaaagctgtttaccacacacgtgtatctgttggaatgcgttttagaatgcttttcgagacagaggagtcaagtgtcaggcgatacatgggtacaatcaccagcataagtgatctagattcagtgcgctggccaaactcacactggcgttctgttaaggttggttgggatgagtccaccactggtgataaacagccaagggtttctctttgggagattgagcctttgacaacctttccgatgtaccccagtgcttttcctttaagacttaagcgtccgtgggcttcaggactgcctatgcatggcatgttcaatggtgggggaaatgacgattttgcacgctattcttctctcatgtggcttcgagacggaaatagaggaacccagtccctgaattttcaaggacatggagtctcaccatggcttcagccaagaatagattctccattgctgggccttaagccagacacgtaccagcaaatggctgcagcagcactggaagaaattcgatatggggacccttcaaagcagcatccagctactctgcaataccaacagactcataatctgaacagtggattaaattctctgtttgcaagccatgttctagggcaggtgcagtttcaacctcagcagtcacccctgcaagttgttcagcaaggccattgtcagaacactggtgactctgggttccttcaaggtcagcttccacggctgcagttgcataacactcagcagctgctaaaggagcaagagttgcagcagcagcaaagacagcatgttttacaagagcaatctagtcaagagatgcaacagcagctcccatctagtgatcatcatgttgctgatgtagcttctgagtctggatctgctcctcaggcacaatcatcattgcttagtggatcatcattctacaatcagaacctcttagaaggaaatagtgatccccctttacatctacacaacaatttccacaacttctctaaccaggaagcctcaaaccttcttattttgcctcgaagtagccaattaatggcatcagatgggtggccttcaaagcgattaactttagaatctgctgttcatcctgaagctccgtccatgcaccccaagattgagaaagtaaatcaccagggtatatctcattttcctggcgcctttccaccacaatcagcaagaggctgttccatcgtccaggattgcagggcagatgctgagaaccgcctactttcatcatcatttgaactccaggatggcatgacaagcatcataactgatgctaacagagaaactgatactatggccatacctttgttgagatatagtggtgcagatttgacaactgaaaacaccttagcaacctccaattgtttaggtgaatctggaacgttcaatcctcttaataacatatctgtaaatccatcacaaggagcaacctttgtgaaggtttacaaatcagggtcccttgggagatcacttgacatctccagattcagcagctactgcgagttacgtagtgagcttgagcgtctctttggtcttgaaggccaactggaggaccctgtaagatcaggctggcagcttgtatttgtcgaccgggaaaatgacattcttctcgtcggcgacgatccatggcaggagtttgcaaatagcgtatggtgcatcaaaatactctcgccacaggaggtgcagcagttggttcgtggtggagacggccttctgtcctcacctggagcaaggatgcagcagagcaatgcctgcgacgactattctgcaagccacaacatgcagaatatcgccggaaacattgcatctgtagcgcctctggactactgagatgtagaccagaatccaaactaagcacccttaagactgcagggtcaccattcgtgatcgcctgcattccatgcgatcttcactagtcctgtccgaatcagtagcaactcagtcaataatatagctagatgatccgttgtattccatctgatcatggacatgctgtatgatagctgctttagctctattaaatctctaatggcaggcaactaggcaagaacagttctatgatgaatgatggcagtcgctgtagaattgaccttattctgtagctataatatgatgtctagaactgatgattccaatttccaaatggagcccggaacatattaaaatcaatcatttgtcgccttcttc

SEQ ID NO: 21011 - DNA, 2352 bp, Oryza sativa; identical to SEQ ID NO: 11267
  Clone ID: TF_OsC794_2

SEQ ID NO: 21012 - DNA, 789 bp, Oryza sativa
  unsure (1)..(789): unsure at all n locations
  Clone ID: TF_LIB4506-019-R1-K1-E8
cggattcccgggtcgaccccgcgtccgcttcttcttcttctctcctcacttcgctcgctccctcggtcgctcggccgccatgtcgtcgcaaggagcaggaggaggggtaggggacccggagctgttcgcggagctgtggcgggcctgcgcggggccgctggtggaggtgccgcagcgggacgagcgggtgttctacttcctccagggccacctcgagcagctgcaagagccgacggacccggcgctgctggcggagcaaatcaagatgttccaggtgccgtacaagatcctctgcaaggtcgtcaacgtcgagctcaaggccgagacggaaaccgacgaggtgttcgcgcagattaccctgcagcctgacccggatcaagagaatctgccaacattacctgacccgcccctgccggagcagccgaggcctgtggtgcactccttctgcaagatcctgaccccatccgacaccagcacccatggcgggttctccgtgctccgacggcatgccaacgagtgcctcccgccactggatatgtccatggcgacaccaacccaagagctcatcacaaaggaccttcatggatctgagtggaggtttaagcacatctacagggattgtagtagctttatgtgcatgctggcgcttattcgtgcnattctcggttccctaggccaaccccgtaggcatcttctgactactggatggagcacgttttgtgacatcgaagaagctgatttctgcngacgccgtttgtctacttgaggagtgagacaggagagcagcgt

SEQ ID NO: 21013 - DNA, 3013 bp, Oryza sativa
  Clone ID: TF_OsC789_2
atgaggctttcgtcgtcgtccggcagcgtcctcccggctcaggcggcgtcgccggaagctgtagaagaacaaaaatgcctgaattcggagctctggcatgcgtgtgccggtccccttgtttcgttgcctgcagtgggtagccgagtggtttatttcccacagggtcacagcgaacaggtagctgcatcaacaaataaagaaatggagtctcagatccccaattatcctaacttgcctccacaacttatttgccaacttcacaatgtgacgatgcatgcagatgcagaaacagatgaggtttacgctcagatgacgctacaaccacttagcccgcaagagctcaaggacccatatctaccagctgaattaggttctgccaacaaacagccaacgaattatttttgcaaaacattaacggcaagtgacacaagtacgcatggcggattctctgttccccgtcgagcagctgagaaagtgttccctccgctggattttactcagcagcctccagcacaggagttaattgcaaaagatcttcatggcaatgagtggaagtttcgtcatatctttcgtggtcagccaaagcgacaccttctaactacaggctggagcgtctttgtaagtgcaaagagacttgtcgccggggattctgtcctatttatctggaatgacaacaaccagcttcttctgggaattcgtcgagctaaccgcccacaaactgttatgccatcttcagtcctatctagtgatagcatgcatattggtcttcttgctgcggctgctcatgctgcttcaacaaatagccggtttacaattttttataacccaagagcaagcccttcagagtttgttatcccactttctaaatatgttaaggctgtatatcatacccgtatatctgtgggcatgcgtttcaggatgctttttgagacagaagagtcaagtgtacggagatacatgggcacgataacaggaattagtgatcttgatgctgctcgttggccaaactcacattggcgttctgtaaaggttggctgggatgaatcaactgccggagagaggcagccaagggtgtcgctttgggagattgagcccttgacaactttcccaatgtacccatctccttttccactcagactgaagcgtccatggccaacaggcttgccttcattacatggtggtaaggatgacgacttgacttcttctctcatgtggctccgagacagcgcaaatcctggtttccaatcattgaatttcgggggtctcggtatgaatccttggatgcagccaaggtttgatgcttccttacttggtctgcaacctgacatgtatcaaacgatagctgcgactgctttccaggacccaacaaagcaggtctctcccacgatattgcagttccagcagccgcagaacataggtggcagagctaatacacttctgccaagtcagattttgcagcaagtgcagcctcagtttcagcagcagcaatacctccaaaacatcaacgagaccacaatccaagggcatgctcagtctgagttccttcagcagcagctccaacgctgccagtcgtttactgagcagaagccacagctgcaaacccagcaacaacagcaagaatcacagcaacaacagcagcagcaatcgcagtgtatgcaagtcccacaacatcagcaaatgcaacagcagaagaacatgaccaactatcagtctgtacctaatgcattgtcaccgttttctcaactctcctctccttctcagtcttcacctatgacactgcaaacagtattaccattctcccagccacagagctatccagacacgagtatgagctcattgtcaccatccaacacatccaccatgcataatgcattgaggccattttcatcggaagcaccttcgcacctaagcatgccaagaccgactgcagtacctgtccctgacccatggtcatcgaagcgagttgcagtggagtctttgcttccctctcgtcctcaggttacatcgcagatggagcagttggactcaacagcacctagtataccacaaagctctgcgttggcgccgcttcctggaagaggatgcttggtggatcaagatgggaactctgatcctcaaaaccatctgttatttggcgttaacatagattcacagtcacttctaatgcaaggtggcatcccaagcctccagggtgagaatgattcgacggcaattccttattccacctccaatttcctgagcccgtcgcagaatgatttccccttggatcaaacactaagtagtgcagactgcttagatgaatcaggatatgtgccgtgttcacagaattctgatcaagtgattaatcgaccacctgcgacctttgtgaaggtttacaaatcgggaacctatggaaggtcacttgatatcactagatttagtagctatcatgaacttcgtagagaactagggcgcctatttggccttgagggccagttggaaaaccctttgagatcaggctggcagcttgtattcgtcgaccgagaggatgatgtcctcctcgttggcgacgacccttggcaggaattcgtgaatagcgtctcctgcataaagatactttcaccacaggaggtgcagcagatgggcaagccctttgagcttttgagctcggctcccggaaagaggctaggtagcagctgtgatgactatgtgagcaggcaggaatcaagaagcctgagcacaggaattgcatctgtcggctcagttgaattctgaagcaagggcgctaacgagcccttcaatcaaatctagcctgttacctatgtttctgcagtttttcttcccctagttttgagacctggaactgaaagaacatagatccatgcttagctaagttatgtaccatctaataattatgctatatgatatcaaattccaagtagaaactatcaacttttggtatatatatatataccaaaactttgttccatgaaacactaatcctgtgaatgtaggccatctaaattatcaggct

SEQ ID NO: 21014 - DNA, 2952 bp, Oryza sativa
  Clone ID: TF_OsC785_1
acggcaatagcttcgcgtagcttagctcggcttccccctcattcatggccattaccacgatgtgtcaccccaccccaccaccgcccgctgctccacttctcctcctcctcctcctcctctcctagtagtagcaagcttccggcaccacccccacccgcttcatttatcacttgtctccccctctccctcgcctgctccgctgctcttgtgcttcgcgcctcgcctgacctcgctgtcgctgccgccagccatgaccgggatcgacctcaacaccgtcgaggaggacgaggaggaggcggcggaggaggtggcggcgaacggctcgtctccggctccggcgagggcgggcgcggtgtgcctcgagctgtggcacgcctgcgccgggcccgtggcgccgctgccgaggaaagggggcgtcgtcgtgtacctgccgcaggggcatctcgagcacctcggcgacgcgcccgcggcggcggcggccgcggccgccgtgccgccgcacgtcttctgccgcgtcgtcgacgtcaccctcctcgcggacgcggcgaccgacgaggtgtacgcgcagctctcgcttgtcccggagaaggaggaggtggcgaggcgggcggacgacggcgagggcgaggacggggacggcatgaagcagcggttcgcgcggatgccgcacatgttctgcaagacgctcacggcgtccgacaccagcacgcacggcggcttctccgtgccgcgccgcgccgccgaggactgcttccctccactggattacagccagcagcggccgtcgcaggagcttgttgccaaggatttgcacagcactgaatggaggttccgccatatttaccgaggccagccacgtcggcaccttttaaccacaggttggagtgcatttgttaacaagaagaagcttgtttctggggatgccgtactatttttgcgaggtgatgatggggagctaagactgggagttcgccgtgcagctcagcttaaaaatgggtctgcttttccagcactttacaaccagtgttctaatcttggtacacttgccaatgttgcacatgcagtggctacagaaagtgtgttcaacatatactacaatcccaggttaagtcagtccgaattcattgtaccctactggaagttcatgaaaagcctcagccaaccattttctgttgggctgaggttcaaaatgagatatgaaagtgaagatgctactgaaagaaggtacaccgggataattactggaagtggtgatacagaccctatgtggcatggttcgaaatggaaatgtttgttggtgaggtgggatgacgacgctgagttccgtcgaccaaacagggtctctccttgggagattgagctgactagttcagtgtcaggatcccatttgtccacaccccattcaaagcgattgaaaccatgtcttccccatgttaatccagaatacatggttccacgtggaggtggttgtcctgattttgcggaatctgcccaattccacaaggtcttgcaaggtcaagaattattgggttttaaatctcatggtggtactgctgctgctacttctcagccatgtgaagcaaggcatttacagtacatcgatgagcggagttgctccagcgatgcgagtaacagtatcctaggggttccaagacttggtgatagagcaccacttggaaacccaggattttcctaccattgctcaggctttggggagtctcacagactccaaaaggtcttgcaaggtcaagaattatttcgtccctaccgaggaactttggttgatgcgtctatgggtagtaatgggtttcatcaacaagatagtcctcgtgcaccaggtgtggtgaataaatggcaggcacaacttcatggccgtgctgcttttcatggaccaccagcactggctcttccatctcaatcatcatctccgccatctgtcctaatgtttcagcaagctaattcaaagatgcccaggttggagtttgggcatggacagttggacaagcacgagaatgataggcgtgttaggtttggtccttctgaaggaattgaaagaagagagcaaagaataccactccagccttatcctacttctggagaagtgatagatggacaggttacagttgagaagtctcactcccctggtcgacatggaaaggatggtccagataacaaagctgttggcacaaatagttgcaaaatatttggcatctctttgactgagaaggttccagcaagagaagaactagatgatggcgacgccaactattcactccagtctttgaagcaagtgccaaaatccctgggcaatagttgtgctaccgttcatgagcaaaggcctgttgttggcagggtgattgatatttcaactatggatatgatgatctgatttatgagctggatttgcaaaattatctggaggtgaagtaacactaggattgcttccaaccacatattttgctgtggatctccagatggtggccgagtatcagggagatggagggactgatgattctgatatttttatcttagatgtaggcgttggagcacttatcatgtgacatagtacctagctgctcgtctgcatttgttgcctctgcaactttaactgtcagcggcatttgtcgccgctggaaccatctaagtacgtgtttataagctgtaagctatgacaagcgcattagagggtgctggtactgttagaacattaattaatgtcagtagcatgctttgatcttaaaaaaaaaaaaaaaaaaaaaaaaaaaaaaaaaaaaaaaaaaaaaagggggggagcctcgtccgaattcctgcagcccgggatgcttttcctatgttgaccggagttcagtataacatgatggtggctttgggagacctcatgttttgaaaccttggtgctgatcgctgatttgtaactataaatttagttgtatttctaccacttagcttatt

SEQ ID NO: 21015 - DNA, 2678 bp, Oryza sativa
  Clone ID: TF_OsC795_1
gcagcaccacccggtgaccacaccaaaccaccccaaacaccaccacccccacctccctccctcctcacacttgtccgctctcttcttcttcttcttctctcctcacttcgctcgctccctcggtcgctcggccgccatgtcgtcgcaaggagcaggaggaggggtaggggacccggagctgttcgcggagctgtggcgggcctgcgcggggccgctggtggaggtgccgcagcgggacgagcgggtgttctacttcctccagggccacctcgagcagctgcaagagccgacggacccggcgctgctggcggagcaaatcaagatgttccaggtgccgtacaagatcctctgcaaggtcgtcaacgtcgagctcaaggccgagacggaaaccgacgaggtgttcgcgcagattaccctgcagcctgacccggatcaagagaatctgccaacattacctgacccgcccctgccggagcagccgaggcctgtggtgcactccttctgcaagatcctgaccccatccgacaccagcacccatggcgggttctccgtgctccgacggcatgccaacgagtgcctcccgccactggatatgtccatggcgacaccaacccaagagctcatcacaaaggaccttcatggatctgagtggaggtttaagcacatctacaggggccaaccccgtaggcatcttctgactactggatggagcacgtttgtgacatcgaagaagctgatttctggcgacgcgtttgtctacttgaggagtgagacaggagagcagcgtgtcggagtgaggcgtcttgtgcagaaacagagcacaatgccggcatctgttatatcaagccaaagcatgcatcttggtgtgcttgcaagtgcatctcatgctatcaagactaattcaattttcctagtgtactacaggccaaggttaagccaaagccaatatattgttagtgtgaataagtaccttgcggctagtaaggttggatttaatgtgggcatgaggttcaagatgagttttgaaggggaagacgtcccggttaaaaagttttctggaactatagttggtgaaggtgatctttctctgcagtggtcaggttctgaatggaagtccttgaaggtccaatgggatgaagtcacaaatgttaatggccctgagagggtttccccttgggaaattgaaacatgtgatggcactgcacctgccatcaatgtacccctgcagtcagcaacgaaaaacaagcggcctagggagccaagtgaaactattgaccttcaatcactggaaccagctcaagagttttggctatctggaatgccacaacagcatgagaagacaggtattggttccagtgaacctaattgtatctctggacatcaagttgtttggccaggcgagcatccaggatatggtgccgtgagtagttcagtttgtcagaatccgctagtacttgaaagttggttgaaggatttcaactcttcaaacaagggtgtctcccctaccttgtcagagatttctcagaaaatttttcaggttaccagcaatgaagcaagaattgctacatggcctgcacgttctgcttaccaagctgaggagcccacttccaagttgtcttcgaacaccgctgcctgtggttaccgaactgaagaagttgctccaaatgcgtccaaggttgttgaaggaaaaaaggaacctgccatgtttcgtctgtttggtgtggatttgatgaaatgtaccagcatatctactaccactgatgacaagtcaagtgtgggagcaggagaagcttcagccaaaggtactggttctcacgaagactctggtcagctgtcagcattctcaaaagtgacaaaagagcatattgctgcggatgaaagcccccaagagatccaaagccatcagaattacaccgctagaactcgcataaaggttcaaatgcatggaaatgctgtgggcagagctgtggatctagctaatctagacggatatgagcaactgatgaatgagctggaagagatgttcaatataaaggacctcaaacaaaaatggaaggtggctttcactgatgatgagggtgacacaatggaagttggagatgatccttggctggaattttgccagatggtcagaaagattgtgctctatcccattgaagacgagaagaagatcgagcctcacccgaagttactgtcttcagctaatccagagcaggatcagaagactgggttttaggagggaggctagggctgaaaggtggattttttagcctttcaccattgaagcgttggtggctatcgttttgtcgttggagatggtcgtagctgaaaaaatggtggctactggctagttcatcgtattgatgcaacagatttgttgctggtgtcaaaactgtttcttcacaagcattttgaagaacaaattgatgtaacataggtttcaagaaaaaaaaagatttgacaatgtctctttagtagtttgctcaagtttagtcaaaaccttaatggtgcttaaggaataacgtgaagctataaaactggtgtgtaagttctgtaaatattataagggagattataattttgtgatattagctttcaccctttaatttattggtatatattgaaaaaaaaaaaaaaaaaaaaaacctgcagcccggggatccactagtttagagcgc

SEQ ID NO: 21016 - DNA, 2256 bp, Oryza sativa
  Clone ID: TF_OsC86356_1
atggggattgacctgaacacggtggaggaggaagcggaggagggggcggcggcggcggtgtgcggggagctgtggcacgcgtgcgcggggccaggggtggcgctgccgcggcgcggcagcgcgctcgtgtacctgccgcaggcgcacctcgccgcggacggcggcggcggcgaggtgccgcctgccggcgccgcggccgtgcccccgcacgtcgcgtgccgcgtcgtcggcgtcgagctgcgcgcggacgcggcgacggacgaggtgtacgcgcggctcgcgttggtggcggagggcgagatgttgcagcggaacttccgcgagggtggaggtgaagatggtgcaggggagatggagggttgtgatgcagaaaagaagccccggatgccacacatgttctgcaaaactctcacagcatctgatacaagcacccatggaggtttctctgttcctcgccgggctgcagaggactgtttcccacctttggtgatacacttaaaagaaaaacttgtaacttttaatgactataagacagttagaccttctcaagagctgattgccgtggacttacatggcacacaatggaagttcaggcatatttatagaggtgatgatggccaactaagattgggtgtaaggagagcagttcaacttagaaatgaggccctctttgaacctgtcaacagcagcgattcaaagctacgcattctatcttctgttgccagttccttggaaaataaaagtgttttccacatttgtttcaacccaaggagtggtgcgtcagaattcattgtaccgtattggagattattgaagagcctgaaccatccattttccattggaatgaggttcagagtttgctatgagagtgaagatgctaatgagaggtccgctggattaatttcaggcattagtgaagttgaccccataagatggcctggatcaagatggaaatgcctactggtaagatgggatgatagtacagatagcagccaccaaaacagagtttctccatgggagatcgagagagttggtggcagtgtctcggttacccattccttgtcatctgggtctaagcgaaccaaattgcactttcctcaaggcagtttggatactccatttcttaatggaaatggtcacccggactccatgggaactgaaaatttccacagggtcttgcaaggtcaagaatttaggggttctaggtcccatggtgttgtatgctctgaatcacctggtgtaccaaactttcaatctcctgacaataggagattttctgctgatatgcggggctacatgatgccagcaagtgggcccccacagcggaacacagagtttacttatcagcccataggcttcagtgagtctcttggattcccagaggtcttgcaaggtcaagaaatgtcacaagtagttcctttgttccgaggagctacttttggcgctcgtacacagaatgacagagttgtctctgctaattctgtgcatagatcagctgcacagagtggattgctagcttcaactctagggcatcccatctcgcagtttactctgtcatcgtcaaaggtatcttctccctcgtcggttctgatgtttaaccaagcgacagctccaaatcatgaaacagtaagcggaaccaacaacaaaggtatgcatgtcagccagtttgcttcccaggagatgctctcagaaactgtaacctggcccggcacacaacgtcaaacgccgagcgaaatcacgagcaaccagttcgccctggcgagaatcccagctcctccaagcggagctgaatccggattgcccaagagggatgccgggagaagcagctgcagactgtttggcttctccctgacaggcaacatgctgggagaagatggagaaggcctagatgatggagccattgaagctggttgcgaaaacccgcccgtgctggagctgtttgggcacagccattctactcccggtgctcttcatgccctgtgtgctgctgctcccctgggaatgtgatgctgctgcagtactgatggtttgctctggggaaatggtcgttgcatcaagctacctagctgaaacaaactgaataatgtgttagctacttcctagatttcttcggcacattcttgtaaggattgcagcggcgccatttgtatgttggtgccacatgatgcatgtaagactgtaactgtaccttgaaatttcggctgtttgtccgtagcttatgacatgaagactatgcagaagcagatcctcgaactt

SEQ ID NO: 21017 - DNA, 2385 bp, Oryza sativa
  Clone ID: TF_OsC12032_1
atgggcatcgacctcaacaacaccgcgagcggcggcgaggaggacgcgccggcgccggggccggtgtgccgggatctgtggcacgcgtgcgctgggccggtggtgtcgctgccgcggcggggcagcgcggtcgtgtacctgccgcaggggcacctctccgcggccggcgccggcggcgggatccgcggggaggtggcggttgccctccctccccacgtggcgtgccgcgtcgtggacgtcgagctatgcgtatttgagaggaacttgcatggtggtggaatcgaaagggaggatgacatggaggatggtgatgaggaaaggaagtccaggatgctgcacatgttctgcaaaacactaacggcctctgatacaagcacacatggagggttctctgttcctcgtcgggctgctgaggattgctttccacctctggaccacaaacagctaaggccttctcaagagcttgttgccaaggatttgcatggagcaaagtggaggttccgccatatttatagaggtcaacctcgcaggcatcttttaacaactggatggagctcctttgtcaataaaaagaaactggtctcaggggacgcggtgttatttctccggggtgatgatggtgagctaagattgggtgttcgaagagctactcagcttaaaaatgaagcgattttcaaagcttttagtagcgaaagttcaaagatgcgcacactgtcggctgtggctgattccttgaaacatggaagtgtttttcacatttgttacaacccaagggctactgcttctgagtacgttgttccatattggaagttcgtgaaaagcttcaaccatccagtttgtattggaatgaggttcaagtttcattttgagagtgaagatgttaatgagaggcgttctggaatgattgccggtgttagtgaagtagaccccatcagatggcctggttcaaagtggagaagccttctggttcgatgggaggatgctactgactgcaacagccaaaatagagtatctccatgggagattgagatagttggtggttcaatctctgttgctcattctctgtcggcatccagttctaaaagaaccaaattatgccctcagggcaatttggacgtgccagctctgtatggaaatggtcgtccagactcggtggaaactgaaaagttccccagggtcttgcaaggtcaagaattgatgggttctaggacccatcgtgctacttgttctcctcagtcaatcgacattacaaaaagtaagtcttttgatgcttggagattccttactgatacacgaagctgcatgttgggcagttcaacaagcagacttccagtgcagtactctggctatacccaccaatctgtaagcttcggtgaatctattggattcccagaggtcttgcaaggtcaagaaatttctcagacagttcctccgtttcaaggaatgttgcctgatgcatgttcagcgaaaagcagatatgaattaaagaattatgtgtgcaccccagctaccatgaatggactatcatctgcaaatgaaggatattgtctctccctgtcaactgtgccaccttctccaccttccagtcttatgttataccaaacaggggtaccacagcttgaattggcaagcaagaacaatgacaaaagtggaaatgacagccaaccagccttgcgacagcacaagttgctcagtgaaactagctgggaccagtttaaaattggaaaggcttcaacacctgggaatgctactaagcctggtaatggtggaagggaggttgacagaactagttgccgcctttttggtttttccttgaccgagaagattatcccaacagacaaagatggtgaaaaggaagtgagttatgaaactgattgccaaaatccacggatgctagacttgtttgggtacaattgcagtacgcctggtgctcttcatgccctttgtgctgctcctttgggaatatgatgctacttgagtaactgggagggatacgtacatgtggagacgcagccactccacgcttcatcccagatgtaaacggcatcggtctggttatggtcccaccgttcctgatgctttgcatgtaggtattgctgcctcacgcctgaatacctacgtgcggtcaggcgaataaagcgactcgattgtatgtttgactgcagctctagctgtcgagtcggaagggcgatgatgtttatcgtcgttaatgtaccatcggcaccctgtttatgcagaaatgtagacctaattattatgaacctatttccttagttctatgtatggttagcttctgatctagacctagttatgagcctatttcagaagtgctatgtatggtttgcttgtcaacatttgtttctgtatcggtacaaatcctcgtgc

SEQ ID NO: 21018 - DNA, 3865 bp, Oryza sativa
  Clone ID: TF_OsC792_1
ggggcgaccaaggtgaaccaggagctgtggtacgcgtgcgcggggccgctcgtctcgctgccgccgcaggggagcctcatcgtctacttcccccagggtcacagcgagcaggttgcagcatctatgcgaaaggacgcagatgcgcaaattccaagctatccaaatcttccatcaaagctgatatgcatcctccacagtgtcaccatgcttgctgatcctgacacagatgaggtttatgctcgaatgactctccagccagttagcaattgtgacaaggagacattgctagcatcagagcttgcgctgaagcaaaccaggccacaaacagaattcttttgcaaaacactgaccgccagtgatacaagcactcatggaggtttctctgtgccacgccgtgccgctgagaggatttttcctcgtcttgacttctccatgcagcctcctgcccaggaactgcaggcccgggatttgcatgataatgtttggacatttcgtcatatataccggggtcagcctaaaaggcatttactgactacgggctggagcctatttgtcagtggaaagagattacttgctggtgattcagtcttgtttattagggatgcaaaacagcagctcctcttggggatcagacgagcaaataggcaacctacgaacctctcatcatctgtcttatctagtgatagtatgcatattggaattcttgctgcagcagcccatgctgcagcgaataacagccaatttacaatatattataacccaagggccagtacttccgaatttgtgattccttttgccaaataccagaaggcagtgtatggtaaccaattatctcttggcatgcggttcagaatgatgtttgaaactgaagagtcaggaacaagaaggtacatgggtacaataactggtataagtgatctggatccagtaaggtggaaaacatctcattggcgcaatattcaggttgcatgggatgaagcggcaccaactgagagacgcaccagggtttccctctgggagatagagcctatcattgctccattcttcatctacccctcaccattattcaccgcaaaacgtccaaggctacctgggatgacagatgacgagactgaaatggacggtcttctcaagagggccatgccatgggttggtgaggagatttgcaagaaagatctgaatattcagaacagtgtagtgcctggtctaaatctagctcagtggatgaacatgcagcacagctcctcgcttcctggcacggttgtgcaaccagagttactaaactcattaagtggaaaacctgtacaaaatttggctgcagctgatttatcaaggcaaatcagttttcacccgcagttcttgcaacaaaacaacatccagttcaacactgcgttggtacctcaacaaaaccaacagacagaacaattagcgaaagttatccctacaccaaaccaattgggaagtgttataataccgcagaaggtggttcaggattgcaactctgaacaaaggcagcatgtggttactcaaccagtgcaaggcagccagccaaacataaacattccacagcctcagcttgttgttcaggctcagcttcagcaaccgcaagtcattctccaggcgcaactgcagcaacctcaagttgttgtccaggcccaactccagcaaacgcaaccttcggtccaaagtcacactgtcttacaaggaggtcttcaacaaatccagcttctccagcagcaacagccacatgtgcagcaccagcagataccgcaacagttacatcatcagcagcagcaaacacaacagttgcaacctgtccagcaggttcagcagtcagtacaggaacatcagcaaataaagatacaacctgttcatgtttccatggatgcaagtatgaatacgcaggtggcagatcatcaaatgaaactacaactactcaaggctttacagccacagcagcctctgatctcagagcagcagaagatgcttttggatttgcagcagcaagtgataaattcacagtcagctcctcagcagtgtgtacaggtaacaaaccaagctattagtttacataacagtaacactattcaatacccgacacagcaaaaggttcagtctcaccaagttcaagacttaactgggaatgtcattcctaattcaaaatcagacatcgctacttccatgggtgctagttctttgcatgtagctggtggacgccaattattgaagacagatgatgttccgtctacttcaacatcaccatccactaacagcaatcctgttcttctgcaatccatcccaagtagctccaagaaccaaagtttaactacagcaggaaagacatctcaatcatctgttgtgttgggtcctacgatcgaacaggacacaaagccatatcaaaatgtaaagcaaacagttatgattcccaagacgacagaacaaaggccagctactggacaagactgcataaataacaatcctcaaatggattacttggacacatcctcttcagctacttcggtttgcctttcccaggctgatggatcattgcaacaaaactttccaccttcatccttccaccagcatcacttgctaaaagacacagttccagatagcgagtttgaggttacagatccaagaaataaccttctatttggggtgaatattgatggtcaactgggtttaccacttaatgcagacctgcttgcgaatgacattggaaccgataaatacatggatcagttgccaggaaatggcatttctaacttcatttcatcaaaggattctcaacaagagttatcatcttcaatgatttcacattcatttggagttgctgatatggcattcaattctatagattctgcaatcaatgataccccattcttaaatagaaattcccggtctgcagcaggtcctgcacatcaacggatgagaacctacaccaaggtacacaagcgtggtgcggtgggaagatcaattgacatcaatcgatattctggatatgatgagctgaaacatgacgttgctcggatgtttggtattgaggggcagcttggtgatcaaaatagagttggctggaagctagtatatgaagatcacgagaaggatgttctactagttggtgatgatccatgggaggactttgtgaaatgtgtacgatgtatcaggattctttctccacaggaagaaatgcagatgagattagtcggcgactttggagacagctttctacccaaccaagcttgcagcagctctgatgggggtcatccctggaggataaccggcgactagggggtagaaactgatcaaaacccactttacatacatactgtagttgctgtcgcctcaagaccgacttttttttgactgttagtctcatgacagtgcaaaggatggtagtaggcaatgataattttggcttcgaaactttgagcttacagtaaatttatcgacaagaaaactcaataaatatggatacaagaggaaggctgtgttggagtgcccagaagcctccatttataagtttactccattattcagactattgtctctgttgcagtcttgtagatgtgctaattctctgtatgtttttatggccttgttaccctcttgtatagcccgtccatatgtctatactacagtgtatatattgctgctgtataagctgcagaatggagattgtcagatatcaccatctgtaagctgttacagatctaaatgggtaaaaaaaaacaacattttatacatgaggaatcgctgatcatgtatttgtatgagagttttctacagtctttgggagctagtgttgagttgtacatttggggatacgaaatatttcaataaattagtaccaaattcttattgc

SEQ ID NO: 21019 - DNA, 545 bp, Oryza sativa
  unsure (1)..(545): unsure at all n locations
  Clone ID: TF_LIB3475-006-P1-K1-D7
cccacgcgtccgcccacgcgtccggttccaggtgccgtacaagatcctctgcaaggtcgtcaacgtcgagctcaaggccgagacggaaaccgacgaggtgttcgcgcagattaccctgcagcctgacccggatcaagagaatctgccaacattacctgacccgcccctgccggagcagccgaggcctgtggtgcactccttctgcaagatcctgaccccatccgacaccaacccaagagctcatcacaaaggaccttcatggatctgagtggaggtttaagcacatctacaggggccaaccccgtaggcatcttctgactactggatggagcacgtttgtgacatcgaagaagctgatttctggcgacgcgtttgtctacttgaggagtgagacaggagagcagcgtgtcggagtgaggcgtcttgtgcagaaacagagcacaatgccggcatctgttatatcaagccaaagcatgcatctttggtgtgcttgcaagtgcatctcatgctatcaagactaattcaattntcctagtgtactacag

SEQ ID NO: 21020 - DNA, 3168 bp, Oryza sativa; identical to SEQ ID NO: 11274
  Clone ID: TF_OsC21910_1

SEQ ID NO: 21021 - DNA, 321 bp, Oryza sativa
  unsure (1)..(321): unsure at all n locations
  Clone ID: TF_8856660
ggtcaggacgcatggcntgcagtggtgccccggcatgcggttcaagatggcgttcgagacagaggactcgtcgcggatcagctggttcatgggcactgtcgccggcgtccaggcctccgaccccgtccgttggccgcagtcgccatggcgtctccttcaggtacacctacacggcaccaacatgagacaaccccaactcgatcacgatagagtcgtagagttcttgatcaattggcctcctcgcaggtgacctgggacgagccggagctcctacagaacgtaaagcgcgtgtgnccgtggctnggtggagctcgtggtcga

SEQ ID NO: 21022 - DNA, 3271 bp, Oryza sativa
  unsure (1)..(3271): unsure at all n locations
  Clone ID: TF_OsC793_1
atgagctcgtcgtcggcggccagcatcgggccgccgcagccgccgccgccccccgcgccgcccgaggaagagaagaagtgcctcaactcggagctatggcacgcctgcgccggcccgctcgtctgcctccccaccgtcggcacgcgcgtcgtctacttcccgcaaggccacagcgagcaggtggcggcgtcgacgaacaaggaggtggagggtcacatcccgaactaccccaacctgccggcgcagctgatctgccagctccacgatgtcacaatgcatgcggatgtggagactgacgaggtgtacgcgcagatgacgctccagccactgaacccagtaaggcgcctggggtttttgcatgatgtttgcagtgctgaggttttgatgcaggagcagaacgatgcgtaccttcccgcggagatggggataatgagcaagcagccgacgaattacttctgcaagacattgacggcgagcgacaccagcacgcacggggggttctccgtgccccgccgtgctgctgagcgcgtcttccctcctttggatttcacacagcagcctccagcccaggagctaattgcacgggatattcatgacatcgagtggaagttcaggcacatctttcgaggccaacccaaacgacacctgctaaccactggctggagcgtttttgtcagtgctaagagacttgttgctggagattctgtgcttttcatatggaacgagaaaaaccagcttttacttggaataagacgtgccagtcggccacagactgtgatgccttcctctgttctttcaagcgatagcatgcacataggtctccttgcagcagcagctcatgctgctgctacaaacagccgtttcactattttctacaacccccggacatcaccccattatttatgggaattttataattgggcctctataaaaatccataatatactaatgcgcccaatgcacactttaatgaaacacaggtatatggggactataactgaagttagtgatgcagacccagtccgttggcctagttcctattggagatctgtgaaggttggttgggatgaatcaactgcaggggaaaggccaccaagagtttctttatgggaaattgaaccattgacaacctttccaatgtatccatctctgttcccactgagagttaagcatccttggtattcaggagttgcttccctgcatgatgacagcaatgctttaatctggctgagaggagttgctggtgagggaggttttcagtctctgaactttcagtcacctggtattggctcctggggacaacagaggctccatccatccttactgagcagcgatcacgatcagtaccaagcagtagttgctgctgctgctgcttcccaatctggtggttacttaaaacagcaattcttgcaccttcagcaacctatgcagtcccctcaagaacactgcaacctcaacccattattgcagcaacaaattctgcagcaagcaagccagcaacagataattaatcctgatgcccaaaatatccaaacgatgttgagcccaagtgctatacaacagcaactccagcaactacagcaaatgcagcaagttcagaatgatcagaagcagaagattcaaccagatcaaagctaccaagttcctacaagtgcagttctcccaagtccaacatcattaccgagtcatttgcgagaaaaatttggcttctctgatcctaatgcgaattcttcaagcttcatcacctctagcagtagtgataacatgttggattcgagcttccttcagggaagttcgaaagctgtggacttatctcgatttaatcagcctgtagctagtgagcagcagcagcaacaggcatggaagcagaagtttatgggttcacagtcagtgtcttttgggggctcggttttgcataactcacccacaagcaaagatggttctgttgaaaacaaaattggtcgtgatgtgcaaaaccagtccctttttagtccacaagttgactcttcatccctcctgtacaacatggttcctaatctgacttcgaatgtttcggatggcaacttatcaacgatcccttctggatcaacttatctgcagaatgcaatgtatggttgcttggacgactcttctggtttattgcaaaatacaggagagaacgatccagcaaccagaacatttgtgaaggtttacaagtcaggttcggttgggaggtcgttggacataacccggttctctaattatgctgaacttcgagaagaactgggtcagatgttcggcattaagggtcaattggacgaccctgatagatcaggctggcagcttgtattcgtcgacagggagaatgatgtgcttctccttggagacgacccttgggaattcattaacatctatatgaatgtgagcaatgctaaaaagtcttacattatgaaacggagggagtacaatactttggtttcctggtttccacaactaatagcttatcgaggaaagactgttcttccttcaataatatgtgttggtcagtcactatatgttgatgctcagttacccaagacccttcgtctgggtcaaatgttcggcattaagggtcaattggacgaccctgatagatcaggctggcagcttgtattcgtcgacagggaaaatgatgtgcttctccttggagacgacccttgggagtcctttgtgaatagtgtatggtacatcaagatactttcacctgaggatgtgcataagatgggaaagcaaggaaatgatccacggtatctgtcctgaagtgagagaacatggtgccatttctgggcttccaggaggattctgcagtgcatggtggcactcttgctctcgacaatgcacgtcgtcagaagtcccaaatttgtatcttgcatgtacgccgtacatgtttccagaactctctgttacctattcggtgcaggccaccggaaccacgaaacctgatattttgtaggttccacttaggaatcagtatcggtttaactcttatcctagatgatttgtaactcgcacggcagtccactgttttcatgtttcatcgagtcttcctagacattaaacttagttgatattgtatcaggatttatgtgtattgagattcctctacatgctttcaaccaaaaaaaactgcaataatcgaagcgcacgaggattgtttccaaaaaaaaaaaaaaaaaaaaattttnaccgattgtccggttatgtcagtttcgagaggagctgtcaaaaaaaaaaaaaannaaaaaaaaaaaaa

SEQ ID NO: 21023 - DNA, 4293 bp, Oryza sativa
  Clone ID: TF_OsC787_1
atgcctccccgcactcgccatggtcgtcgtgagcccacgcccgatcccgtcagtgagaatgaggattcaagcggagatgagtatgttcaaagtgatgatgacaatatggaaaatgttgagggtgatgagatggaagtaagtgatgatggtgatgacaatgagagtggaaatggtgaagatgatgaggcaagtgatgataggagtcctctcgattccaccatccaatttgtgcttaatttgaggaatgctcaacaatacactatcctccgtcatcataatcaattccgaaggcctaacgattgtaatgatccaagatttcatacacggttccaaaagtccgtgtatgcacaagtgtatgccaacaaagccttcgccgaacacaagtggatttcttggaagcacattggtgagacaccggagtttgagaatttgcaagagatgttccggaccgttgggattgatagaattgtcaccatgaagcaaccttttgatgaagatctcatccggcaattctatgccaccgtatgggtgtccggcgattgtgatgcaatgaagtggatgtcgaggaccctccgatgctctatcaaccgccgtgaatccaaggagctcttgcacattcgcttcaacaacggggatgaccttcatgatgagcacacccacaaccccttccccattgatcacttttctcagttttatgaagaagggggaaggcacacatatggcaaggtggcgggtttgagggctctcccaagtgtgatcaaccgcatagtaagggccaccatcctcccaagatgcggcaacaatgatgacatacgcggagttgcttggcatgttattgatgccattatggatggtcgtcggtttgatgttatcaaccttatgatgaaggagattgccatctcaaaggggactcttggacaaggaatctattatgctccctacataatgaggttgattcaaagcaagttgggacaaattggtcacaatttaaaagaacataaggagtacaagcctcgtctccaactctcctcccctagagctcctcgtgtgcgccaaccaacattcgatcaaggtgcaagctcaagtgcagcccccccttctcctcaagggtatgatccaagtgcttttttccatctacaatatgcctactttggaatgcaacccaatgacttcttcaacccggtccttggggctattcataccctaagtgaaagcattcaacgcttatccaccgggcatgaagcattgcatgaggatgttcgtggcttgtgcaccgatgttggcaacttgaatacttcggtgggaagattgcatactagggggcggtcagaccggccacatagtggcggtctgaccggcgtgccctggccggtggtgtgcgaggcttcgcaaatactagtggcgcattatgaatgtcctaaggtatacacgctgcacaattgcacagtacactatactgatggagtatgcaactgtgcacgatgtgagttctgtcccaaaaaaactgcgtttggatacaatgcaaaggagaaggccaagacgggtgttctgagaaatgccgcagcgctgctcgacgaaatgcagctcatgggagaaacacagggtgccaagaaggtgatcaactcggagctctggcacgcttgtgccgggccgcttgtgtgcttgccgcagcgggggagcctcgtgtactacttccctcaggggcacagtgaacaggttgcagcgacaactagaaagattccaaattcccgcattccgaactacccaaacctgccatctcagttgctgtgtcaagttcacaacatcaccttgcatgccgacaaggacactgatgaagtttatgcacagatgacccttcagccagtaaactctgaaacggatgtattccctattccaactcttggtgcttataccaaaagcaagcaccccactgaatatttctgcaagaatttaaccgcaagtgatacgagtacacatggtggtttctcggtgccacgaagggctgcagagaagttgttcccacaactggattactcaatgcaacctcctaaccaggagcttattgttcgagatttgcatgataacatgtggacattccgtcacatttatcgtggacagccaaaacgacatcttctaacaactggatggagtctctttgttggggcaaagcgtctaaaagcaggggactctgtcttatttataagcatgcacattggcgttcttgctgctgcagctcatgccgcatcaagtggtagttcatttactatctactacaatcctaggacaagtccttcgccatttgtaattcctgtagcaaggtacaacaaggcaacatatatgcaaccatcagttggaatgagatttgcgatgatgtttgagacagaggagtcaagcaagcgcagatacacaggtacagttgtgggaataagtgactacgaccccatgagatggcccaattctaaatggcgcaacttacaggtcgaatgggatgaacatgggtatggagaaagacctgagcgtgtgagcatatgggatattgaaactccagaaaacactcttgtgttcccttcgtcgaccttgaattcaaagcggcaatgtcttcctggttatggagtttcagtgcctgggatggaaattggatcagcaaatatgtcatcatttccaagggctcagggtaatccctatggcagtttgcagcacattccagctgttggatcagaattggctatcatgcttctcaaccaatctggtcaaacccttgggagtccccttagttttcaccagtcctcatattctagtattatccaaaatgtgaagcaaaattatatccctcctctaacagttagcacttcagcttgtttgacaaagcaagaaagcctgccttcagatgatgcccagcaccagttccatatggcaaatatgcagaatggtgatcttgaaggctctgaagtccagcctgtcattgattcgatttctgagtcaaagttgaatgctacatcaagagatccaagaaacacagattcatacacaagtcgaagtacttcggagcaaaacagtaagggtgagcctagaggcaagactcgtaggagtaagaagggcttgcctcacaaaaccgtttcagagaaatctgacctttcttcagccccttcttggatctgtgacaatcagcaggttggtttagaatcgaaactggttggttgtgatgaacaagtaaactgtggaaatattgaagattcatcaggtgcacttactcaaggtaattttgttggacagccgcatggccatcaggttgaacaaaagggagtgctgtcgccaccaaaggtagaatcatcaaaatcacctgatggaggaaagtctgtcaattcgtttccaaaccaagggtgtttttcgcagttcattgatggtcttgattggatgactcagccttcctactaccaagactccaatgtaattcaaccagccggtgtgtcagagaacattttcagttcttctgcagatatacctccctcaatgattgctgatactatggagacttttcaggcttcatgtctttctgattgccttcctaattccatacaagaattcatctccagcccagatctgaattcactaacctttctttcacctgacatgcaaaatttggaggtccaactccagcatgatggaagcaatttgccaagcacgtccaactcgtttgtacagatgagtttttctgaagagagtgcaagtcagagtgcaaacttaagtggacttcacatggaatctacacacagaagcataaacaccacttcatgctctcaaccaatgtctactgggggctttgatgcagggatgtactcaaagttgccacgtttaaaagaatcccaaatcttgtctttgccagagattcataccaattccatgggaacatcagcttgcagtatggatgcaaccgagtacagccttgaccgaagtgcgaagccgatgaaaccaccagtgcggacatatacaaaggttcaaaagcaaggatcagttggaagatctatcgatgttacagggtttagaaattaccatgagttgagatctgccatcgcttgcatgtttggtctccaggggaaattggagcatcctggcagttcagagtggaagcttgtatatgtcgactacgaaaatgatgttcttcttgtcggagatgatccatgggaggaattcatcaactgtgtccggtgcatccggattttgtcaccttcagaagtacaacagatgagcgagaatggcatgcatgttttgaacgactgtattcaagcagcttag

SEQ ID NO: 21024 - DNA, 2832 bp, Oryza sativa
  Clone ID: TF_OsC1528_1701
atggccacggtggaacggcgcgggagcgccacggaagacgaggaaacagctgccaccggcgggcgcaacgctgccggccgtgacgccgctggctgcgacactgctagccgtgacgccaccgggcaaggggctgcaggtacaggcaccggcgggcgaggcgccgctgccgggagaggcgctggcgggcgacgcgacgccgccgggagaggcgcaggcgagcgcggagaatcgccgggcgggagcatttcgtcttcgcacgggaacgagaggagagagaggcaggagtgtgagattgggagcgatattcgcgagaatactcgccccctcggtggcgtcgacggcgagggcgcgccatgcgcgccgcccccctcccccatccctgctggccccgcttcgtcgacggtctccgcggcgtcgagcgcgcccgctacccgcgactacctcggcgggatcactggccaccgcctcggccaggaggacgactccggcggccacgagtacacatccgtctccggcatccacgtccccagcagcagcggcgtcgccttcgtgtcgttcggccagtgtcctcaggaggtgatctccaccgacctctgcctcggcttggggcccatcgccgccaccgcaccgctgcaacctcctccacctccagcggcggcagcggcagcggggtctccgtctgctacgacgccggagccaggacatggggaagcgacaccgacgacaagttcctccgcgcagtttcagacgcaggcgcagcaggttacgcgcgacatgtggatggcctgcgctgcacccaagtccggccgtctccccaccgttggatcattggtctactacttcccggacgggcacgccgagcagtgcctgtcacgtccgcaggagccgcttccaggcagaattttcctatgcaaagtcacggacgtccgcctcggcgcagcagcaacaaacgaagccttggcaaccatctctctcgtcccgatcgccgccgacgaccatgccttccagcttcaggctcccgctgatccagaccctgctccagcccagtcccagagtctcgtttcattcgtcaagcctctcacctataccgatgtcaccaagaatcggttcatggtgcccaaggacgatgccgctgcgggagttcttcctcacatacagttgaacgatgatgtgcctctccgaatcaaggacttgagcggaaaggagtgggcgtttaactacacctggaaagctcacacccgcatgtttcgcaatggttggatggagttttctaatgccaacggcctcgtcactggcgacaatgccgtgttcatgcgtcgcggcaacggcgagatgttcatggcggtgcggcgcacgcgcaacaggccggcgcccttctcagtggaggaggtcatcgaggccgtgtggcgggcagcgcgccgcgagccgtttgaggtcagctattgcttgcgccaggatggggacgagttcgttgtaccacgtgacatcgtcgatgatggcttacgcgccaggtttgctccaggcatggctgtgaacttcgtatgggctgttgaggatggcaagctgccaaccatcgggccacagggggaggatgtatgcaacgcttgtttcagtgagcttgaagaccagctggttgcgtgctttccagagaccgtgcgaacaagcagcaaagcatgcagggcatcccggtttctggtgttctggtaaggtgtccaggattgattccacaaaatcttgtatgttagagctgcgcacggctgtctcatataggttgagtttcttccagacttcccctgctaatttgcaacgaagaatgatgtgatttgctgtttcaatagctgggcaggacatacagtgcgggttggaatcccattttttattaaccctgtttgcattggtgttgagcctgtcccggaatgctaaccacaaaaagatcctgcaagtgttggggatagccttgttccagataagtgttgccggctgccaaaggatgccatgataagtcaacaagttgtagtttgctgatgttgtgatatctgtggaaccaagcagcagtgttcttttgtcggggacattctgttgtatgtgttggtccaacaatatatccatgagggactgtaactcggtttgagcccgggaagagagaaccgggtgtagatcaattgtccaggtgccgttagtgtgttgggaggagactgtacagttgatatttgttgcgtaggaagctagtgtcggatatatgaggttgaatcgtcctgctgctgtccagtggtctcgccaaaactgcactagctggccgttcccaatcgttaccttagtggaggcaataattggctcgataacggaacaaactgtcttccaaatcggtgtttctgttggttttgctttaatagggatctcatttgccatgtgttgcgtgcgcaaccattgaaaacatggttctgatgagtctgataacaacctgcatcctatcctcataagtagagccaggttgtgagctctcaagtcaccgattcccaatcctccttgttccttgttgagagtgacagttggccaggccactaaacattgacctccttttactttcttatcccctttccaaaggaatgccctccttaggcgatcaactgcttcgatggttttgtctggccacttgatgcaggacatgaaataatttggtattgccgacataactgagttgatcatgatgagtctttcaccccaactgagaaggcctgggatccatcctgctatagccttcgatccactcccgcttgtggtaagcacggtaagtctcccagggtttcccgtgaaccggtccttaactgccat

SEQ ID NO: 21025 - DNA, 1590 bp, Oryza sativa; identical to SEQ ID NO: 11283
  Clone ID: TF_OsC378934_1

SEQ ID NO: 21026 - DNA, 2980 bp, Oryza sativa
  Clone ID: TF_OsC794_1
ctctttctctctcctttcccctctctctctctctctatttagttcttttgcccccatgtcagctgcagtctgggggaatctgaggctgctgctcacctgagagactgaaaggaggcagaagcagcagcagcatcagcatcagcagcagagcagatagctgagctgcagagggggaggagagaagatagtagtggtagtagtagctgagctgtgtcaagattgcccttcaaattcatcatcttttgctcttgtgagaaaagcctttttcagctatgagctctgattgatgatgacgatgatggcggctgtgcagctggaaaagcttcttcatccttgtggtagtggtaaaagctgtgggaaatttcatccataaagatcgccgtggccctcgaattccgtttcagtttgtttgtgtcggagctgatcgccggaggtgaacgattcttgcgtcgaagagatgataactttcgtggattccgcggcgaaggagcgggagcgggagagtgacaagtgcttggacccgcagctgtggcacgcctgcgccggcggcatggtccagatgccgcctggtgagctccaaggtgtactacttcccgcaaggccacgccgagcacgcgcaggggcatggccccgtcgagttcccgggcgggcgcgtcccggcgctcgtgctctgccgcgtcgcgggcgtcaggttcatggccgatccgggacaccgacgaggtgttcgccaagatccgcctcgtccccgtccgcgccaacgagcaggtgtacgccggtgacgccgacgacggcattggcgccagccttagcggcaccacctcgccggcggccaccgggaacagctctctcaactggaacaccgagaaaggtgcctcggagggctcgggctccggcgtcatccagaacagccccaccgacaacacgtcgttcggagaggctccagtggttcagggagaacagcaccgtctccgagctcgggctggcgtggtctggaagttccgccacatctaccgcggcacgccgaggcgccacctcctcaccacggggtggagcaccttcgtgaaccagaagaagctcgtcgccggcgactccatcgtgttcatgcgcaccgagaacggggatctctgcgtcggcatccgccgcgccaagaaagggggcgtgggaggcccggagttcctgccgccgccgccgccgccgccgccgacacctgccgccggcggcaattacggcgggttctccatgttcctgaggggcgacgacgacggcaacaagatggcggcggcggccaggggcaaggtcagagcccgtgtccggccagaggaggtcgtcgaggcggccaatctcgccgtgagcgggcaaccattcgaggtcgtctactacccgagggcgagcacgccggagttctgcgtgaaggccggggcggtcagagcggcgatgcggacgcagtggttcgccggcatgaggttcaagatggcattcgagacggaggactcatcaaggatcagctggttcatgggcactgtatcggccgtgcaggttgctgaccccattagatggcctaattcaccatggaggcttcttcaggtttcatgggatgaaccggacttgttacagaatgtgaagagggtgagcccatggttggttgagcttgtgtcaaacatgccggccatccaccttgctccattctcgcctccacggaagaagctttgcgtgccgttgtaccccgagcttcccatcgacggccaatttccgacaccgatgttccatggaaacccgctcgcccgtggggttggtcctatgtgctatttcccggatggcactcctgcaggcatacagggagccaggcatgctcaatttggtatatctttatcagatctccaccttaacaaactgcagtcgagtctatcgccccacggccttcaccagcttgatcacggcatgcagccgaggatcgccgctggtctaattatcggtcatccggctgctcgggatgatatctcatgcttgttgaccattggtagcccccagaacaacaagaaatcagatggcaagaaggcgccagcccagctgatgcttttcggaaaacccatactcacagagcagcagatatccttgggtgatgctgcttcggtggatgttaagaagagctcttctgatggtaatgctgaaaatacggtgaataagagtaactccgatgtttcaagcccgagaagtaatcagaatggcaccacagataatttgtcatgtggaggagttccattgtgccaagacaacaaggtacttgatgttgggctggaaacagggcactgcaaggtattcatgcagtcggaggatgtcgggcgcacacttgatctctctgttgttggttcatatgaggaattataccggcggcttgctgacatgttcggcatcgagaaagctgagctgatgagtcatgttttctaccgtgatgcggctggggcactcaagcacactggagatgaacctttcagcgagttcacgaagacggcgcgtaggctgaatatactaacagatacaagcggcgataacttagcgaggtagggtaaattaaagctattctcaattgtacagctggtggagcacggtggcaattttgaaggcaaaaattgccggtttcctagtactggtgcaatttcaaggaggcaattcagttttctttaattagagctcccagaatgggattgactgtaatccggtacccatatttatcggcagatttaccagactggatctatcctactgtcatgtaaaccgatcatattgcatttgatcgttggtgtgtactcggccatgaaccgttactaaacgaatgcgattacgggaatttttgcgcgcaaatgcgttgaattgtctgaaaaaaaaaactacatctgcatgctctgtttgtagtccacaaaaaaaaaaaaaaaaaaaaaaaaaaaaaaactcgagactagttctctctctctctccctcgtgc

SEQ ID NO: 21027 - DNA, 3405 bp, Oryza sativa
  Clone ID: TF_OsC2423_3
atggagatggcggcgaatccaggtggttcaggaacctgcagcgatgcactattccgggagctatggcatgcttgtgctggtccgttggtcacggtcccgaagcgcggcgagcgcgtctactactttccccagggtcatatggaacagcttgaggcgtctacaaaccagcagcttgaccagtacctgccgatgttcaatctaccatccaagatcctatgcagcgtggtcaacgtagaactccgggcggaggctgattcagatgaagtttatgctcaaattatgctgcaaccagaagctgatcaaagtgaactcaccagtctggatcctgagcttcaagatcttgagaaatgcacagctcattccttttgcaagacattaacagcttcagatacaagcacacatggcggtttctctgttcttaggaggcatgctgaagaatgccttcctcagctggacatgtctcagaatccaccatgtcaagaactggttgccaaagatctccatggaactgagtggcatttccgtcacatctttcgtggacaacctaggaggcatctgcttacaaccggttggagtgtctttgttagctcaaaaagattggttgctggcgatgcatttatcttcctgaggggcgaaagtggtgagctacgggttggagtaaggagacttatgagacaagtaaataacatgccatcatctgtcatatcaagccacagcatgcatcttggagtccttgcaacagcttcccatgctatctccactggaaccctcttttctgttttctacaaacccagaacaagccggtctgagtttgttgtgagcgttaacaagtaccttgaagctaagaagcagaacttgtctgttggaatgaggtttaagatgagatttgaaggtgatgaagctcctgaaagaaggtttagtggaacaattattggtattgggagtgtgccagcaatgtcaaaatctccatgggcagattctgactggaaatctctgaaggtccaatgggatgaaccttcggctattgtccgtccagatagagtttcaccatgggaactggaaccattggatgcgagtaatccacaaccacctcagcctccattgaggaataagcgtgcaaggcctccagcttcaccttctgtggttgcggaacttcctccaagtttcgatgtggactctgatcagatctcacagccatctaatggcaataaatccgatgcccctggaacaagcagtgaacgttctcctcttgagtcccaaagtcgtcaagtgaggagctgcacaaaggtaattatgcaaggtatggcagttgggagggctgtggacttgacaaaactaaatggttatggtgatcttcgcagcaagttggaggagatgtttgatatacagggggacttgtgtcccaccctgaagagatggcaagttgtttacaccgatgatgaggatgacatgatgcttgtcggggatgatccttgggagaatgcatctaccatggttcatgcatcatgcatagctgaccctggaccagtgtggatcccatgccaggaaggatggctggggaggcagcatttccatcacctggcactccctgcgtgattgggccatccgtgttcaatcctgctgtgtgggggtagtaggatgccattggcatcctttatccatgtcctcagttttggtaaagctggtgactggtggtagacctgcaagaacggggcccggggctcgccatctcgtcgctgcaaccagtaaatagagctcgtcaagcagttcatgttccgtttcttcatgcaatgcatggagtatcatcatccgtagctaagcatcagttcttcagaggcggcaaaccagcgacgcggagaggcggcgacccagcgtggaggcagcgacccagctggcgggctccgacggcgcggagaggcggcgaaacggcggcacggagaggcggcaaaccggtggcgcgaagaggcggtgaggagaggcggcgacccatcggagaggtggcgaaccggcggcgtggagaggcggcgaagggagcccgcgactcggcggactggctccagcggcgtgggcttcttccacgcgtcgtcatcgtcgctcattgccggagcgaatggcggcagcgacggcggtggcggagctcgaactttgagttggggaacgtggtggcggcgacttggcaggctggctccgacagtggcgctgggttggtgtgggcgctggagcacgagagaggaggggattattgacgtggggaagagaatccatgtggggccaccatttggcgaggggaaccgccggcgcagcaccctcgtcctcccgcacgtccgatctgcccccttccacgccgtggttccgggagctgtggggggtcaacgccgacaaatagtagcagccgccgtcgccgaagctgatggtaatgaaaacggaaataagcatttcacttgtcacagggagaatgcaaactatggtctaaaatctgcatctgaaaataaaattgagctgctgaggggtgctcatagttgggccgacagtaatttaattgaggatgtactggcctctgtgaacaatgatgttggtgaagcatctgctttgttgaaagctatggcgtctccttgttttccaataagggaggatggactacctgatcagctttcttctgagattaataaaacacatggtttaccatcaggaaatggtacagcagaaaataatcttgtaaatgactcgcagttgttgcctctgccaatgaatatgtcgtctgtacccatagaaccggaagtggaagagctcgatgacgattactttaaccacaggaaagatgcattgaagattatgagggctgccacgaagcattctcaggctgcgagtaatgctttcttgagaggtgaccatgctgctgccaaggaactttccctcagagctcaagaagagcgatccgctgctgaagagctgaacaagaaggcagcaaaagaaatatttcgcctcaggaacagcaataatagcatttggaagctagacatgcatggtctacatgcatcagaggctgtggaagtactggaacggcatcttcacaggatagaattccagccaccagggaataatgcagcttcatctgatgaagtagctaggtctgaacccagagtgtctggtccaagcattgagcccggcccagggaaggtggtgtttgttcgtcccatacaggctatcttagaggtgatcacagggattggcaagcacagcaaagggcaggcctcactacctgttgcagtcaggggcttcctcattgaaaatgggtaccgatttgatgagctgcggcctgggcataagcttctcacttctcagcctgaagttaaaaatcacaaaggaatcaaggtgaaggaagagttcttttctatactttcttaa

SEQ ID NO: 21028 - DNA, 2868 bp, Oryza sativa
  Clone ID: TF_19352036
atggcgtcctcgcaggagaaggccaagacgggtgttctgagaaatgccgcagcgctgctcgacgaaatgcagctcatgggagaaacacagggtgccaagaaggtgatcaactcggagctctggcacgcttgtgccgggccgcttgtgtgcttgccgcagcgggggagcctcgtgtactacttccctcaggggcacagtgaacaggttgcagcgacaactagaaagattccaaattcccgcattccgaactacccaaacctgccatctcagttgctgtgtcaagttcacaacatcaccttgcatgccgacaaggacactgatgaagtttatgcacagatgacccttcagccagtaaactctgaaacggatgtattccctattccaactcttggtgcttataccaaaagcaagcaccccactgaatatttctgcaagaatttaaccgcaagtgatacgagtacacatggtggtttctcggtgccacgaagggctgcagagaagttgttcccacaactggattactcaatgcaacctcctaaccaggagcttattgttcgagatttgcatgataacatgtggacattccgtcacatttatcgtggacagccaaaacgacatcttctaacaactggatggagtctctttgttggggcaaagcgtctaaaagcaggggactctgtcttatttataagggatgagaagtcacaacttcttttgggtgttaggcgagccacgcgacaacaaacaatgttgtcatcttctgttctatctactgatagcatgcacattggcgttcttgctgctgcagctcatgccgcatcaagtggtagttcatttactatctactacaatcctaggacaagtccttcgccatttgtaattcctgtagcaaggtacaacaaggcaacatatatgcaaccatcagttggaatgagatttgcgatgatgtttgagacagaggagtcaagcaagcgcagatacacaggtacagttgtgggaataagtgactacgaccccatgagatggcccaattctaaatggcgcaacttacaggtcgaatgggatgaacatgggtatggagaaagacctgagcgtgtgagcatatgggatattgaaactccagaaaacactcttgtgttcccttcgtcgaccttgaattcaaagcggcaatgtcttcctggttatggagtttcagtgcctgggatggaaattggatcagcaaatatgtcatcatttccaagggctcagggtaatccctatggcagtttgcagcacattccagctgttggatcagaattggctatcatgcttctcaaccaatctggtcaaacccttgggagtccccttagttttcaccagtcctcatattctagtattatccaaaatgtgaagcaaaattatatccctcctctaacagttagcacttcagcttgtttgacaaagcaagaaagcctgccttcagatgatgcccagcaccagttccatatggcaaatatgcagaatggtgatcttgaaggctctgaagtccagcctgtcattgattcgatttctgagtcaaagttgaatgctacatcaagagatccaagaaacacagattcatacacaagtcgaagtacttcggagcaaaacagtaagggtgagcctagaggcaagactcgtaggagtaagaagggcttgcctcacaaaaccgtttcagagaaatctgacctttcttcagccccttcttggatctgtgacaatcagcaggttggtttagaatcgaaactggttggttgtgatgaacaagtaaactgtggaaatattgaagattcatcaggtgcacttactcaaggtaattttgttggacagccgcatggccatcaggttgaacaaaagggagtgctgtcgccaccaaaggtagaatcatcaaaatcacctgatggaggaaagtctgtcaattcgtttccaaaccaagggtgtttttcgcagttcattgatggtcttgattggatgactcagccttcctactaccaagactccaatgtaattcaaccagccggtgtgtcagagaacattttcagttcttctgcagatatacctccctcaatgattgctgatactatggagacttttcaggcttcatgtctttctgattgccttcctaattccatacaagaattcatctccagcccagatctgaattcactaacctttctttcacctgacatgcaaaatttggaggtccaactccagcatgatggaagcaatttgccaagcacgtccaactcgtttgtacagatgagtttttctgaagagagtgcaagtcagagtgcaaacttaagtggacttcacatggaatctacacacagaagcataaacaccacttcatgctctcaaccaatgtctactgggggctttgatgcagggatgtactcaaagttgccacgtttaaaagaatcccaaatcttgtctttgccagagattcataccaattccatgggaacatcagcttgcagtatggatgcaaccgagtacagccttgaccgaagtgcgaagccgatgaaaccaccagtgcggacatatacaaaggttcaaaagcaaggatcagttggaagatctatcgatgttacagggtttagaaattaccatgagttgagatctgccatcgcttgcatgtttggtctccaggggaaattggagcatcctggcagttcagagtggaagcttgtatatgtcgactacgaaaatgatgttcttcttgtcggagatgatccatgggaggaattcatcaactgtgtccggtgcatccggattttgtcaccttcagaagtacaacagatgagcgagaatggcatgcatgttttgaacgactgtattcaagcagcttag

SEQ ID NO: 21029 - DNA, 3140 bp, Oryza sativa
  Clone ID: TF_OsC436_1
atggctgctgcagcgacggcggcggcctcgccggatgtggggacctgggggggggatggcgagggcggaggtcggcggcggtggtggtgagaggagtgctgctcccgcggatgtatcccggaaccccgaagcccaaggccaggggggaggcgtgggggaggacgcgctgttcacggagctgtggagcgcgtgcgcggggccgctggtgacggtgccgagggttggggagaaggtgttctacttcccgcaggggcacatcgagcaggtggaggcctcgaccaaccaggtaggcgagcagcggatgcagttgtacaatctcccatggaagatcctgtgtgaggttatgaacgttgagctgaaggccgagccagacaccgacgaggtttatgctcagctcactctgcttcctgaattgaagcaacaagaagataacggctctactgaggaggaggtgccttctgctccagcagctgggcatgttaggccacgggtgcactcattctgcaagacattgaccgcctcggacacgagcacacatggcggcttctcggtgctgcgacgccacgcggacgaatgcctcccaccactggatatgagccgtcagcctccaacacaagagctggtggccaaggatctgcacggtgtggaatggcgctttcgtcacatattcagaggtcaaccacgaagacaccttttgcagagtggctggagtgtgtttgttagtgccaaacggcttgttgctggggatgcctttatctttctcagaggtgagaacggggaactgcgtgttggagtcaggcgtgcaatgaggcagcaaactaatgttccatcttcagtgatatcaagccacagcatgcatcttggggttcttgccacagcatggcatgctgttaacacagggaccatgttcactgtctactacaagcctaggacaagtccagccgagtttgtggtcccttacgatcgctatatggaatcactgaaacgaaattactccattgggatgagatttaagatgaggtttgaaggtgaagaggctccagagcaaagattcactgggactattgtcggaatgggggattctgatccagctggctggcctgaatcaaaatggcgctcccttaaggtgagatgggatgaagcttcttccatacctcgccctgaaagagtttctccctggcaaatagaacctgctgtaagccctcctcctgtcaacccactaccagttccaagaaccaagaggcttcgtccgaatgctaccgctttgccggctgactcttctgctatagcaaaagaagctgctacgaaagttgtggtcgagtctgaaccaaatggtacgcaaaggaccttccagacacaagagaatgcaaccccaaaaagtggtttcggcaatagcagcgagttagaaagtgctcagaaatcaatcatgcgtccatctggatttgatcgtgagaaaaataacactcccatacagtggaagctaggttcagatggttggatgcagatgagcaagcctgagagttacagtgagatgctatctggatttcagccacctaaagatgtacaaaccccacagggtttctgttctttacctgagcagattactgcaggccattctaacttctggcacacagtaaatgctcagtatcaagatcaacagagcaatcacaatatgttccccagctcatggtccttcatgcctccaaatactcgccttggattaaacaaacagaactattcaatgattcaggaagctggtgtgttgtctcaaaggcctggaaatacaaagtttgggaatggagtttatgctgcactgccaggccgaggtactgagcaatactcagggggttggtttggccatatgatgccaaattcccacatggatgatacacagccacgcctgatcaagcctaaacctctggttgttgcccatggtgatgttcagaaagctaaaggtgcttcatgcaaactatttggaattcaccttgacagcccagcgaaatctgaacctttgaaatctccatcaagtgttgtatatgatgggacgccacaaacaccaggtgctactgaatggcgccgaccagatgtaactgaagtagagaaatgttctgatccttctaaggccatgaagccacttgatactccgcaaccagactctgttcctgagaagccttcttctcagcaagcttcacgaaacatgtcgtgcaaatcacaaggtgtatcaactagaagctgcaagaaggtccacaagcaaggcattgcacttggcaggtctgtggaccttacaaagtttaatggctatgaagagttgattgctgagctggatgacatgtttgatttcaacggtgaactgaagggtcctaagaaggagtggatggttgtctacactgacaacgaaggtgacatgatgctagttggggatgatccctggattgaattctgcgacatggttcacaagatcttcatctacacaagagaagaggtccagcggatgaatccaggaaccctgaactcaagatcagaagatagtcatgctaattcaatggaaaggggctcagtcggcagagaaatgcgaggctgcttgtcaacctcgtctcttaattctgagaactgctaatgctttcccatctggtaacgtcttttgaagtaacatgggagacaagaacgcgatgcatcgttataagaaaatgcatttcgtagtggagttaatgctttttttccccctttgatgtattggataagcccaaagtaccctatttgtagatggtgcttgtccttggtggtcaagttgcactcttatttgctgcagttttggttttctattttggtgaggtaagttgtcagccgccagtcctaccatataaatgttggtatgcgtagaaaagtaagctcagccctcccaccctgcacttcctctctctcagcactaagctgccacctccttgtaaatagcccctgtttaattgagtctaatatattatctaccttaactgacaaaaaataaataaatcttgctaaattatagcagtagcctggtaagattattgtagcccctgcggtaatcggtctgcccctctagaaggcaaggcaatttgaccctaaaatgttgccattttaaaaaaaaaaaaaaaaaaaaaaaa

SEQ ID NO: 21030 - DNA, 2579 bp, Oryza sativa
  unsure (1)..(2579): unsure at all n locations
  Clone ID: TF_OsC445_6
atggtgattagtaggacattggtggtaaggggttttgatgaactttgggagacgattcggccggttttggtttcatcagatggtccagcttccatgagcaaaaatggactgttgcttgttgtttcggaggagttttggattggcaaggtttggtgggtgagcggtgatcgcatttgggggttggagatgaaggaggtgggggaggtggaggaggtgaggtgcttggacccgcagctatggcacgcgtgcgcgggcgggatggtgcagatgccggcgccgcgttcccgggtgtactacttcgcgcagggccacgccgagcacgccgacggcggaggcggggcggcggcggcggccgcggagctggggccgcgcgcgctcccgccgctcgtgctctgccgcgtcgaaggggtccagttcctggccgatcgggactccgacgaggtgtacgccaagatccgcctcgcgccggtcgcccccggggaggccgagttccgggagcccgacgagctctgcccgctcggcgccgccggcgacgcggcggagccgtcgccggagaagccgacctcgttcgccaagacgctcacgcagtccgacgccaacaacggcggcggcttctcggtgccccgctactgcgccgagaccatcttccccaagctggactacagggccgacccgccggtgcagacggtgctcgccaaggacgtccacggcgtggtctggaagttccgccacatctaccgcggcacgccgcgccggcatttgctcaccaccgggtggagcacgttcgtgaaccagaagaagctcgtcgcgggggactcgatcgtgttcctgcgcaccaggcacggggagctctgcgtcgggatacggcgggcgaagcggatggcgtgcggggggatggagtgcatgtcggggtggaacgcgccgggctatggcggcggcggcttctcggcgttcttaaaggaggaggagagtaagctgatgaagggccatggtggtggtgggtacatgaagggcaaggggaaggtgaggatggccgatgtcgtggaggccgctagcctcgcgtcgagcgggcagccgttcgaggtggcgtactacccgagggctagcaccccggattttgtcgtgaaggctgcgtcggtgcaggccgcaatgaggatccagtggtgctccgggatgaggttcaagatggcttttgagacagaggattcatcaaggattagctggtttatggggacaatatcttctgttcaggttgctgatcccaacagatggccgttggcgccgggtaaacgagctccggtgacatgggatgaaccggacctgttgcagaatgtgaaatgtgtcagcccatggcttgtggagcttgtgtcaagtattccaccaatccatttaggaccattttcgtcacctcgaaagaagttgcgggttcccccacatcctgacttcccatttgagggtcatcttctgaacccaattttccatgggaacccacttggtcctagcaacagcccactatgctgttacccggacaccgctcctgcaggcatacagggagccaggcatgctcaatttggtttaccactaacagaccaccagcttaacaagctgcaccttggtctgttacatagcggcagttttaacagacttgatgctattactccaccttcccggatatcaaagggctttgtggtcagtagtgcaccagcccatgacaatatctcttgtttgttgtcaatcagtacaccacaggtcgcagagaaatctgatgacagaaagacgacaccccatataatgctgtttggaaaggctatatttactgagcagcagataacttcaagcggatcaacagagacactctcccctggagttactggaaatagctcacctaatggcaatgcgcacaagacaggaaatgcatctgatggttctggttcatcaatttgcattggtttctcatctcaaggtcacgaggcttctgaccttggtttagaagctggtcactgcaaggtatttatggaatcggaggacgttggtcgcaccattgatttgtctgtctttgggtcatacgaagaactgtatggtcggctggctgacatgttcggaatcgagaaagaagaaatcataaaccatcttcatttccgtgacgcagctggtgtagtcaagcatccgggtgaggtaccattcaggtgattcatgaaagcggcacggaggcttacaataatagccggcgacagggagagaattgagagacctctcatcgaatgcttagttgagcaggcgtgatagttcaataaactcccgtttgaatttaattctgaaatatgaatcgtagcgtgaaaagacttcctttgttacatgtacttgcgttgggctgttaactaagcagacctgctttgtattgtcagtgttgtggattgctcaagttaaggtgtgtgtgtttttatcttgccccncggtctgctctccaagctcgcagccgacgcggtgttggtacacaccccctcctctgtgaatgccatctccgccctatgcgaggcgactggtgccantgtggccaaaattgcttactctgtggggaa

SEQ ID NO: 21031 - DNA, 2616 bp, Oryza sativa
  Clone ID: TF_OsC793_3
ccccaccatggtggcgatctccgagctcgggtgagcggaagagaaagaatgcggccgatttgaggagggggatggggttttcgggtggatttgtgaggggatagattaagagtttgtgcttctctggtttggtcggaggaggaggagatgagctcgtcgtcggcggccagcatcgggccgccgcagccgccgccgccccccgcgccgcccgaggaaggtgggtggctagagaagaagtgcctcaactcggagctatggcacgcctgcgccggcccgctcgtctgcctccccaccgtcggcacgcgcgtcgtctacttcccgcaaggccacagcgagcaggtggcggcgtcgacgaacaaggaggtggagggtcacatcccgaactaccccaacctgccggcgcagctgatctgccagctccacgatgtcacaatgcatgcggatgtggagactgacgaggtgtacgcgcagatgacgctccagccactgaacccacaggagcagaacgatgcgtaccttcccgcggagatggggataatgagcaagcagccgacgaattacttctgcaagacattgacggcgagcgacaccagcacgcacggggggttctccgtgccccgccgtgctgctgagcgcgtcttccctcctttggatttcacacagcagcctccagcccaggagctaattgcacgggatattcatgacatcgagtggaagttcaggcacatctttcgaggccaacccaaacgacacctgctaaccactggctggagcgtttttgtcagtgctaagagacttgttgctggagattctgtgcttttcatatggaacgagaaaaaccagcttttacttggaataagacgtgccagtcggccacagactgtgatgccttcctctgttctttcaagcgatagcatgcacataggtctccttgcagcagcagctcatgctgctgctacaaacagccgtttcactattttctacaacccccgggcaagtccatcagaatttgtcataccactgtcaaaatacatcaaggctgtttttcacacccggatatcggttgggatgcggttcaggatgttgtttgagactgaggaatcaagcgttcgcaggtatatggggactataactgaagttagtgatgcagacccagtccgttggcctagttcctattggagatctgtgaaggttggttgggatgaatcaactgcaggggaaagaccaccaagagtttctttatgggaaattgaaccattgacaacctttccaatgtatccatctctgttcccactgagagttaagcatccttggtattcaggagttgcttccctgcatgatgacagcaatgctttaatgtggctgagaggagttgctggtgagggaggttttcagtctctgaactttcagtcacctggtattggctcctggggacaacagaggctccatccatccttactgagcagcgatcacgatcagtaccaagcagtagttgctgctgctgctgcttcccaatctggtggttacttaaaacagcaattcttgcaccttcagcaacctatgcagtcccctcaagaacactgcaacctcaacccattattgcagcaacaaattctgcagcaagcaagccagcaacagataattaatcctgatgcccaaaatatccaaacgatgttgagcccaagtgctatacaacagcaactccagcaactacagcaaatgcagcaagttcagaatgatcagaagcagaagattcaaccagatcaaagctaccaagttcctacaagtgcagttctcccaagtccaacatcattaccgagtcatttgcgagaaaaatttggcttctctgatcctaatgcgaattcttcaagcttcatcacctctagcagtagtgataacatgttggattcgagcttccttcagggaagttcgaaagctgtggacttatctcgatttaatcagcctgtagctagtgagcagcagcagcagcagcaacaggcatggaagcagaagtttatgggttcacagtcagtgtcttttgggggctcggttttgcataactcacccacaagcaaagatggttctgttgaaaacaaaattggtcgtgatgtgcaaaaccagtccctttttagtccacaagttgactcttcatccctcctgtacaacatggttcctaatctgacttcgaatgtttcggatggcaacttatcaacgatcccttctggatcaacttatctgcagaatgcaatgtatggttgcttggacgactcttctggtttattgcaaaatacaggagagaacgatccagcaaccagaacatttgtgaaggtttacaagtcaggttcggttgggaggtcgttggacataacccggttctctaattatgctgaacttcgagaagaactgggtcagatgttcggcattaagggtcaattggacgaccctgatagatcaggctggcagcttgtattcgtcgacagggagaatgatgtgcttctccttggagacgacccttgggagtcctttgtgaatagtgtatggtacatcaagatactttcacctgaggatgtgcataagatgggaaagcaaggaaatgatccacggtatctgtcctga

SEQ ID NO: 21032 - DNA, 3372 bp, Oryza sativa
  Clone ID: TF_OsC791_1
ggggagaagacgaaggcgccggcgatcaactcggagctgtggcacgcctgcgcggggccgctggtgtcgctgccgccggcgggcagcctcgtcgtctacttcccccagggccacagcgagcaggttgcagcctctatgcaaaaggatgttgatgcacatgttccaagctacccaaatctgccttcaaagttgatttgccttctgcataacgtcactttacatgcggacccagaaacagatgaagtgtatgcacaaatgactcttcagccagttacttcatatgggaaggaggccctgcagttatcagagcttgcactcaaacaagcgagaccacagacagaattcttttgcaagacactgactgcaagtgatacaagtactcatggaggcttctctgtgcctcgtcgagctgcagaaaagatatttcctccactggacttctcaatgcaaccacctgcacaagaactacaggccagggatttgcatgataatgtgtggacattccgtcacatatatcggggtcagccaaaaaggcatctgcttaccactggctggagtctatttgtaagcggcaagaggttatttgctggagattctgtcatttttgtcagggatgaaaagcagcaacttctattaggaatcaggcgtgctaaccgacagccaactaacatatcatcatctgtcctttcaagtgacagcatgcacatagggattcttgctgctgcagcccatgctgctgccaacaatagcccatttaccatcttttataaccctagggccagtcctactgaatttgttatcccatttgctaagtatcagaaggcagtctatggtaatcaaatatctttagggatgcgctttcgcatgatgtttgagactgaggaattaggaacacgaagatacatgggaacaataactggcataagtgatctagatccagtaagatggaaaaactcgcagtggcgcaacttacaggttggttgggatgaatccgcagccggtgaaaggcgaaatagggtttctatctgggagattgaaccggtcgctgctccatttttcatatgtcctccaccattttttggtgcgaagcggcccaggcaattagatgacgagtcctcggaaatggagaatctcttaaagagggctatgccttggcttggtgaggaaatatgcataaaggatcctcagactcagaacaccataatgcctgggctgagcttggttcagtggatgaacatgaacatgcaacagagctcctcatttgcgaatacagccatgcagtctgagtaccttcgatcattgagcaaccccaacatgcaaaatcttggtgccgccgatctctctaggcaattatgcctgcagaaccagcttcttcaacagaacaatatacagtttaatactcccaaactttctcagcaaatgcagccagtcaatgagttagcaaaggcaggcattccgttgaatcagcttggtgtgagcaccaaacctcaggaacagattcatgatgctagcaaccttcagaggcaacaaccttccatgaaccatatgcttcctttgagccaagctcaaaccaatcttggccaagctcaggtccttgtccaaaatcaaatgcaacagcaacatgcatcttcaactcaaggtcaacaaccagctaccagccagcccttgcttctgccccagcagcagcaacagcagcagcagcagcagcaacaacaacaacaacagcaacaacaacaaaaattgctacaacagcagcagcaacagcttttgctccagcaacagcagcaattgagtaagatgcctgcacagttgtcaagtctggcgaatcagcagtttcagctaactgatcaacagcttcagctgcaactgttacaaaaactacagcaacaacagcagtcattgctttcacaacctgcagtcacccttgcacaattacctctgatccaagaacagcagaagttacttctggatatgcaacagcagctgtcaaactcccaaacactttcccaacaacaaatgatgcctcaacaaagtaccaaggttccatcacagaacacaccattgccactgcctgtgcaacaagagccacaacagaagcttctacagaagcaagcgatgctagcagacacttcagaagctgccgttccgccgaccacatcagtcaatgtcatttcaacaactggaagccctttgatgacaactggtgctactcattctgtacttacagaagaaatcccttcttgttcaacatcaccatccacagctaatggcaatcaccttctacaaccaatacttggtaggaacaaacattgtagcatgatcaacacagaaaaggttcctcagtctgctgctcctatgtcagttccaagctcccttgaagctgtcacagcaaccccgagaatgatgaaggattcaccaaagttgaaccataatgttaaacaaagtgtagtggcttcaaaattagcaaatgctgggactggttctcaaaattatgtgaacaatccacctccaacggactatctggaaactgcttcttccgcaacttcagtgtggctttcccagaatgatggacttctacatcaaaatttccctatgtccaacttcaaccagccacagatgttcaaagatgctcctcctgatgctgaaattcatgctgctaatacaagtaacaatgcattgtttggaatcaatggtgatggtccgctgggcttccctataggactaggaacagatgatttcctgtcgaatggaattgatgctgccaagtacgagaaccatatctcaacagaaattgataatagctacagaattccgaaggatgcccagcaagaaatatcatcctcaatggtttcacagtcatttggtgcatcagatatggcatttaattcaattgattccacgatcaacgatggtggctttttgaaccggagttcttggcctcctgccgctcccttaaagaggatgaggacattcaccaaggtatataagcgaggagctgtaggccggtccattgacatgagtcagttctctggatatgatgaattaaagcatgctctggcacggatgttcagtatagaggggcaacttgaggaacggcagagaattggttggaagctcgtttacaaggatcatgaagatgacatcctacttcttggcgacgacccatgggaggaatttgtcggttgcgtgaaatgcattaggatcctttcacctcaagaagttcagcagatgagcttggagggttgtgatctcgggaacaacattcccccgaatcaggcctgcagcagctcagacggagggaatgcatggagggctcgctgcgatcagaactccggtaacccttccaatggttcatatgaacaattcgaatga

SEQ ID NO: 21033 - DNA, 2490 bp, Oryza sativa; identical to SEQ ID NO: 11256
  Clone ID: TF_OsC793_2

SEQ ID NO: 21034 - DNA, 3111 bp, Oryza sativa
  Clone ID: TF_OsC2423_1
atggctggctccgtcgttgctgctgctgccgccgccggcggtggcacagggagctcttgcgatgcgttgtacagggagctatggcatgcttgcgctgggccgttggtcacagtgcctcgccaaggcgaattggtttactacttcccccagggccatatggaacagcttgaggcatctacagaccaacagcttgaccagcatctgcctttgtttaacctgccatctaagatcctctgcaaagtggtcaatgtagaacttagggctgaaaccgattcagatgaggtttatgctcaaattatgctgcaaccagaagcagatcaaaatgaactcaccagcccaaaacctgagccacatgaacctgaaaaatgcaatgtccattccttctgcaagactttgactgcttcagatacaagcacccatggtggattttcagttcttaggaggcatgcagaagaatgtcttcctcccctggacatgactcagaatccaccatggcaagagcttgtggctagagatctccatggaaacgagtggcatttccgtcacatctttcgagggtccccccaccactcccttattttaggacaacctaggaggcatctgcttacaactggctggagtgtttttgttagctcaaaaagattagttgccggtgacgcattcatctttctgagaggtgagaatggagagctacgagttggtgtcaggaggctcatgaggcaactaaataacatgccatcatcagtaatatcaagtcatagtatgcatcttggagtcctagcaactgcatcacatgctatatccaccggaactctcttttctgttttctacaaaccaagaacaagtcagtctgagtttgttgtgagtgctaacaagtaccttgaagctaaaaacagcaagatatctgttggaatgacccgtgcggcccctgggccccccccgcgcgtgcctaagccacagcaaccgcatccctccttccacccccaccacctcccccgccggccgccgtgtcccctccgtcagccggcccagcgtctgcctcagctccccccggcatcgccgctcgccctcccgtgtgtcatgttcaactttagtactgaccccgcaccagcggcgtcccgctccctggccaagagacacgcagccccggagaagaggccggccctctggccctcctaccacgaccgccaccactagacccccctccctccctctgtgggcaatgccttcaaccatccgcaccctcaaactcaacctcacccggcgcccgcggcacccgcggcctacgtgatcctgccacgccgccaatctgcgaagagagccgcttgacaaaggtccttgggtatgggaggcgacgtgggcgttacatggcggggtcaggttagatcggttgtgatatgcagaggaacatgttcgaagcgagcagcggtagtacagatcgcggctcgcgcaccgcgtcgcgatgcgttgttgcccgcagggtggtggatttgggagggatgcttgtgggggaggaggcttgggaggcaccttgatggatggggaggcggattcatatggactcctacgatgcagccatgctccttgccccaagctctaagctgcctgtcctaggtgactccatcaaattgagcagtatgaccaccgcccatgcagccttcgtctggggcagagtgctcacaagtaccttgaagctacaaacagttggctatctcctggcacgggtttgaagatgagattcgagggcgatgaagctcctgaaagaaggtttagtggaacaattattggtgttgggagcatgtcaacgtctccatgggcaaattctgactggagatctttgaaggtccaatgggatgagccttctgtggttcctcgtccagatagagtttcaccatgggaactagagccacttgctgtgagtaattcacagccatcacctcagccaccggcaagaaataagcgggctcggcctcctgcttcgagttcaattgctccagaactacctccggtcttcggtttgtggaaatcttcagctgagtccacacaaggcttctcattttcgggactacagcgaacacaggaactatatccttcaagccccaatccgatcttctcaacatcattaaatgttggattcagtacaaagaatgagccatctgctctaagcaacaagcatttttactggccaatgagagagacaagagccgactcttactctgctagcatcagcaaagttccatctgaaaagaagcaagagcctagttcggctggctgcagattgtttggaatcgagataagctctgctgtggaagctacatctccactggctgctgtttctggtgttggtcaagaccaactagctgcctcagtagatgctgagtctgatcagctctcacaaccatcacatgccaacaaatctgatgctccagcggcaagcagtgagccatctccccatgagactcagagtcggcaagtgaggagctgcaccaaggtcatcatgcaaggaatggcagttggaagggcagtggacctgacaaggctccatggatatgatgatcttcgctgcaagttagaagagatgtttgatatccaaggagagctctctgctagcctaaagaaatggaaggttgtttacacagatgatgaggatgatatgatgctggttggggatgacccttggcctgaatttgcagcatggtgaaaaggatatacatcttgatgcgttggaccctcactaccttgttgcaatgtctgatcctcctgtcgcgtgttctcgtcaatgcggccctcctgatactgtacatccaaagagctgttctcttcaacggtctgtgcttccaaatccactggatcaatgctggcggttttgggggatggaaggagggatactcgacaaagagggcaagtggtgtttgtcgagagccagtggtcgatgcaatcgatgtggaagggcctcagggcattgatatgcttgctattgcccttcggaaacattctctaaatgtagctcaaggctctaatttagaagcacttccattcattactgaactaattattgagatattggtggtccagacccaacggaaaacctacatcgaagtgctttcatga

SEQ ID NO: 21035 - DNA, 3293 bp, Oryza sativa
  Clone ID: TF_OsC2629_1
atcacgaaatgtagcttggtaaatacccccccttgctaaccatcagagtggggttccctggccagtggtagacgattttatgttctccattgtctcggtcacagatgaaataacgaacagcggtgccatgagaacatcctgcgagcacccagtctgcacgatgctgttcaccttctccatttcttcctggagtttcattatcctccccatatattctttatctaccacgcgcagagaaattgggttaaaataagaaccttcctcttggaaaaaaggtagtcctgaatctctgtagatgtcgtcgattaaaaagctggtagaatcgttcttcaatagctcgaatgatttgtctttcatgttatctgtcgttttataattttgctgtttttgaaaacggtaagctcaaatttaatataatcgaacacaaaccactcgcaatgcagtgacctgtttgagcaattattgctgttccagaactcatcctcaacacatctctatcacactcaaattcacaggtccaaaaacgagacactcaaaacagagagatacggataccaggatatgacaggcttcagcttcactggctctcagatggttgcttggccactgaaagagggagaagacatgatggttagcatctctgtcacagaggccatggcgcttaacgctgccttcaggacatcctgggagcatccaggcttcacaatacttttgaccttctccaaatactcctgcaattgtttgatcctccccatgtagtctcgatcttcgacacacaatgaaatcggctttgtctctccacctggtccctcaaattgcacgaggaccagggtttctgtaacatgtcttccatccaaggaatgctggaagagttttgtctcaaccaactcatatgcttttacgataaccatattaggatgtgattgaagagcacactccaatgccacatgagaagccttccgccccatcatgcgaataaagtagtaatacttctcagccgaaagagcatcggtgcatacattgcttataagttgtgagttcaccttgcatatggtatcaaaaccaacggttgtctcaacaaactgattcttaaggtccccattcaaagttacaggaacacctacaaccttcgttgcacacttagcctcagcaaaagtctcagcaagttgagcagcatccgtattggatgtaacacctccaatgattactaaagcatccaacttcaaagcctgacaactagccatggcaccattgacctgctctgttgttctaatttgatcctttgtccggccaagcatatcataaccaccttggtttttatatgaagaaagaacttcgtcggtgatctccaaagttttctgtgcgagaagaccatcacttccaccaagaaaaccaataagtttgctgtttgggttgtgagccttaattgcctcatggagtccccagatgacattatggcctcccggggactgccttccgcagaaaacaacaccaaccctgacaacaggatgctctgatatgacagtagcatcggggacattagccgtcttccggagaaaatgggccaggggctgcccgtatgtgtgggggaacgcgtggctgatcacatgagcgcctgcaggatcagcagcaattgcagcgtcaccatactccactctcacagtggtgccagtatacacgaccagcgccggtgagatggactgatccggacgccggagcggcgcgggatctggcgccgcgcggtccggaagcacacagatctggaggcaggggggcagctcgggctggtagagcgcgcgcttcttctgcacctccagttgagcagcatccgtattggatgtaacacctccaatgattactaaagcatccaacttcaaagcctgacaactagccatggcaccattgacctgctctgttgttctaatttgatcctttgtccggccaagcatatcactaaccaccttggtttttatatgaagaaagaacttcgtcggtgatctccaaagttttctgtgcgagaagaccatcacttccaccaagaaaaccaataagtttgctgtttgggttgtgagccttaattgcctcatggagtccccagatgacattatggcctcccggggactgccttccgcagaaaacaacaccaaccctgacaacaggatgctctgatatgacagtagcatcggggacattagccgtcttccggagaaaatgggccaggggctgcccgtatgtgtgggggaacgcgtggctgatcacatgagcgcctgcaggatcagcagcaattgcagcgtcaccatactccactctcacagtggtgccctggaggcaggggggcagctcgggctggtagagcgcgcgcttcttctgcacctccgagagctcgcgcggcacgccgtagtcggagtccatcgccggtgacgcagcgcggcgcggcgcggcgctccgattcgttctgtgttggtagcttgggggggtgggcttgggcttgaccacgatacagtagtgcacgtctttggcggcctgaaagtctctccaacttgacgccatagtttacaaattgttacctgctcatggcctcccaggtgggcaacctgcctccataacttgaggcagttgagacctttgccatagaacttgggaggcttgaactcgaggccgtgctccctgtggaagcgctccagctccaccatgaacgccgcctgctcctcctccgttccagagtcgtcaccgtcgaggaaggggtcgggctcagcgggctggttggcgcagcccgccatcacggtggagctctcgccctccgccttcgcctccgccctcggcgacgcatcgggggtggagtcgtcatcgtcatcctcctcatcatcatcctcctcctcctcctcctcgccgtcgtcgccgtcctcctcgtcatcgccatcctcatcgccgtcgtggccgtcgtggctcatggcgtcctccccgttcatctccacccccctcgcccccacggcctcgtcctccccctcgtcgtcctcgcgctcacggccgccgcccgcccctgcattgagctccacccgatccagcgagcccgcgccctccgcgtccgcgtcgctcttcggctcgggggtcgggggagtgccgccgccgccccacgcggccctctcctccgccacgggcaccgcctcctcctcctcctcctcctcctcaacctccacggcacggcctgccgcctcctcccctctggcctcctcggcggcgcgcgcgtcgtcgtggtcggagccggagccggagccggccgtggcgccgttcat

SEQ ID NO: 21036 - DNA, 3106 bp, Oryza sativa
  Clone ID: TF_OsC59278_1
gcacgagtgctcccgccgtcatgtctcgagccttctccgcccaaggtgcgccctcccattgcggcggcaggctgtgtggaggtttgtcctggattcatctcgtcatctcgtcccgcagccaaagcttttacttttgttgtttcctttggttggtccgggctcgatcgcgatggaggcgggctggcttgggctcgcgtccaattcgcccccaccaccgcgggtacggtacgttgttaatggtttcggagtggggagtgttgtgagcgtcttcgggaagcgctggggcgccgtgtgggatgtctctcgcccacggtgccctttattttttctatatcattattccccggagcccgccagatcgaatcctcgctccccgccggcggcgccgcggggagggagcggtctggggatggagaagccgtcgattgacgcgattctgtgtcgcgggggctccggttcggccgctgaatgccgccctgtgtgcctccgcggcgtgggttgacgttggggaagagagacgagagacaggggggtagggtcgctgcggcggccatgtcgcaaatccagagcttctcgcggcagaactgcgtgctcctcgcggtgctgtgtgggaagcacgctgagaagcgtgcccaggcgaggtcggggctggaggcgaagcggctgcggccgtcgtacccgttcccggagctcagctcgtcggggagattggaggtgcacacgctgttcaacccgacaccagagcagttcctcgaggcgcagcgcgtggttcagcccaacttcttgtacatagaggggacaacagctttaggatgagaagtcgattgactcaatcgtctgggggcaagaatcctactctaacctgcctgctgactggcgaatctaggtagtatgtatcacgacctgagatctgcagctgcttcccgattgatgtattgctatctcgtgtagctgaaatctagggggtaaactgtaagtgagtataaggagaacaagtacttaagaaaaaagaggaaacccattcctgccatgcattaatgtcagtggttcaaagttcggtgagccatacttgggatgcttttcagcttgctcatgcatcctttcgattatactgtgtaagaaacaaccatgtacaaagtgttaagcttgggcctcgtctactaggggatgctccaaagataaatataacccctcctgagaatgagatggttgaggaggaaggttcttcagatgtgtttccagctataaaaatttatgatgatgacatcaacatgaaatttcttctttgtggagttcctagcacaccggatccttgtttgttaggttcattagaagatggcctgaatgcacttctgaatattgaaattcgggggtgcaaacttcagaatcgaatcagtgcttctccaccaccacttcatgctgcatccttaccacgtggaatggttacaatgcgttgcgacatcactacgtgcagttcttctcatgtgtcacttcttgtttctggtagcgcacaaacttgttttgatgaccagcttttggaaagccacatcaaggatgagatcattgagaagagccaactagtccatgctctgccaaataatgatgataagttatcatcaagtgtgcctttcacttcaatgtccacagcttgtggggcttctacctttgaagtttggatgacccttcctaagtgggcagcacaggttctgaagcatttagcgccagacatctcatacaggagcttagtggcacttggaattggttgtataaatggcacgcctgttgcttcatttgataggcgagatgcagaccgccttcttttcttttgtacaaatcaacacaaagatttggctattgaaaatggcccatactttcatctgccaagatggtcagcatctcttaccaaggaaagagtgaaggtgggtctggaatcgaaaccaaaattgttaggtgcgaatggaattcctgaggacaagaaacgtctgatcgaagggccttcctcatcttccaaggcaaaattgaagcctgcaactatgaggcccattcctcactctagaaagcaacaaatgcatccttttatgggtttcctggaagctactgttcatgaaactagtcaggttaagccaaacttgccagctgctcccccagtgaagcataattcggtacctgctgctccagcaacacatagaaaatcaacttcagggccatctcatgctcagtcaatcattcaactgaacccactgcctctgaagaaacatggatgtgatcggttgcctattcagatgtgctctgaggaggacttcttgaaggatgtcatgcagtttttaattcagaggggtcataatcgactcgtacctcatggaggactagctgaatttcctgaggccgtccttaatgcgaagcgccttgacctatataacttgtacaaagaggtggtgtctaggggtggcttttatgtaggcaatggtataaactggaagggtcaagtcttctcgaagatgcgtaaccatactgtgacaaatagaatgaccggtgttggaaacacactgaaaagacattacgaaacatatttactggaatatgagctagctcatgatgatgtagacggggaatgctgtttgctttgccacagtagcgctcctggagattgggtgaactgtggtttgtgtggtgaatgggcacattttggttgtgacagacgacaaggcctaggcactttcaaggattatgcaaagacagatgggctggaatacatctgccctcactgtagtctagcaaactataagaagaaacctcctccccaaaaggtagctaatggctttgcgaatacagtgtctgtatcacgaaatgtttagttttcctttcttcttttttgccctgtgtttcggggagaagagcccagtagagtagagaataggcaggctgctgatagagagaggaaggtgtgtagtgttgtgatctgtattaccctattaatttggttcagcgtaggaagcttaagttttatatagaatgtaacaactgacaacacagctaagctactacggtagctggtcaaattaagttaagagcctgttgatatatgtttgcgtcgtcctgcagcccg

SEQ ID NO: 21037 - DNA, 2403 bp, Oryza sativa
  Clone ID: TF_OsC2705_1
tttttttttttttttttttttttttttttttttaacactaaaaacaattgatacaccatcagtaatagtttcaagggatggtcaggcacagttgtcaattcagttatacagatacaacagcaatgcacaaggcaacagttacatccaagaatctatcttgtcttcatgttctgagtagtatgagaactgagtattaggaataacctcacaagctacatgctacaaattatcaccttttctttagttgagaaaaaaaaaaggaagaaagaaaccatgaacatgtttagcatcaggctattaacattctaaactaatagagctgaacttaagctacatatcacaattaacgaactacaagatacataactagaccatctagttaactagaattaatcaatacagaatagacaacatggcaggagtaatgaagcagaaagtaactagtttgcaacgaagatcaggatgaacaggcccaagtcaatcacataaacccccacctacaaaagcaaccttgcatgttgcgcttcatcttgtagagcaccatttactttgactgctcgaatggtgcacggacaaatagctgtccatggagagtgacaactgccgaagtttgatgaggatcaatgcgggagggcaaactaataaccttcttgaatggagtaacaccccaaggattgtctagttgctcaggctctccagtaactatcaaacggccagcaggatctgactgaacatgtacctcctcacgcagaaggccaggaaccaatgcatagacttcatagcaatctttggttctccgaacgtttatctttacccaatcagctggagggccaaggtcaagaaccattgagtcattttgtagcttgtcaggtttatatggtacaatcctgtcatcttccaaggtcggtgtccttttcctcttggcagaaccgctgcttttaggagttttatccttttttaagacagacaccgtccctttatctttaattattggatcagcaatttcaccattgccaagcaagcgctgagagtgccagccttgcatagctcgggttgcagattctcttctagctcttccagaaccagaagcatggatgccaacctgactttcagaagtaatcctctctgttaaattagatgcagcaacttgaaactcgcccgtttcgattttgtgtttctcatattcaaggagtgccttctcatagaagttacggaaggtccatgaaacagttgtgcatgtcttcggaggtttgaaagactctcccacttgccgccacagtttgcacgatgtcacctgttcatgcacccccaactagctacccaacctagtcacttgtctgcaaaacaacccagtaacttgttttcataacttgaggcaattcaacccttcaccatagaacttcgggggcttgaattccataagcttctccctgtaaaaccgctcaagttccttcatgaaagcagcctgctcctcctcagtccccgagtcatcaccaccacagctgtaatcaaacatgaaggagttgcttgcaagcttggacagcaccgggtcctccacgtcctccccagctgacgctaacataagctgtttctcaccatcagcacccttgttatcaccattgctatcgccgtccgccttcaaatgcccatcaccattctccaatttttcaaccttcatttcagccacctcatttccgccagcatccgtcttaccgttactagtcacaggaatatcctttgccttatccgctgcggccccaccctcctgctccaccgcctcctcctttgcatccatgccttcaggctttgctgaatccttcacggaatcaacggtatcggcagcctcctcaatgccatcctcacccttaccagatttctcctcttccacagcattggcttcatccacagggccatcggcgcctggctccgcctcgctttccacaggcgcagacctaaactgggccatgggggttcagcttcaattaggctcaaatccagatgctcgccgtccgggcgcgcgcgcgcgacgacgcctccacacagcgtagaaggctagggcagagagagtgagatagagagagagggtcggggaaggagaggaggagggccgtcgcccgcaccgtgcctccgaggaggagccgcgacgccgcggccgcgcctccgcccgccggaaacagcgtccccgcgggcgaacagacacgagccgaggcggggagggtgtagagccgtagcccgtcggggtcgacggggagagagagacgggagcggtgaggtgagaagggctccccctggcgagcggcggcggcggaggcggaggcggaggcgagggcggcgagcggccgaaaccctagccggagacgggggagacgacgacgggagaggaagagagcgggcggcatgaac

SEQ ID NO: 21038 - DNA, 5376 bp, Oryza sativa
  Clone ID: TF_OsC135913_1
cctctggcaagctacaaatatttgattaatagtaaagtacttaaggttcaaaccgcattacatccattgacagcaccagatcataataaaagaattgcctcaagatttttcatgttaaaaatgagatacctaaagctgacaagagaagattgatgtaaatatcataacagccctaaaaaattacatgtgttttctcccatgggcaactactattgcactggttagcgcccactcttccagcttcataacaaaatgccggcggtgtgtgcgctactgcttaggacgttgatggccaaagcaatattgatctttgcagtctgatactaacttcagttccttctagacaggcacagttagactttcgccttcaaaaaaaagtccatacacatggctgttcgatggaatacccttttcctttctctccacgtcctgtttgtttcgccatgacaacgtagatgttttattaaaatgaaccttacatttgttttctcccactggctattactcttagcactagctagctccaactcgtacctggcctttttcaaaagatagccggtttcctgtgaggtcgtgaatatctgttcgttgtttctatcagtcctcatgggctaaggaatcaaatctataactgaactggcgatcatttatgccagcagccgatgttgcctttagagcaatcaaaagagatctgtgcatgacactaagatcttctccatggtaagagtctgcatcatgcaatatttgcataaggtaggacttaaatttatgagctttctcagcaatttcttctaataaatccaactcctcaatccctgaatagaaacccttggcaaaagagcggagcccgattaatgcaggaagtgctggacgattccctttagatatcttctcctgtagtctattctgtaatgggtccccactttctaaatgaaagcaaaaaggacaggtccattcacgagtcacttgtgtagaagcaggcagtggttcgacacaggagctatgatacctcgcttgacatatcatacatctaggggtaatatgatctcccacatcacaagagcagatggcacataatcctttctggttacagtcggaatataacatacaagcattgtccattgatcctctaatcttcagaagcgcggagagcaaagaatcactgttattgccatcaggaaacagagtacagtggcagtgagtaagccactcctcgatctttttaatctcagcaaccaccttatccatctcagtacaatcgaatgccacagactgaccactgtctctcaagcttaatagtccatcccaagattgatgatcaggaaacatgaagaaggcattgcattgttctgcccatgaattgtgcttgttgatagcatcctcaagtttggcaatcatcataggataaggaacagcaatttcctgatcaccaacaagtgcatggaaaatgagatatatcagtttgaactttgaaatacttgccttatactccgctaaaatattttcaacatttaacaatctggatgtttcagacatttctgaaccaggaagaaacataagtgcttttcttagccaagatgatcccctcaccaatagttcagctaaggaacaatccgacaatgaggcaggaaggttgacagcttgttgaattaatttttcagcatcctgcaacaaaggagtcacaccgcagaaagacaatgcattcaatatccatccaagtgtgaaaaaagaatccttcagctcatgaacaaccttaaattcaaaaccgagagatagtcctttttctatttctgcattaattttatcttgcagctcctctagttttcttttaagtggatcaatagtagagtcgattacatttgaatccagtaaggatcttgaactgtgtatcagacttagtgaattatgctcccattctatgacattgttgagaacagaattaattgcagaagtgtcaagaatgactttcatacttgcaggctggccgattaaatcctttaggtcatcaacattaagaaaacctccagatgcaggtttatcacttctaggcctcagataggcctgacatttgtccatccacaacttagcagtagcaacctctgctttcatatccagttcagatggaaggataacatgtatgttctctgagcacagaatatggttttcaaactcagggagagcagctgagtgctcaagaataaagctagccttctcttcccaagtgatggcagctttgaggttatgggacagatcaacaaatggttgctcctcttcaatggttaatatggaagcttctttcagcacttctttgaccacctccatagatgtttgtgttgcaagagcctcggatgcttgcttcctgcagaaggatttctttagctcttcctcaacaacggaaaattcctcaaacaacatgccttttactcctagtgattctccatccttcagaatgccagtcaactcctcaacaatgttgtcataatcattcctttcaagaagtttgccgactatgttattagcatgattgacccatgagcaagcacctgaataccgttgcatcagaatgttcagctctggaatactgaagttggcaccatccaccacaagaaggaagctctccaactcctcagatttcagttcatttaggaaatctatgtcgacgatgccccgtttattctgttcaaggcaatcacatgctttcttcaaccaggactttgcggaagaaatctcacaagacagtgctgatgtttctgttagttcaaccgggaactctaaagccctagagtacagtgtttccaagtaatcaacctttgagcgagatgataatgcattgtttatctcattaatcattatttctcctttgtccacatatacctgcaattgtgcaagacttggttcataacatggtttgcatcttacagcagctaattctttgatttccacataatttactttctcggaacaattctctttacaatgaagaaagccatcaatttgagagaggcattttctaacactggaagcccatttcctaccttctattaattttgctgacatattccgcacagaatccatattatgatcaccccaaagaaactgttcagcatcttctaaggcagtggcatatgcagtatctaaaaatggcatatggagaatatggtcagcttttgaaagccagtcttctgcaagttgtgtatatgacatatactgatctttgtcctttctcgttggcaaaaaaacatcactatgtaaaagggagttctgcttaacattctcccttggtagattagcctttgagacctcacaaactaaatcacccaactctgcaagggtatggcggtaaagtaagcgatgtttctctggactgcattcacaaaggtgcttccagtgctgggaaaaagagaaaatgctcttaataaacttggctaatatcaatgggatgagtgcactgtcaatgtcacatgacatgagatggcgatatactagtaggtctacctcttcacttccaatgaagtttggattattcttcggtggcatcagattggatttgacaatcccagtaatccatagctcctcacgacattttttctccttcacaaatagcctctctatttctccttgtaagtagggaagtgattcattgtccacgccgttctttgcaaccacatacaaaagctcctcatgtgacaaaacaggtgctttacggtacaggcgatatagttcagcaccaatgccaccatgaggtaaccaatcggcaggagcaaaatttacagcctcagcacaatttaaaccaggttcctgtatcacactataaacaggaacaccatttgcttgtaaaatcgatggactcagcatcgtgacaaggtgaaaaagcaggtcaggctgtgcatcaaatagatcaggcaaagcattgcgcataacctgcagatcacaaaaggttaagtattctaacataacaagtctcagtgttgccttctcaaaagcatttgcttctgctccaggtaccccataccaacatttcggctcacccacgtgcatggagtaactgtgtaggtgaaaaagactagcactcacagcggctctatgattagacatcagatgaccagcaatgttatcccggactgtctgaagaactgagcctggtaggtttgggaaattattcagattccatgggctcgagcaatacttgtgccacataactgggtccaccgacgatggcacgggatcacaaaggcgaggaaacccacttccataaattgaagtgtccaaatcactcccatacataacctcaagctctcctacctttccctctacaatctcccaaaattgcttctcaacctgaacacgactgggattcttgtgtccaaaccacctttttctcaccctctcctcaaatttccggaaagtttcaacttggcaagtcttcctcctgtggacaaatccaaaacaattcctatcagagttcatgcactctgagcaataccagtttcccggaggcacactctcgagtggtggagacaagcaatatagatgccatcccttatcacagcgatcacagagcagcatgacttccccatgcaagccactattacactgctcacagacctgatccattgcctcattgaccacagtagccgttgcatcaacctttctccttttctgcttgggagcagatgctgcagttttggcactagtgctgcctccacagtgtcccattgtgttgctggttttcctaagccttttcttctggcgcctaatactaatattagcagaggaagcagaaaccggcggttgatcatcatgtgattgtgatggcaatctgtttgtgaagtgctcatattgatagagatgctcataatagagctgcgcgatgacgtgctcggagacggagaaggcatgcctcggcgccttgtcatcaacgaggcggagcacgtcggcccagcgcttccccgcgcaggcgccgtcgtagccgccgaagcgcttgacagcgtggaaaaggcggcagaggtcgagcgggcgtccgtcggagagggcaggcaactttggctttggcttcttgcggcctcggtgtcggtggaggaaacggcggtaatcgaggaggaaggtgtcgggatcagcgggggcgaggcgggcgaggaggcggtggatgggctgcctctttgtggggaaagagagggtgcagacgtcgagtgccgggggaggagaccaggagggcggcgggacgatgcggcagatgccgtatggctcggcgaggggccggatacgggccacgtacgccagggggtcgccgaactcctcctccgtggggcggaacaccggagcctcagggacggaagatccaacgccgctgcctctggctgcggcggagatccccat

SEQ ID NO: 21039 - DNA, 719 bp, Oryza sativa
  unsure (1)..(719): unsure at all n locations
  Clone ID: TF_LIB4309-005-Q1-K1-A4
gtggaagaggagaaatctggtaagggtgaggatggcattgaggaggctgccgataccgttgattccgtgaaggattcagcaaagcctgaaggcatggatgcaaaggaggaggcggtggagcaggagggtggggccgcagcggataaggcaaaggatattcctgtgactagtaacggtaagacggatgctggcggaaatgaggtggctgaaatgaaggttgaaaaattggagaatggtgatgggcatttgaaggcggacggcgatagcaatggtgataacaagggtgctgatggtgagaaacagcttatgttagcgtcagctggggaggacgtggaggacccggtgctgtccaagcttgcaagcaactccttcatgtttgattacagctgtggtggtgatgactcggggactgaggaggagcaggctgctttcatgaaggaacttgagcggttttacagggagaagcttatggaattcaagcccccgaagttctatggtgaagggttgaattgcctcaagttgtggagacaagtgactgggttgggtggctatgatcaggtgacatcgtgcanactgtggcggcaagtgggagagtctttcanacctccgaagacatgcacaactgtttcatggaccttccgtaacttctatgagaaggcactcctttgatatgagaaacacaaaatcgaaacgggcgagtttcaagttgctgcatctaa

SEQ ID NO: 21040 - DNA, 1190 bp, Oryza sativa
  unsure (1)..(1190): unsure at all n locations
  Clone ID: TF_OsC325_1
cggacgtgtntgcagctaattaagtgggtgggttcgcttgcttgctttgcttttgcttggagacgggagcgacgctggcttcagcgattggcgtggagaagctagattgttggtgcgactttccgaccgcgaaaatagtagggctggcaaaccggtggccggccggcgatccggccgaggggatggggagcatcgacggccactcgctgcagcagcatcaggggtactcccacggcggcggcgcgggagggagcaacgaggaggaggaggcgtcgccgccgcccggcggtggctcggctacggggtcggcgggccgccggccgagggggaggccgccgggctccaagaacaagccgaagccgcccgtcgtggtgacgcgggagagccccaacgcgatgcgttcccacgtgctggagatcgccagcggcgccgacatcgtcgaggccatcgcgggcttctcccgccgcaggcagcgcggcgtctccgtgctcagcgggagcggcgccgtcaccaacgtcacgctccggcagcccgcggggactggggccgccgccgtcgcgctgcgggggaggttcgagatattgtccatgtctggcgccttcctcccggcgccggcgccgccaggggccacggggctcgccgtgtacctcgccggcgggcaggggcaggtggtgggtgggagcgtcatgggggagctgatcgcgtcgggccccgtcatggtgatcgcggccacgttcggcaacgccacgtacgagaggctgccgctggaccaggaaggcgaggagggcgccgtgctgtccgggtcggagggcgccgccgcgcagatggagcagcagagcagcggaggcgccgtcgtgcccccgccgatgtacgccgccgtccagcagacgccgccgcacgacatgttcgggcagtgggggcatgcagcggtggctcggccgccgccgacatcgttctagcactggcaccggttaatcaatgtctctctacctagctagttagccttccacttctttccctagttgtttgagtaggttaattaatcatttaccatgttaattaatgtgctatgtaatgcataagtactcgtgtgatcttatcgttccattttcttcagagtttgaagaatgtaaaattactgtgcgtatcaagatcggcagtggttgctcacttgctccttcaaaaaaaaa

SEQ ID NO: 21041 - DNA, 1066 bp, Oryza sativa
  Clone ID: TF_OsC151708_1
atggccggggtcaccagcaagcgccgatcctcctccgcctccacctcctcctcctccggcgacggcgccgccgtctccgaccggccgcggggggtgacccggaagcgcaggtccggcggccgttgcccccgccccgccgcctccctgaggccggccgcgccccgaccctcctctagcgatgcacgtgcaagaactaggcacaaatcggggatatgtgttcttagtggagtaatttctattactaatggtgggtataactggtgtaggaaggtaaacatgttggatttgaatagagctatccttgattcagatcaccacactgctggattgagagtaattctgcaaaaggaactacggtacagcgacgtaagccagctagggagaattgttctcccgaaggtattggcccaacaacaagagcaggatgtcatcggagcaaagaaggcaggtgatcaacaagctgccactgtgccacaagttgacgagcatatctctaccctcttccccatttttccaattgcacaagtcgatgactatctctctcccatggcaccacaagttgatatctctgccttcgtgccacatgctgatgagaaccatgagatatttgacgggatactgaattctctgccagagataccagtagccaatgtgaggtattctgacttcttcgacccattcgatgatggtatggacatggcaaacactctgaacgccaacgccaaccagtctgctagtctgcatgtcactgatgataagtctgggcattccttgattcccaacccaaagtctgggcctcacatgtgagactgacagggaagtggtatttcataccatggtcagtttgtatgaagctcagaaaccccttccctggcgccattgttgtacatccaaataattggtgtccttattttgacgctgtatatgctaactgctacatgcagttttatgtgtaaaatattttgttcacaacccaactggaggtttaatcagatgaaacattgtaactctgttcagttcagctcagaaatgtaattgtttctttcagtaaaaaaaaaaaaaaaaa

SEQ ID NO: 21042 - DNA, 819 bp, Oryza sativa; identical to SEQ ID NO: 11312
  Clone ID: TF_OsC413392_1

SEQ ID NO: 21043 - DNA, 1652 bp, Oryza sativa
  unsure (1)..(1652): unsure at all n locations
  Clone ID: TF_OsC170713_1
cacgagggttggtagtgaggggggagtggtccaaagaaagtgtggttaggaggaaaacaagagagagatgatatggggcaaatggacggcggcgacggcggcggcggcggccacccctaccactaccaggctctcctggccgccgtccaccagcagaccgtcccctttcccaatcccttccccgccccctcctccggagccgagcccccccacccgcacaaccacaaccacaaccacaatcacaaccacaatattcacaattctcacaatcacaaccacaatcacaatgctgctcctcacccttgtcacactcccactcccactcccactcccagaggtttcgccgactggagcgcctccaccagcgccttcacctcccttgccgcgcactcttctactgcccccagcaatgccgttcactacagcttctccccctgctatgccttctggacacattacatgctcaacaagaacgcctaccccacctccttccctgcgccacacgacgaccacctgcgccttgccaacaacaatcatcctagagacgcaccaggtcctgcatccagctacggggtcgagtcttttacttcaccgtccatggcaccgaatatttgcacccacatgcctcccatagaaggacccatatctgccaaggaagataagaaaccagagattttgcctagagtggttaagagcagtgatgaattggaaaccagaaacagcaatgttgaatttcactctgagacagttggtactctccctgagtcgaagcaaggccatgacagtcgtgctactaaactactcaactcgggagaataccaagtcattctgcgcaaggagctgacaaagagtgatgttggaaatgttggaagaattgtgctacccaagaaggatgcagaggctagtcttccacctttgttgcaaagggatcctttgatactgcacatggacgacatggtgctcccagtgacatggaagtttaagtacaggtactggccaaataacaaaagcagaatgtacatcggatttcgcaggtgaatttctgaagacacatggtcttcaggctggggatgtccatncattnatcctacaaaaaaccttggcctcctggccaaattttattattcccgaggaggagaaggcccattncatccagccagaccacaaatccctagatgcatttggggttaattgcaacagtgttagttgatgccatttgaagggataggtacgtggacttaccataagttggctatccaggagaagttgaaagtgtcatcgatttttatatcactggtggccaccatcacatggacaaagattaaagcgcatgcagcttggacctgtttaactctgaatgaatgaggacgaaaaaaagacaagattggtagagtattggaagtgttggcaatgggcttctacagcttatcttgggttgagaaaagcacttgtcagtttatttaattcagttatgttggggagcttgacttgtagttttcagaacaatatatttgcagcttctgtaaatatgttttggatctataagataaaagagagtggtgtgtgattttgcttttggatggtcatccatctatttctcatactaatgcccggaatgtctgttcattgtccaaaaaaaaaaaaaaaaaaaa

SEQ ID NO: 21044 - DNA, 1593 bp, Oryza sativa
  Clone ID: TF_OsC80572_1
atggctgatgctaggggctcctcttcttcttccggcgatggcggtggcggcgagggcaacggcggagcaggccatggtgactttgtggggggcggccagcacaactggtaccatgggatccttggggccgtgccgccgcccaacgttgggcgacaaaacatcgtgcaccatcagtaccctgctgctagcttgatccagcagcaccaccagtcgccaacaatgccgctaccgatggcgcagctcccctacgtgccccaatacaccgtgctgcctacgcccgccgtgctcccgtcgcaccaccaccaccacggccagtcgcagatatctcaagaaaacttccaagactgggttccctccaacaatgttgcagctccgcatgttcccagcgcttttcaggattggaggcaaatgtgcaatgggtcggcattcatgccttttggccaaactgctgccaatagcaatgttttttaccagaatctgaccttcaattcatggactagcaataacatgccgaggaaccctgtctacactagtttccaccctgctgcaattgaggatcaccatgctcctctattccatagcaacaatcatgacatagacccagagtttttgggaaaccgacacttgcatggagttgacatcgccggagctccacccgcaaaagccacctcacctgccaccgccggaggtctgctcacgaacacagcccctgccaccgtgtcacagatccatgcgagatgccgccgtcgccaaatctaccgctgctgtggccttcttccgcgagcacctccaccatcagatccgtgcgcgttcgcgagggccgccatcaccgctgccagatccgcccgcggcctcctctctcatttgtacggtggcttggtgttttggcttgttgggaaaaggaagctgggggagaaacgagagaggaagagaaaagtggtggctgggatggatccaccaattgtcttcagaaggagcgatatggagagcgaaaaaaacgatgataatccagatcaaactccggttagtgagcctccaagcatgaatcagaacggtgaaaatcttattattagattcaactgtagagaataccgtgttatcttgcgcaaggagttaacaaacagtgatgttggtaatattggaagaatcgtgatgccaaagagggatgcagaggctcatcttccagcattgcatcaaagggaaggtgtgacgctgaaaatggatgacttcaagtttgaaactacatggaattttaagtataggttctggcccaacaacaagagcagaatgtatgtcttggaaagcaccggtggttttgtgaagcatcacggtctccagacaggcgacatattcatcatttacaaaagctcggagtctgggaaatttgtgagctccgtgccatttacttccacaacgtacggagaatccgacggtgaggactacaacggtgatagaagcggccccggtgccggagaggtggccgacgaagatttcagaaagcctgagtttggttggtattgttgcgcgaagataaacaggaaagaaagtgagatcagggaacaagtgtctaaggagaaagtgaactccaactga

SEQ ID NO: 21045 - DNA, 2187 bp, Oryza sativa; identical to SEQ ID NO: 11314
  Clone ID: TF_OsC159728_1

SEQ ID NO: 21046 - DNA, 804 bp, Oryza sativa; identical to SEQ ID NO: 11315
  Clone ID: TF_OsC413391_1

SEQ ID NO: 21047 - DNA, 1722 bp, Oryza sativa
  unsure (1)..(1722): unsure at all n locations
  Clone ID: TF_OsC11135_1
gattcctcctctctctgctcttctccctctccctagctagagcttggcttgcttcctccaaacacagctcgagatcaataggaattcataggaacaacaatacaatacatacacgcatacataggtagatcatatccccctctctagtatcctatagcttacttctttgtaacagtgcctatcctcgaacatcttgcagaggaggaagaaggaagaagaagaaggaggagttgggagagaggagcaagaaatacagccaagaatttgaggaaatagtgatagttttctatggagttcactacaagcagtaggttttctaaagaagaggaggacgaggagcaggatgaggcgggaaggcgagagatccccttcatgacggccacggccgaagccgcgcctgcgcccacgtcgtcgtcgtcgtctcctgctcatcacgcggcttccgcgtcggcgtcggcgtctgcgtcagggagcagcactccctttcgctccgacgatggcgccggggcgtctgggagcggcggcggcggcggcggcggcggagaagcggaggtggtggagaaggagcacatgttcgacaaggtggtgacgccgagcgacgttgggaagctgaaccggctggtgatcccgaagcagtacgccgagaagtacttcccgctggacgcggcggcgaacgagaagggcctcctgctcaacttcgaggaccgcgcggggaagccatggcggttccgctactcctactggaacagcagccagagctacgtgatgaccaaggggtggagccgcttcgtcaaggagaagcgcctcgacgccggggacaccgtctccttctcccgcggcatcggcgacgaggcggcgcggcaccgcctcttcatcgactggaagcgccgcgccgacacccgcgacccgctccggctgccccgcgggctgccgctcccgatgccgctcacgtcgcactacgcccccccctcgccgccggccacgctctacgagcaccgcctcaggcaaggcctcgacttccgcgccttcaaccccgccgccgcgatggggaggcaggtcctcctgttcggctcggcgaggattcctccgcaagcaccactgctggcgcgcgcgccgtcgccgctgcaccaccactacacgctgcagccgagcggcgatggtgtaagggcggcgggctcaccggtggtgctcgactcggttccggtcatcgagagccccacgacggccgcgaagcgcgtgcggctgttcggcgtgaacctcgacaacccgcatgccggcggcggcggcggcgccgccgccggcgagtcgagcaatcatggcaatgcactgtcattgcagacgcccgcgtggatgaggagggatccaacactgcggctgctggaattgcctcctcaccaccaccatggcgccgagtcgtccgctgcatcgtctccgtcgtcgtcgtcttcctccaagagggacgcgcattcggccttggatctcgatctgtagcgacctaaagagagaaaaacaaaggaaagttcatcaacgattcttttttcttcttctgttttgatttggtttgttcttcttctcgcagcaacatcgatctcactttctcttgtgattccattataacctgaaatttgatgacagcattaggatttgacatttttgttttgttggccacttaattggaatctttctgttggtttgagaagantatagagaatntattaggag

SEQ ID NO: 21048 - DNA, 1657 bp, Oryza sativa
  Clone ID: TF_OsC55481_1
tattgtgtctgctctcagcataagcatgcattgcatggtttcgaggcccatgtcgtcgccggcgcagccgcccccgacgcggccgccggtggccgccccgcaagcgcaattgcgcaatggaaggcctagaatggatgcaaaggcgagatctcagttgcttccacgctattggcctagaataacagatcaagagctacagcacctatctggagactcaaattctgttattacccctttgtttgagaaaatgttaagtgctagtgatgctggacggattggtcgtttggtgttgccaaagaaatgtgctgaggcgtacttccctgcatggatgcaaaggcgagatctcagttgcttccacgctattggcctagaataacagatcaagagctacagcacctatctggagactcaaattctgttattacccctttgtttgagaaaatgttaagtgctagtgatgctggacggattggtcgtttggtgttgccaaagaaatgtgctgaggcgtacttccctgccatctctcaggcagaagggcttcccttaaaagttcaggatgctactggtaaggaatgggtgttccagttccgcttttggcccaataataacagcaggatgtatgtattggagggtgtcacaccttgcattcaatcgatgcagttacaagcaggcgatacagtaacctaaaattgacaaaggtgcattaccacaaaaggaagggccaggaacttcaagttcctccccactacctgtcaagagaaaggcaacttctgttggtccgaagatcaaacggttccacatggacagtgaggaatccatggaattgaagataacatgggaggaagctcaagaattacttcgtcctcctcctaaggccccttcaattgttgttgttgatggccatgagtttgaggaatatgaggagccaccaatacttgggaggaggacatattttgtgacagaccaatcaggtgagaatcatcaatgggctcaatgtgaggattgctctaagtggcgtaaactgccggtggacgcccttttgccctctaagtggacctgctctgacaataaatgggattctgaaaggtgacctgctattttagaaccattcagccttttgtatgctgtatttatgattagctacaatagaaaaagtgctgcaaaaaagaccaaagggaaggtagatactgacaatattgatgtttcagatgggctggacacactcgcaaatcttgcaattcttggtgaaggtgaatctctcccttcccagccaaccacaaggcatccccgccatcgccctggctgctcatgcatagtctgcatacaaccacccagcggaaagggaccaaagcacaaacagacgtgcacttgcaacgtctgtatgacagtgcgacgccgtttcaggacgcttatgatgcggcgcgagaagcgccagcagtcagagaaggactctggggtgcctcgcaaaagagagccaggtcaatccagcgagccagttccacaaacaacaagaggacctcctctcctgtcaagaaccagattgacctgaacagtcagcctgagcgggaagacgacctcgagatcgtgaagttctcctccgcttcctccgcctccggcgccgtcttcaccacctccggcaccgtcacctccacgggaa

SEQ ID NO: 21049 - DNA, 3645 bp, Oryza sativa
  Clone ID: TF_OsC1713_4735
ctaagactgcgacagcccgacaaatccaacagcaatgtcactgcaatttgagaggtccaaatacagcaggttcctgattgctgtgggcaacagataaatggggtcagccagggatgatggcattgtctgttctttcatcctggtaatcttgtcttgggcagagtagttcagatcatcaaaagcaggaacctgaagcatccggtgatcctccttcatattctcatcagagcataggaagcccatgatccccaaaacaccacggcataagaggatgcaatgcgacgtcgctgcggcgggaatacgaaaaactggatctgacaggcttcgtaattgtatcaaagcatcaagcgtaggaatagtatcacggatctttgcggatgttgactgacttttgtggtttctccccatcatggacaggaggctgtagtagtgcagatcttggaggcaatcttttagcgctttgtaggtgaaattttgaactgtaggaagcggagaattgggcggcgacggcgacccagatttaccgaaggatgaaaccatggttcttacccgaaccagcagctgaaagaggcgattgatatgaacctgagggtctgagtagcctagagtagggagaatgtgcatccggcgcttcgagtggatgaagaggcggtcacgggtggcctcgctggcgccacggtagaaggagaccatgtccccggcgtcgaggcggttcttcctgaagaagtggctccatcccaacgtcaagctgctgccgcggtagaggaaacgccatgaattgccggcatcgtcctcgaatctgaggacgacgccctccctctcgttcgcgggtacgtcccgcgggaagtagcactccgcgtgctgccacgggatcaccagccggcccagattcccgacgtcgctgggcgtcaccaccttgtcgaatatgtgctccttctcgacgaacccccggccccggaccgcgtagccagagaaatcgtcgccggcctgatactcaccatcagacacttcctcaccatccgagagttccctgtgccctaatgtgcccctgggagtacgtgagtcggtccgggggtacggcacgggcaacccgtcctgcctatacaggtgtgacctctggctgctcctgagtgtgcgcctctggagctcctccaagcggcgtgagacgaagaggccccagtaccgaagatcccggcgtgtgggcgagggatcgacgctccgtgagaggaagagctggcgaacgcgcccgaagaggtggcgaacgcccctgcggagctcgcggaagcgccggtcgtgcctgcgaacgcgctcgaaggcagacgaggtccggtgctgtaggtcgcactgctccgaagctaggggcgctcgaaggcaaacgaggtccgtgcgaaacaggtgccgtaggtcgaggtcctgctccgacggtaggcgcgcgaggccgtggttgtaccggaccagctggaggtacgacgtccacggcgctctgttcaacctcacttggactgcggtgatatcggcactgatatcccgtgcggcatcagcccccacgaagtagtctcggtcacggtgcgtgggatacgcgtccgtgacagcggcaacgtgcggctctggggcgtctggagtgaaggtcacacgcgcacgagtgcgaggaaggtaccagcgaaggtagtcacggtagttctcctccgtgtgtgggaagagctcgttgatcacctcctctgtagctaacacccagtcgtcaacgtactgctgtacacgtggagcccaaagtgcgcctgctagctgtccccgtcgagtcaacgagtggtcggcagggaggacggtcggctgcacgttacccggaaacacctgcctaagtccgaactgtctcatcacacgctgcgggcagtgaggctcaacgaaaatgtcgaacaccatcggcaggatggtgagccagtaagcctgatcgcgtgtgcacaaggacgaaagtcctagcggtgctctcgcagcgacggcctcttctgtgtacggctcccagatgacgtcgctcggctggagacggtcaaactcgaacacgaagtccgggtaacctcgtctcacctggacgtgagcgtaacgacgcccacgtcgacaccagtaagtccccatcgtgggaccgtcctctggccactgcgtgctgcgaccaaccccgtagggtgcgctgtccaccactggtcgacctatggcaaacctctcggctgcccaaagctgaagcaacatagggcagccagcgatgatcgctcccgcgtcagtcttcgtgcacgcctcacagagggcacggtacgtggctgctagcatggcagaaccccagctccactgcggcacgtcctgtggctgagcatccgcgatggaccgtgggtagtggaccagccggaagtccacagcgtgcccgtgggtgctagtgaacatcacccacccgaacaaccacaacaggtacgcctcaagggagcgtcggaccgagtaatcatcagcgtcagggtgcagaaggtccgtctgctcgaagcgcgcagtgatatcctccttccacccaacaacaccgtccacgggaccaactggtgctcccgccagcggtagcccgagcaggtacgacacgtcctgcagtgtcggagccatctccccacagggaaggtggaacgtgtgcgtctcaggtctccagcggtctaccagagcggcaaggagtgaccggtctgcatcccaccgcttcgctgggtcacggtcgtccgccgccgcctcaacaagcgcgtaccaaggaacgtgacgggggtcgacacgcaaccactcacgcgacgtgcgtggacggaaggtgccgagctgtgcaccctcgactgctgacgggaacgagcggtggttcctgtcaatcccacggttcaacagcgccggtgtgtcgtacgccataccatcacttgcctgtctagatggactagcatctgcgccgcttggaacttctgcattcttcgggcatttcttgtaagtatggccgcgcagatcacacttgcgagatccatcggtgtcgaacaatagagaccacttctccttaggctcattctcaatccactgagtgaaatttctgatggacgaccctgacctacttctcattgttggtgggtcatcatgtaatgcaccaagaggtatgggaggctcgtcaccttcaacttgtggtctgcgagattgctcatctgtttgcttcgttgtcaactcatccaacttgtcccacaactcattaaatttcttctcttggttctgtgcacagagcctcttaaagagctccataagatgcttgttcttgaattgcttgtagaaatttgcacccatgtgacgcatgcaccaccgactccgaatatcaggccacttagctggaagtcccttctcatcccaaccgttcgcctccttcatctcatccttatgagcataccttgcaccctcaattacctcgttctccttatactcccagggtacatgatcaccctctgatataacaagtccagagaagtcctcatttgcccaattagtggccattacatcaccttcctcatcggatgatgcgtcgtcgtccgcttcctcattatccgaatcttccctctccatttcatcaacaattatacagactctctccccctcatccgccat

SEQ ID NO: 21050 - DNA, 1302 bp, Oryza sativa; identical to SEQ ID NO: 11320
  Clone ID: TF_OsC80572_2

SEQ ID NO: 21051 - DNA, 942 bp, Oryza sativa; identical to SEQ ID NO: 11322
  Clone ID: TF_OsC255862_1

SEQ ID NO: 21052 - DNA, 1033 bp, Oryza sativa
  Clone ID: TF_OsC77518_1
cggttcaggatctaccggctctcctctccggctccatgcaccactacccaacttttgccgccaacacatctttgtttcgatcgaccgatcgatcagctctagctcagccgcagcaatggccatgcaccctctcgcccaggggcacccccaggcgtggccatggggtgtagccatgtacaccaacctgcactaccaccaccactacgagagggagcacctgttcgagaagccgctgacgccgagcgacgtcggcaagctcaacaggctggtgatccccaagcagcacgccgagaggtacttcccgctcggcggcggcgactccggtgagaagggcctcctcctctccttcgaggacgagtccggcaagccatggcggttccgctactcctactggaccagcagccagagctacgtgctcaccaagggctggagccgctacgtcaaggagaagcgcctcgacgccggcgacgtcgtccacttcgagcgcgtccgcggcctcggcgccgccgaccgcctcttcatcggctgcaggcgccgcggcgagagcgcgcccgcgccgccgcccgccgttcgcgtcacgccgcagccgcctgccctcaacggcggcgagcagcagccgtggagcccaatgtgttacagcacgtcgggctcgtcctacgaccctaccagccctgccaattcatatgcctaccatcgctccgtagaccaagatcacagcgacatactacacgcaggagagtcgcagagagaagcagacgccaagagcagcagcgcggcgtcggcgccgccgccgtcgaggcggctcaggctgttcggcgttaacctcgactgcggcccggagccggaggcggatcaggcgacggcaatgtacggctacatgcaccaccagagcccctacgccgcagtgtctacagtgccaaattactgtgacccacacacccttggctactgggactaccagaacctgacccacaaaactggatgcagccatgcaggggcccaactcaaaaaccggacctacaagacgctatga

SEQ ID NO: 21053 - DNA, 3333 bp, Oryza sativa
  Clone ID: TF_OsC29041_1
gggttcagcctcgtgcctcgatctttactgcctggaacgaccctcgagatgagtgaggacggtgatgcggaaagcttttctttttctccttctattgatcggagtgcagatggcggggatggctgcggcggcggcggcgttggtggcggcgaagaggtgcatgaacgccgcgtgcggggccccggccccgtccccggcgggaggggagtggaggaagggctggccgctgcgatccggtggcttcgccgtgctctgcgacaagtgcgggttggcatatgagcagcttgtgttttgtgatatatttcaccaaaaagaatctggctggagggactgctcattttgtgggaagcgtctccattgtggatgtattgcttcgaagaactcctttgatctacttgatagcggtggagttcaatgtgtcacttgcattaaaaattcagcagttcaatctgttccaagtccagtcgtccccaagcttttttcatcccaaaataaccagagactttttggcaaaagcgatgatttattgtctggtagaccactggagacatcctcccttatggtcgatgccagaaacgatgatcttactattatcgctaagaacaaccttccattcatggtgaaaaacgtagaagctgggcaaagcagtaatattttgaggcaaaaagaactagagaatggtgcgaggcagattaaatgggaactacctacccttagtatcggggacatgggaaggatacctttcctaactagatctcaaagtgcattggagtctcgaagagatgaaaataaagacccaactacagaaagcacgacaagtgaatcactttctgaggcatgcctcaacatgagcttgggaattgctagtaatggaaacaagttggaggctacttcaactgtggaaagacctatgctatcaccaacaacaggatttcctgaaggaagagagcttaccactgcattatctccatttcagcatgcacaaagggctcgtcattttctgaccagaccgccaagggttggtgaaggtgctgtttttgatccaacgaaagatatgcttccgcatcttcgtgttgcaaggccacctgcagaaggtaggggccgcaatcaattacttcctcgatattggcctagaataacagaccaagagctacagcaaatttctggagagtatccttattatatttatcaacttcttggtgatattatgcataattcaaattccaccattgtccccctgtttgagaaggttctaagcgccagtgatgcaggccgcatagggcgccttgttctaccaaaagcctgtgcggaggcatatttccctccaatttctcagccagaaggtcgtcctttgacaattcaagacgcaaaaggcaaagaatggcattttcagttcagattctggccaaataacaacagcagaatgtatgtcttggagggggttacaccatgcatacaatcattacaattacaggctggtgatacagtgacttttagtcggatagaacctggagggaaacttgttatgggcttccggaaggccacaaacactgtcagtttgccagactcacagatttcagctattgccaacggttccattcttggggatacattattttctagtacaaatgagaatttagcaatagtaagtggttattcaggatttcttcagtcaataaagggggctgcagatctccatacaagctctatatacgatcatcatgtgaactcagctgacggggatgttagttggcttaagacagataaattcggcagcaggccagatgaggggtctttgcagtttttaaagagaggccgcaatattggttccaaaagcaggaggctttcaatggatgctgaagaagcctgggaactaaagctttactgggatgaggttcaggagctgttgcgtcctgctccaactgcaaaacctactgtcgtgatgattgaggactacgaaattgaagagtatgatgaaccccctgtgtttgcaaagagatcaatttttaccatccgttctactggggaacaagatcaatggattcaatgtgatgattgctcaaaatggcgccggttaccacttaatgttattgttgcatccaagtggacatgtgctgacaacacaatcgactcaaaaagctgttcctgctctgcacctgaagaattaacccccaaagaattgcacattgttcttcagcaatacgaagatatgaggaggcgaaggaacagctttggttttaagcagaacatccccgaaatggatgcggtcagccttgatgcctttgccactgccgcagtctatggtgatgtcgggaaccaaggttccccttctgttgcgacaaccacaaagcacccccggcatcgccctggctgcacctgcatagtgtgtatccagccacctagcgggaagggcccgaagcacaacccagcttgcacctgcaatgtctgcatgaccgttaggcgtcgcttcaagacactgatgatgaggaagaagcaacggcagtcggagcgagaggaggccgaggcgagcaagaagatcgcttggatgaacagagatgagcctgagggaagcagcctgtcaagatccccacagacggttgacactacccgagacggagatgtgaccatgttcgacaaggttgacatcaacaagggccacatagacctgaacttccaccctactgccgtccgagacgaggagcggcatggcgggcagcctcgggtgagcatggtcagcctcctggaggtggccaaccggccactggagaactacatgaagcagaacggcctgacgagcttggctggggagcaagggagctccagcacatgtacaggtgcagccacggttccgcagccggctctggtggagagcgaagagcggacgtccaacaacgacggcgggcgtgtggcgacggcagagcagccggagagcatggccgtcgacgaggctggagataaccagccggacaaggctgccggtgactctgctgctgctttagcttgagcttgaggctgaccgtgttgagtgtgtggatggcaggatgggtattgaatttgttgtgtgtgcatcttatcggcttccccctttttttacaggaacagcagctggtgagttttgatgttgagaatctcatagggtttcattgtgttcttgtagtccttcacttgctttcttgtgtaaacacacgtgtagaaggctgtatgatactgactgtaccttgtaatttttaaccacgaggctcaccttatttgctcatacctcggtgggcagctagttgttgtatgtatccaaagccaagacatccagtaataactcacctgatttgccgctct

SEQ ID NO: 21054 - DNA, 532 bp, Oryza sativa
  Clone ID: TF_uC-osflcyp024e03b1
tttggcctagaataacagaccaagagctacagcaaatttctggagattcaaattccaccattgtccccctgtttgagaaggttctaagcgccagtgatgcaggccgcatagggcgccttgttctaccaaaagcctgtgcggaggcatatttccctccaatttctcagccagaaggtcgtcctttgacaattcaagacgcaaaaggcaaagaatggcattttcagttcagattctggccaaataacaacagcagaatgtatgtcttggagggggttacaccatgcatacaatcattacaattacaggctggtgatacagtgacttttagtcggatagaacctggagggaaacttgttatgggcttccggaaggccacaaacactgtcagtttgccagactcacagatttcagctattgccaacggttccattcttggggatacattattttctagtacaaatgagaatttagcaatagtaagtggttatttagggattcttcagtcaataaagggggctgcagatcttcatac

SEQ ID NO: 21055 - DNA, 2285 bp, Oryza sativa
  Clone ID: TF_OsC51357_1
atggcgaaggaggaggacggcggcggcggcccggagttcgtgaggtggagggaggacttcgtgtcgcaggagaggggcagccgcgtcgtgcattactacctcgaggacgccgcgggcgcgtcgcacctcgccgtcgtcggcacggagcggagcctgcgccacatgctctatgtggtctcggaggatttccgggaggcgcagggtgccgatggcggcgggccgggggtgtttgcgcgcaagtggcggtcacgccgtgaggtggtggattggctcgcctccttccttccggcgaagtccctcgcctcgaaactttcaaaatttggatcacatatgggtaatgacattggattggatggatacagtgaacctgatagctttatgggtcacaatctggggaaagcctgtagctcggacattatgtggtctggttcgtcctggacttgtggcaagcagctttaccactataaagctttttgtcgtaatggtaccacaatatctacccactcttttgtgcttgtcatgtctgaggaggaaagtcgctatcttgcatacttggaagatatgtacgaagataagaaggggcagaagaaggttaaagtgcgatggtttcatcaaaaccaggaatttgcttgcgctatacctcctccccctcctcatccttgcgaagttttcatcactccttattctcaagtaatcagtgtggagtgtgtcgatgatattgcaactgtgttaactcctgagcactatgaaaaatgcgtcaatacattgccaaattcttctatggtgggaatccgtttctgctttcgccaatacagtaaaaataagtttaaacgttttgacctgagatcattgcgtggatattttagtcaagctgttgttttgtccttaaaacttcccccagagcaagaaaaggatgatggttctgatatcataaaaacttttgagcaatggacacctgggaagacaaagtttcctaagcagtttgagaggctttactcaaaatgtttgggaactaaaatctgccgaggcccacaagaagactccatagcatcttatcagaaaccaagcagtaagcaatctcccagaaaacatctctcagtcaagttcatagggccccagaatcagcgtatgccaacctacaatgttggtgacagaatagaggtcttgtctcaggacagtgggattgtaggctgctggttcaggtgtacagttctcaagtcatgtactaatcataacaaattgaaggttcagtatgatgatctccagaatgctgatgatagtgggagattggaggagtgggtacctgtatcaacattggctcgtcctgataaactgggattgagatgcccagagcgacgcagagttaggccacgccctcaacaaaatagtttggctgacggaactaatcttttacctggagctgctgttgatgtatggcaatttagtggctggtgggaaggagttctagtcagtgcagacaacatttcagctgatagcctacaaatatattttccaggcgagaacttctttagtgtatgccagctaaagaatttaagaatttcgaaagattgggtcaagagccactgggttgatatagaaatgaaaccagatgtgttatcgaaaataccttcggttggtgttcaaacaaggcaacctgataatctgacatctgttgagaggccggactccagaaattctgcaatgtctgaccaagagcttgcagccatacaaacaaactctagtgaagataaacaaacaggagctgatcagccagcagaagttagtttgactgatatggcctctgcttttgcagaggaccagaaacaaacagttctaggaaagcgacctagggatgatgatgctgaacaacattgcaatggggaagtaggcatagatgttggcaaattgtgaagtttgggaagcgcaacctcattagacgtatgtacatagctatagatatggtaattggaccccagcagaggggttttttactaggttgctgatatcagtgagcatcgacatcttttttcatacacgtgttcccttgttttactgttagcttcccactttcaggctttctgtcaccagatacagaggttgcaaactaaatattacccttaccagtcatattgtatagcagtctgattgatcattgcttctcttatgttttcctccggagtctggactatagtttcagtttattctcaattgttaatatagtttaagttcatatgaaaaaaaaaaaaaaactaccctgctggtgctaaaaaaaaaaaaaaaaaaaa

SEQ ID NO: 21056 - DNA, 2897 bp, Oryza sativa
  Clone ID: TF_OsC28675_3
atggacgagctcgcggcggcgtcggcggcggcgaggaggaggtgggtgcagtgggaggaggtcgtggtgtcgaacgaccgggggaggcgcctcgtgcactactacctccggggagcggccgcgggcggcggaggagggggagaggtgagggagcttgcggtggtggggcgggagcggagcccgcggcacatgtcgtacgtggtgcaggggcggttcctgcggtcgctggcggcggcgggggtgggggtgggggtgggggtgggggcggcggtgggggcggtggtggcagtgccgtcgccgtcacggtcgccgctgccggcttccgcggagggcggggcgccgaggaaatggaggtcgaggcgggaggtcgtggactggctgtcctccctcgtttccggatgtaattacggatcttcttcaatgtctaataggttcaatgaaaatccatatgatgacattgagttcactgatgttgctgcttcaaaggatgtttcacatacatcatcagtaaggaataactcaaaagagttcacatggttaggtcctgcatggctttgcgaaaagcgatggaagcactacagatctttctgccgtaaggggattactatttcggtgcataattttgtctacatcctgagtgaggaaaagaagaggctcatcgcccaagtggaggatctgtatgaagatactaattcaaccaacgttgtcatggtacgatggttcgacaaagttgatgaggttggtgtcgaattgccacctgatgttggtgacagagagattttcttttcccctggtctgcaagatctcagtgttgaatgcattgatggattggctgcagtcctgagtgctcaacacttcgagaagttccagagtagtccaaaacatagctattggcagccttatatttgtcgccgacagattgatgaagatggcgtcaaaccttttgatgtaacccaattgcaaggttattggagtcaagaagtgcttaggacaatgttcaatgcagcttcttctcttaaggtacgtttcaaggtcactaaaggtgcttctagttcagatggggcacaaaagaggaagcgtgatgcattcagtgaaaccgatccacagcagtgtgttccttccgctgcattcggttctgatagtctcaagaatgatttggaacataaaactcaaaagcagctatatcctggtagccgtgctgaagtcctatcacaggacagcggtataaggggctgctggtttagatgctttgtattaaagaggcgcggagacaaaatcaaggtgcgatatgaagatcttcaggatgctgatgagacaggaaatctggaggagtgggttttgctaacaaggattgctaaacctgatcagttgggtatacgcatccctgaaagaccaatggtgcggccatatcatgtacatagcaaggatccatgctctttcgatgctggttccattgttgatgcatggtggaatagtgggtggtgggaggggattgtattgcagcagggaaatgacagacgccttcaagtttattttcctggagaaaagcagattgctgatttttgtgaagatgatttgaggcattcacgtgagtgggctggtggcaaatggaattccttgggggaaagaaaagatatcacacacctgttgccccccacttcagttcatgaagagggaggtttgcttagcaaacctgtttcacaagaaggcaatccctcttcaaaattagaatctgacaagaggtgtgatgacaaatcattgggcaccaagatttcacatgatcagaagcatcagaagcgtgttctggctgatctcacaaatgctctgaaattcgataacctgaaatggaggccaagaaagcggagcagaagatctggttccaaaaggcagtcagacactagcagtggcagtggcagcagcagccagggcgacatggaggagtccagcccctgcggaagttttgcagtgcttaattcagcgcccgatgaagaagtatgcaagagcagtggagaacctcttttcatgagggtttccaacctgacaactttgctctatggttttgccagattcttctaccgttctctcttctccggcgagccggaagccgacgaccggtcgtcgcgcgccgccgccaagtggacagacggtgttcatgagtggcaaggtgattatggtgaattggaagtgcagagggggaatggtgtgttctactgcatgaccgtcaggatgagcatcgactgcaatgggtgctaccagaggatcaggagggcactcctccagatgcaagaagatctggatagccacctgatcgaccggaagcagcagcgggtgagcgtctgcggcgccttcgtgccgcaggacgtcgccatcaagctccgcaagaagaccaaccgccgcgtcgagatactggagatcaaggagatcgacgccggcgacggccaccggctgtgagtgatgtccagatgaagtcactccacgactgacatgttttagccttttctttccggatttcaacagccttggcgagatgtgagtttgatgcatccccaggttatttagtcacaactcacaactggtatcctgatcatcttgagagctctgaatgcttattcgctcggatgtccaggatgcaagcatggaggagcacactgttgtatttatgactgatctagatgagttttaccattttgtctcactttagggtcttgtagggtgttttaaccgtcttgttgtttagttggtgttacaaagatagctggctcattccacctcggcagtttccagagtcccttttttgtctttgtttcagcagtccaatatccaatttaatttgttcatcagctgttatagatgttcttatagtatactctctgaaatgataatatttacatcgtcat

SEQ ID NO: 21057 - DNA, 1809 bp, Oryza sativa
  Clone ID: TF_OsC98543_1
gcacgaggcctcctcctgctacctgggagccacgcgcccccggcctccacctcgccgccctcctcgccggcggccgccacgcgcttatggtgagtgcacagtgagctacaagttaccattatcagaatggatggtatgaaggatggccgggatgaggaagttgccactgatgcggttggtgctggtggagttgatgtgggcggtgagacatcaaaattgattgatcaagactgcatggcaatactcgacgtgctggcgaggaggcttatgagtggtgagtctgaaccttacattggaaagataataaagatatggcagcaaaatcaggctaagaaagtaaagattctttggttttttctcccggatgagattcgaaaacatttaagtggccctgtaatggaaaaggagatatttcttgcttgtggtgaaggcgttggccttgctgatatcaacccactggaagctattggtgggaaatgcactgtgctttgcatttcaaaggatgagaggaatcgtcaaccttcccccagggaactagcaatggctgattatatcttctacaggttttttgatgttaacagttgcacactttctgaacaattacctgagaaaattgcaggggtggaaggaaatcttttgcttaattcaaaagttgagcaagtgacatcctgttcagaccaggaagtgcatggtgttgatcagaagatgcttaatgtcccagttccccttccccagtcaacggttatggaggatgaaagtccagttgctgcagtttcccttcccccgtcagtattcaaggaggaaaatgtggcttcagccattccctttccccagccagtggtcaaggaggaaagtgcggctgctgccattccccctccccatgtagcactgaaagaggagagtgtgtccaaatctacagagaacattaccaaacctgcacagaaagttctccctggggagaggccaccaaagagggtcaaattttctgaaaatgttacagtgcaaaatgtgccattagatgttcctgaaagaccaagtcgcactggacctttggaactagcaggtagacaagctgacagaagcaaatggttcaagattccatgggataccagactacgaaatgctgatgagcaggggacacttgtgtacattcaaaatcttgacatacagtttgcagctgctgacatagaggagcttatacgtgatgctttacaactaaattgtatcgctaagcctattaaccacccaacttatgatgatccaaacaatggaaaagcatatgctatattcaaaacaaaaagtgccgcagactctgctatttcaaaaattaattcaggcttggtggtcggtggaagacccctttattgcagcaaaggattgcttaaggttccaaaaccttcagaaactcttctcgggcacttaacaatcaacaatattagaatgggtataagacaacgagaagaacaggtgctgatgttgtcctatgaagtttgctctatttcttttctctgtcttaatatttttgcacaaccattattctttctccagaagaaggcagtttcaacctcgcattgttctcaacccaatacaatggagtatgatttggccttggattggatgcttgtccgagcaaagcaagaaacgaaatttaggacacttcacaagctcctgaatgcagccaccggcctcggtaggttaaaaattgacaccgcaaattctggtgatcgcctggtaggtattgttggtatagctaaagatgatcatgtcttcgttttggatgctcttggtgaaccatatgctggttcttga

SEQ ID NO: 21058 - DNA, 2831 bp, Oryza sativa
  Clone ID: TF_OsC866_1
ggcacgagatggaaccctaaactccaccgctcccatctcgtctcgatcccctccatttcaaatccacactccgcctcccctctccggccgccgccggcgagatggatctctccgccaccccgtccagatccaaatccggcctcagatcctccccgaggaagcccgtcgccgcccccgccgtggcccagatggacctctccaccccgtccaagccgacccccaggcggaagcccaaggcgccgcccggtggcggctccgatgtcccccgtgaccccgtcctccgtccgccgctcctcccgcctcctcgagacgccgaccaaggtaacttccgagacccccgtgaagcccaccccaaccccgaagcggaacgcgccgcgccgtcgccgtcgccgaagacgccgacccagtccgagcccaagcggcagcggcagaggcagaggcagcagccgaagaagccgaagaagagggcgtactaccggaaggtggtgtacgacggcggggagttcgccgccggggacgacgtgtacgtgaagcggcgggatggcgcggagtccgacgcggaagacccggaggcggaggagtgccgcgtgtgcttccgcgccggcgccgcggtgatggtggagtgcgacgtgtgcctcggcgggttccacctgcggtgcgtgcgcccgccgctgcggcgcgtgccggagggggactgggcgtgcccctactgcgaggccgagcgcgcggggaaggccatcgagaggcccaagccgccggaggggaagcgcatcgtgaggaccgccaaagagaagcttctctccagtgatttgtgggctgcacgaatcgagagtttatggagggagccagatggaatattctgggcaaaggtaagatggtatattatccctgaagagactgcagcaggaaggcagccacataatttgcgtagggagctgtaccgcaccaatgatcttgcagacattgagatggaaacaattcttagacattgttatgtcatgagccccaaagaatttaaggatgctagtgatcaaggagatgacgtattctactgtgaatatgaatatgacatacactggcataattttaagcgtctggcagacatcgatgatgaacctgagacaaaggaagatcctggcgacgagccatacaatgctggtaatgattatgtcagtgactcggatgaagattctgaatatgatgaggaggaagaacctactaaatgtagttctgctagaacacatcaatcacatgcgttggctgcgaatctgcggaaagggaggacatatggcctacaaaaaattgggatccgtaaaattcctgaacatgtccggtgtcatcaaaagaccaatctggagaaggcaaaagcaaccctgttattggcaaatcttcctaagtcgttaccttgtagggataaagaaatggaggagatatctgcatttgtgaaggatgcaatttgcaatgatcaatgtataggacgctgcctttatattcatggtgtaccaggcactggcaagactatgagtgtacttgcagttatgaggaggctaagatccgagcttgattctgggaatctgaggccttattctttcatagagattaatggtcttaaattagcttctccagagaatatctacaaggttatatatgaacagttgagtgggcatagggtagggtggaaaaaagcccttcattatttaaccgagcacttttcaggtggcactaaaattggcaaacaagcaaaccagccaattattttgctcatcgatgagcttgatcttcttttgacgagaaatcagtcggtgctgtataacattcttgactggcccaccaggccaaattcaaacctagttgtcataggtatagcgaacacaatggatcttcctgaaaagttattgcttcgtatttcaagtcggatgggtatccaacgactgtgttttggcccatataattatcggcaactgcaggagatcattacaagccgtttaaagggcattgatgcctttgaagaccaagctattgaatttgcttctagaaaggtagctgctatgtctggtgatgcaaggcgagccttagaaatatgtagacgtgcagcagagtttgcagattaccgcgttaaacaatctgggcacacttctgtgaatagaggaaaaaatgttgtttgcatgggtgacatagaagctgctattcaggaagtctttcaggcaccacatattcaagtaatgaagaactgcccaaaatttggaaagattatattggtcgctatggttcatgaattatacagaagtgggctaggtgaagtgatgttcgataagctggcagcaactgtcctctcttggtgccatgtcaacagagaattattgcctggctatgataatcttctgaaaatctgttgcaagcttggtgaaggtaagataattttctgcgaggaaggcactaagcacaagttgcagaagcttcagcttaactatccaagtgacgatgtaacttttgccctgaaggaatccccagatattccatggttgtccaagtacctgtgaagtttacacttgcagcggttgtactttcccagcatttcattcatttactcctggagttggagagcaacgatcgcaactacttgcccttgatcagcaaatctcggaatttatgtgggtccaattgttcatcttccaaaagatatcgactcgaaggatgccgctgcaacaaaatgtaaatgcagtgtcgcaccaggactgtaacatatgtatgattcgaaggagattgtaggtcgccattttattttcgccaatctgttgttacccaagaaaaaaaaaaaaaaaaaaaaaaaa

SEQ ID NO: 21059 - DNA, 1122 bp, Oryza sativa
  unsure (1)..(1122): unsure at all n locations
  Clone ID: TF_OsC3802_2
gcagcaacagcatcatcatgcggcattcacttatcaataaacaggtcacagaactcagggacacccaaattatgaaactacagttaagctatcatcaacatcatccacgctgggaacgttttcctgtaccaggcaaaaagctaaaacacgctgacactcatccagtccacactggctacaactgaacgagccaacagcatcaatgaagttcgttcttttgcctagactgatggaaacgttcccaaattcgggcaaatgataagttaacgcgatcttggacctagcctagctcttcatctgcactgtacaccctccacgttttgactttgcaccagcaatgaagagctgacgccataaacagtgcatctcctcaccaaaaatgaaataatagtaggctgataccagttgacaagctaaaaccttgaatccacttaggctcatactttgatgatgctggatatgcatgtgaaggtctctttgcaccgttttccttgacacaatctgagcacacaaagtgatctagttttttggcctgctcaatcgtcattcccatacatgaaggatgaaaccagtccttgcagccatcgcactgcaccatgagatcatccgggttgtatggcatctcacacttgcagtatacggcgacgcggtcgggggtgaaggcgccggtggcggccttgtactcgaagcggcagaagaagtcctcggggccgacgttgtcgagcttggtgtagttcttgaaggagtggacgacgcacttgccctcgatggtgtgggcgctctgggtgtcgaagtggtcggagaggaacagctccttggcgccatggaactgcctcctcccgcccttggactcctccggccggtagtaccaccgcacccgcacccgcacgctccccctcccgtccgtctccagcctctccaccctccccacgtacggctggttctccgagtccgccgcccgcatcagcacgcagtcccccactcgtacgatcttgttggtgccggagatggtgtaggagtcgacgtcccgcttgccctgcttggtcttggccatggaggggattgggaggaaaccctagaggaggaggaggtggggggagaggtgtggnccacagctccccc

SEQ ID NO: 21060 - DNA, 829 bp, Oryza sativa
  unsure (1)..(829): unsure at all n locations
  Clone ID: TF_OsC97337_1
gcacgaggggtcccccgcgccgcggctccccccacctccggccccttgcccccaccccccctcgccgcccccgtcgagtcccatggcgaagtcgcggccgcccaagcggatcctcgagtcctacaccatcaagggctccgacaaagtcatcaagcattatgggagttcagtctctggggactgtgtgctaatgagggcatctgatacatcaaagccaccctatgtggcaagagttgaggctattgaggctgcagggtcacgaggcacaaatgtgagagtacgggtgcggtggtactatcggccagaggagtccatgggtggaaggcgtccatttcatggtgccaaagaggtgttcctctcggatcactatgacgtacagagtgctgacaccatagagggaaagtgcaacgttcacagcttccgtagctacacaaagcttgattctgtcaatgctgaggacttcttctgtcgctttgagtacaaatcagccacaggaagcttcgtgcccgaccgcattgctgtgttctgcaagtgtgagatgccatacaatcctgatgaccttatgatccaatgtgaggaatgctctgattggtttcacccttcttgcattggaatgactattaaagatgcaaaaaaactagagcattttttctgccagagctgtactgcggaaaatggaaagatggctgagaattctcatgaagctacagcgcaatccgaagaaaaggtgacttttgtcctgttcgtaatgtcgcaaggctccagttgggaaacagtaccaatttattcatatggcagtanaaagtctggtgtgattttacaactataa

SEQ ID NO: 21061 - DNA, 4740 bp, Oryza sativa
  Clone ID: TF_OsC65931_1
atggaagcttcagtttctcaaatccgccgctctcctcctcgaatcgaaaaaagaaaaaagaaaaaccacaattctctttcgggcaaagcccccccgactcgtggcaactgcgactccctccctcccgtgtggaacgcgaagtcagcaagtgaatgccactggacacgccgattgacttccaactacctttcgctggtggtggtggtggttggggaggaattgcccccgtgctttgctcctcctcccatggagaccccgccccccgaccccgtctcgcctccgccgcccgccgccgacgagggctcgccgggaggcgacgacggggcggaggacgcgggggggttcagcgccgggctggattcgctgtggacggccctgttcggctccccggaggagctggagcccatgtggtccccgccgagggggttcggcgtgggggccgagttcgccgcggcggaggtggagcccgagatcatggacgtcgcggggggcccatgggacggcgcgccctggaggtcctccggggtcgtcgccggcgagggcgcggccaccgcgctcgttccccccacggccgccgcggggttcgcggagttcgagcccgcggcgccgatcgattcgtatccggcgggggcggcggcggcttcgttgggcgacgttcctgaggtgagtgcgctcgattccggcgttgattgttcgcctgacccgccgccatcgtcgtctcctccggtggattttgatgcgcgggggtttgaccccgtcgccgactccgccccggcgatggagtctccactaccgccgtctgtcgcttcctcggaagccaatttagacgggagaatgctcgattgtacgctcaactccgtgccatcgccacctcttgcttccccatatgaggtcggtttgggggctgaggatcctatcaaggattcttccccttcggttgcttggggaacaaccatggatgcgaaggatcccgaggtggatgctacttgtgcaaatggtacagctctgcggagatcacggaggatcatgaaaatcaagtcagcggcgagctccatgcctttgaatcagaatggagactcatctagagcttccaagcgacgagttgcggattcaaggaagagtagaagcagtgaagggagcaaactccctgcgttcacagggccaatttcagtaaacacagttgatttgattaacggggtgaaggttcaaggattgcaagaaattgttgccgtggaaaacgtaagttcctcttacgacaataatcagaaagcaggtggtctctacaatcaggttgtggtggctttaccagcagcgagtaatagtttgttgaaagacaaaggagcttctgttcttcctcgaaggaagactaggttagcctcaaaggtattggtgaattcagacagggtgtcagctatatcaccagtggtaaatggtggacctcctgtgcagaaatcagatgtttgtatacctactaaaaagcataagcttgctgttgaagagtgcttgacaagtctggatggagtggatggtggtggtattgtgttgtgcaactcaaagttgaaaagtgcaaaatcacgagtggtcagcaagacgcctcaagggagaggaagaagatcccctcaacctccaaagacacagagggccaggacgttgtcggttaaatacttggaaaaattaaagagggcagaaaacaataataataatggctcaatgtccaaatcaccaagagttccaatgataccagaaaataatggctcaatgtccaaatcaccaagagttccaataataccagaactgagcactaagcacgaacttgttttggacaagcacatggttgattcagtgatgttggaaacggacgatggttcctgtttctttgtgggggatgcagttcctgatgatgaggctaggaagcagtggcctcaccgttacgaaataaatgatcaaatcatgaaaaaggataagaggaccagcagccaaacatttgccaaactagttaccgtatctttttgtgtagtctttatgtatgtttatctacagatgcttgatttcaggggtccagagggaaaaccaaattatattggcaggttgctagagttcttcgaaacaaaaactggtgaatgttacttcagagtgcaatggtttttcacagctgaagacacggtcataggagagcaagcacaatcacatgacccgaggaggctcttttactcagacctgacagatgacaatttactggactgcattgtctcgaaagtgacaatcgtgcaagttcctcctagtgtagatggaaaatcaaagtcagttccttcgtccgactattactatgacatgaaatactctatcgactatagtacattctctaccatagaaatggaagacacagatgatttaatgcagtcatgttacactagtagaatcaatgacaaaatgaagaagatagatgtcaataagaagcacaagtctcctgtgctagagaagatggagctctctttgctagacctgtattgtggttgtggaggaatgtcaactggactatgccttggtgctcgtggtggtggtgtgaatctttcagcgagatgggccattgatgatgatgaaattgcatgtgaaagcttcaggaacaatcatccagaaacacgggttcggaatgaaaccacggatgatttccttgaactgttaaaagaatgggagaaattatgcaaaacatatgtgaaacatagtaggactaaggcatgtgttgacagtacaacagaatccaataatgaaactccagattgttctaccgtcccacctgaggagtttgaagtatggaagctagttgacatttgctttggtgatccaaataaagtcagcaaacacggcttgtattttaaggtccgttggaagggttatggccctcatcatgacacatgggagccagttgaaggattaaggaactgcaaagaggcaattagggattttgttattgaaggccacaggcaaagaatactaccacgccctcgaagaaacatagctgtgttcttgcttcgaccatcgaagttccctctgggtgatgtggacgttgtatgtgggggtccaccatgccaaggaattagtggctacaaccgcaatagagaattcgaggcaccatttaaatgtgagaaaaacaagcagatcatagtttttatggatgttgtgcaatttttgaagcccaaatatgtgtacatggaaaacgtccttgatatattgaaatttgctgatgcaacacttgcaagatatgctttaagtcggctagttgcaatgcattatcaagcaaggctagggatcatggctgctggatgttatggccttccacaatttcggatgcgtgtatttttattaggctgtcattctaaggagaaattacccccttttccactgcctacgcatgaggcgattgtgaagaatggctgcccgttggcttttgagcgtaatttggttggttggcccaatgacacaccaatgcaactagcaagaccaattgtccttgaagacattctttctgatctcccagaagtggcaaatggggaaagccgtgatgaaatgctgtatgtaaagggtcctcaaactgaattccaaagatacattcggtcatttaatgttgaagtgcatggtcccagagctcatgttacaaaagattccaaatcctcaaaattgtatgatcatcgaccattggtactggataatgataactaccaaaggatattgcaaattcccaagagaaagggagctaattttagagacctttcaggagtcatagttggtcctgacaatgtggctagattagatccaacgaaagaaagagtacttttgccatctggtcgtcctctggtgcttgattgcatactagcttatgagaatggtaaatctttaagaccttttggtcgagtatggtgggatgaggtagtgggaaccgtgctgacagttccaaatgcccgtatgcaggccttgatacatcctgcacaagacagactgcttactattcgtgaaagtgctcggttgcaaggctttcctgacaattacaggtttcgtggaacagtcaaagacaggtatcgccagattggaaatgcggtggccgtacctgttggacgagcacttggatacgccctggcgatggcctacctgaagaagtctggagacgatccccttatgttgctgccgcccaactttgcattctcccatgacttaagagggtttgcctagtcaaacacccttgtcagaaggcacaaatttgagttccttccctcgttggctttgattgaaattcaccatctacattaatgctctgctaccaaagctgctcctcttcttgttggccaccctttctcgtgaatagtgaatagcattaggagttaggacatgccatttatctgttgggatcagatcaaggaatctgggttccccaatctgatgatcagctgtttgttgtagcaaaatcattccttgatttacagtagttgtgacatccaccacactagttaattagaaggattccatagggcaagtgtagtgactcatatcgggagcctatgttgtagtgtaaaagaatgtatgtacaagttagatgattaggaaaataaaatgtatggacatcatcttacctgttgttgtgttagccagcgatgaacacaatgtaacgacttcaataaatctacattgagctgcagatttccatggaacaaaattaatctattgcgtgataaaaaaaaaaaaaaaaaa

SEQ ID NO: 21062 - DNA, 5490 bp, Oryza sativa
  Clone ID: TF_OsC13482_1
tttttttttttttttgactgaaaaatagcaacagatcattgcttatcggtccactaaatttcttaaccattgcaaggcaccgatggatacaccagaatgcgctttacaggcattcaggaactgcagatcgagtgtcatcccccaggatagtccactagagttacatgggcaaacagatgtaacgtttccacataaaatacatgttacatctaaatcatatgtaaggctgcagatgtgctccaaaaagagaaaattggtctgtcataagaaactaaaaacaaacaaactgaacctaattacagcggcttcagatgtttcttgaggcccaggacctataccgtttccatctccagtcataccctcccaagcaaattagaagcatgcctgagtccctgacagctaagaaaatctagcaaagcaactgccaatgccaaggaaaattgtttccaggaaagtatgaaatatgaacatttacagcaattacatcaaagcatcattcctctcacattcacatcatcacaaggaaagtatccatgtatgaattgtatattccagcaagggtgcagtacacgaacccaagtaccacatgcagctgcctaagctcattggatgccgaagtcgctgagaaatgataccagcaaaagctcattgccatgacaattgtttgtatgaagatcgttcggcatcccaactgccctctggttccttcctctttattccaacacctggaggcatttgatacattctcgtatgctcgtccacaaaggcatgtggtggcgcaataaaattttgtctaactggtaaagttactctatcgtccttcacttctacatccacacttccagggccagaattaagatcaagaccctgtcttccccatttccgattattgtcatgtccaacagtgctgcttccttcagggaggtttattgcatattgtcgagtatgctgagcaggtaatgcacctgctggcccaacaagcgtcggagcaattgtagggaaataaggaattcctccaggtgcagaattcgcatatgatgtagacccaattgaaaaccccggtgcttgaaggtggacactaggagtaaaagggaatcctgcatactgatacgcaggaggatgaaacatcatagtcggtgaagtagaaataactggagtccggctgggatcacttccatgttggacaccatctgccaacgatgtgatgatcctctgggttccacttccagctgctgtctcgactgggtgaggctgttctcctctagaaggtaaaaacgactttatagctacaggagcacaagcattggcagaagcaaaccatggtgatatgttactcatttcagcactgttcattctcatgctagcgacttgaggtaggaatggtatgctactggtatttttagatgacagactccttggtgcatgttccgtaccagcttcatcaagagttggtccattattaagatcaaaatcccttgagctatttgcatcggaactagagaaaactccaggtaatggtcttgataataatgggacttcaaccctgtggttagtgttagacacaatttgcccattctctgcaacttcatcggccctattcaagtcaagcttaaagccaacactacgtacaggaccattgcttcttctagtgttgccagattcagaaccagttgtctgaacagaactctgagagacgtcttcctcaagaaattgctcatctgcaacatttaagtcaatgtcaagtgctgggcggtttttccctgcagcatcagaaaccagaatgccagatgcactgagagtcatctcaaaaattttccttggctccgctgggcgaaatgcgcttgtggctgctgaacctttccagccagtctcagacttcaaccttattaggttgtccgggggaacaaaggggcctttatcaggagcagctattgggtcctcgttcccacttgcatcaggtgatacaaacggagaaggacgaggtaaatgaatcgctgaagaacacacagcaggagaggtagctggctcagacagatgcccctcgtctccaggtattccttcattcaaatcaaagtcaagcttggcagtggcatttgacctggtcttggcagagaatgaagaaccatcatcagatgagacaaggtcgtctttcccacctgcatcatcgctagatttctttgagctgcgttgtgcactatgttcagtttcctgtgagacagtgcctccaggtcttgtgtgactgcttgattcactggaattgtcttttgattctttagaactaatcccattttctggaccatgtttgactccagttgctacagcaagttttgtaacatcagctggatgttccttcttttcatcctctttcagcaccgtgttactaccaaccagcaaaccatcagccttattcacctccacagtcgatgatgaaaatgaaggcttcaatttcaatttatttgcagtactgtcaccagatttatcaatgtgttctgaataatctggtagacccagaagatgcttttgatctgttggctttaacaaaccatgagcttgtttgtcaccaccacataatggttcctcggcagggagcatttttctatttgaaacagccagcttacattgatcacctaatgtggagcccacatcagaactggttgtacaaccatcttcaactttacctcgaacagtaaatgcagacctatattcactcgtagtagatgattttatatttgagtttgtatcaatcttgaaaccaataggttgtttggcatttgactttacaccatcatcaccacgtgaaggtggatgtgaacatttatcggtgtcctctacttcacgattttcagtcttcgctttagaatctatttctggtagaggggacgatccagcagatgttgtgcccttgtcaccctgtgacaacaagttgtttacagacagcatattaacatcctcccggtgcagctcctttccaaccaaacctacaccacttttttcactcttctcagagatgactttctcaacttcatttgatggccctgcatgctgtggcaagctcacatcacattccacttttagcttcccaatgttgtctccttcacagccctgttcatttgctgatgaatttctaggcgaaggagatgaggaaatcaactcagatttagatatttctccagcgacactggcaagaagattcattgctgtatcatccccagcttgcaaggaatgactagcttcagagtacttgatttcaatcaaagcattcatagggttgaacaatttagtcagcccagtctcacttgaacagattcccttttcatttgcatatgatgaacaagcaactcgtgaaacaggtacatctctgccagctccttcagttgtcttgctgtcatcagtcaacatagcacgaggtgatttatcgccttcctcagaaactgaagctcctttaacatcattgctgtgccaagactcagcatttgtatcattgcctaaatgaggattggaattttcagtcttcattttcactctacggtcactttgttcatgtttgtctgccacaggagatgaagctctactcccagtaaatgatgggtcctcaaaagaaccgccacttgcgctcctagcagggcttcgaccaggatttgggaaccggacaatcaatctatggctgttaccctgatctgattgtatgtcagctcctttctcacatgctgtgccagattgtgacactttttcctgcactgaagagtgatcaagtgaagacgatcttgccacggcagcttctttctggatccctgaaccaagaagcccattgtttgttcttcgatgcacacgagaagaactaccggaagttttataggcaacaccagaagctgcagttgagcttcgggcatcctccttcgaagaaccgattgtttttgcatgttcactagaacatgactggctgttgttcagagactggcttgaactgctgcttttctcctctttcactgcaggcagctcagagccacaagtgccaccagttgatttggagggttgctccttcaagttggttacagcatttcctggttgcatatgttgcaattttgaagaaccagatatcactggactcgatttcgcagcagcatcggcggctacaggtttagaagtcaaggccttcgatgaagaaagctgagacactgggcttttcagactagactcacttgagccacttcgtctgtttccagcactagaaatttctggaaacccaggtttgcctggccaggatacagcctgacctgataccactggtttcacatcatttgacttcatttcagcatcaacgcgcttcttccaattttcgacaagacactttgccttcttctgtatctccggatttttatggcttcgcagatgattaacagacttcccaatactgcaactttgtaaagcagtaagattaataggcaatttcgccagtgcacgaagcagcgccaggacaggttcttccataggcttatcagtttctttaggactaccaccttcaccagacttccctttatgagcttcttgaagccaatcatcaaacacaggaaggcctcgcagttgcacaaacctaccaaggcagtcaggactttctgtagctgcaataatatcagctagaattacccggccaggcaaatctatctttcgctcagttcgatcaagttgcatgagatgtaccagcttctctacagcttcagcatgtggaagtccacctttttctgttatctttgtaatttcagactttagattctccaccttaaagttgcctgattcgccatcctcagcctttaggggacgctcacggtctcgcttagctggatcagttccttgctcacccctgtccctcttcttccctttggaaagaccgcagttttgggcaccatcagaaccagacttttgctgggcagacgacggtccattgagccgctttggtgagcgcccacctgactgaactgctgcatgcatttctagctttgttctgtgtagaagccgatttacttcttcctgccgctcatttatataatcctggtcggtaagccaccataaacacttgttgtcaatatcatacacgcgccgacacacaaatgaagaaattccagctggaagctcaacgcctttacgcaaaaaagcaactttgcaaggatgcagcagtgagacagcggatgtctcgtcctggtggaaagaatagaagatctcgtttggtgcggcgcacagctgtgttcccttgttaagcttgatgtcagctggtctatacagccaacttacacgtaacttgggaaagccttcctcctttttctcaatccaacgtatcaacccaatgaaagggggaacttcaacagcctgaaaaagagcgcagtcgccaacacggaattcacgcccgtccgccgccttcgcgccacccatgcatagccttgcatcatccccgccgccgatccctcctcgccgtcccccggcgccgcgccgcaccat

SEQ ID NO: 21063 - DNA, 4635 bp, Oryza sativa; identical to SEQ ID NO: 11342
  Clone ID: TF_OsC57123_2

SEQ ID NO: 21064 - DNA, 774 bp, Oryza sativa
  Clone ID: TF_OsC33365_2
atggccaagacgcggcagccgcagaagcgggtgctggagtcgttcaccatcaaggggcccgacggggtcatcaagcgtgaggacccctttcttgatccttttatctatttatctaggtttttgttgttttgggggaaattttggatcgtagaatcaagatactacctaagatttcgtagcatcgtggaaatgaatactggggatactgtgctaatgatggcacctgactcatcaaagaaaccatatgtggcaagggttgaggaaattgaggcaacaggacctcaagcctctcaagtgaagatcaaggtgcggtggtactaccgcccagaagagtccattggtggccggcggccattccatggttcgaaggaagtatttctttctgaccactatgattcgcagagtgctgacaccatagagggcaagtgttatgtccacacctttcgagattacaccaagcttcgatctgtcagcgctgaggacttcttttgccgctttgagtacaaatctgccacaggcagctttgtgcctgaccgtatagctgtgttttgcaaatgtgagatgccatacaatcctgataaccttatgatccaatgtgaggattgctctgactggtttcatccttcctgtgttgaaataaccatcaaagaagcgaagaaactagagcatttttactgtaaaagctgtattgctgaaaatggaaaggatctacaaaagtccaatggtgctactgtgcaatctgaagaaaagggttttcgtttttacccctacttt

SEQ ID NO: 21065 - DNA, 5855 bp, Oryza sativa
  Clone ID: TF_OsC57123_1
atggtgaggcgggcgagcgtggcggcgtgcctgacctgcccgctctgcggccgcctcctccgcgacgccaccaccatctccgagtgcctccacacctcttatggtattttcaattgtgttttgttcagagttgatcacagtatgcaattcgtaaggtcaaggatatttcctttcaaacgaaggaaggttgagaacccagaaatcatttgtccagttgcgtcacctgtcaagaggaaagaaagatcactatcttcacttacaatccctgctcctcaggtgtctatacagaaatgtttgacaaagaggagaacgaaagcttcgtgcttacgcaactttcctttgcattctacctcgaggggcagtaaagatacatcaaagaaacttgggggttggagaccattgggttgtcaacttaagcttggcaaagacaaaaaatctctcaaatcaagtgtaaaagatacaaacagaaccaaaagtaagtctggtgatacagatgatggtgctcctgctagtaaagcaaaggctagagaaccctttacaagatatgggcgtgcagctaagaggactggaagaaagaaattgctcatgttgaagaacaaaaagaaaaggttcaaggcaaagcagcccagtaaaaagaggagattccgagcactatggttttatctacttgctgcttttgaccagagaggagtaccaactttaccacaactaccagcaaagtatttgaggatcaaggatgttgatttgcctgcttctattatacagaagtaccttgcacagaaacttaacctctcaagtgaaactgaggtagaagtgttgtgtggtggcaaagtagtgaaccaagggatgacactgcatgatctagcagattgctggcttgagaaaggaccaaagagccgaatgcgctcatcgttttgtctctgccttggttgcttgtgggggttcgtcgctgatcgtggtgtcgtggggagagctgatcgcggtcgcgtgatgcggggagctatggcgaaaagtccacgttctgttgttaccacaggaacaaaaaggcgtagagcaaaggttcataaagaagatgagcctgttgagaatgaaaacttggagagtgaatttgatgtttccaagaaagagagcaatggtgccactgaacctggtaatgagcctgttgccagcaagagaccgaagagagcagctgcctgttctaacttcaaagagaagtcattggacttatcagaaaaagattcaattatcacaatcaaggaaagtcgggttgaagagaaggaaatagaggctgttaatttgacaaggacgggacctgaagatggtcaaccttgcagaaaaatcatcgatttcatcttacatgatggagatggtaatctgcaaccctttgaaatgtctgaagttgatgacattttcataacagctcttatcatgcccttggatgatgatctggaaaaggataggggaaagggaatatgttgttcggggtttggacgaattgaaaactgggcgatttctggctatgatgaaggtgctgcagtaatttgggtctcaacagaaacatcagattacaaatgtgtgaagccagcaagcagttacagatcttattttgaacactttagtgagaaggcacgtgtctgtgttgaagtctataagaagttagctagatcagttggtggaaatcctcaggtggacttagaagaattaattgctggtgttgtccgttccattaattcaaacagaagcttcaacggaacagtaaccaaagactttgtgatctcctctggtgagttcatatataaacagcttattggattagaccatacagctggcaatgatgatgagatgttggccacactgccagttcttgttgcactgaaagatgaatgtaaatcaagagcaggattcacacatttgccagctatgccctcgaatggaactctgaggattaaggatgggcaagacaagggactgactgaggatgaggatgcaaaattagcaagactgttgcaggaagaggaagaatggaaaatgatgaagcagagaggcaagcgtggaacttcacagaaaaatatctacatcaagatttgtgaaactgaaattgccaacgactacccacttccagcctactataaaccatataaccaagaaatggatgagtacatatttgatagtgatattggtatgtattctgatgatgtacctgtaagaatccttgacaactgggctctatacaattcagattccagactcatttctttggagctcatccctatgaaagctggtgcagaaaatgatattgtggtatttggatctggttttatgagagaggatgatggtagttgctgttcaacagctgagctagcacagttacattcttcctcaagtaaatctggccgggaagatccaggagttccaatttatttgagcccaattaaagagtgggttgtagaatttggtggttcaatgatctgcataaccattcgaactgacgttgcttggtacaaattacgccagccaacaaagcaatatgctccatggtgtgagcctgtgctgaaaacagcaaggctagctgttagtatcatcacccttttaaaagagcaaagtcgcgcttcaaagctttcttttgctgaagttatcaagaaagtagcagaatttgacagtagacaccctgcatttatatcatcgaaagcaccaaccgttgaaagatatgtcgtggtgcatggacagataatacttcagcagtttgcagactttccagatgaatctgtcaaacggtgtgccttcatcacaggtcttctagcaaagatggaggaaagtaggcacacaaagttggccatcaagaaaaaatctcaacagatgagaggggagaatctgaacccaagcgcaaaaatgggtccaatactgagaaagaagcttatgcgtgctacaactacaatgttgatcagcaagatatggggtgaatactatgccacttatttccctggggatacaaaggaagaagatcagaatgaaccaaaggaaattgatgatgatcaagaagaaaatgaagacaatgatgctgaagaggaggtaaatgttcaagatgagaaggccacaaggactccaccatcaacacggtctagaaagtcgtcagcagatactcgcaaggaaatcaaatgggaaggtcaaacagctggaaaaacagtgtctggagaagttctgtacaaatgtgttattgttcaagacctcagtatttctgttggtgcgacagtcacaacagaggatgattcaggagaaaccatcatgtgttttgttgagtatatgtatgagaaacttgatggtaaaaatatgattcatgggataattctgcaagaaggttcacagactgttcttggcaatgctgcaaatgatagagaggttttcttgactaatgactgtttagaatttgaagcaagtgacatcaaagagttggtgactgttaatatccaatcactgccttggggccacaagtacagaaaagagaattctgaagctaagagaattgaaaaggccaaggcagaggagaggaaaaggaagggcctgccagtggaatatatttgcaaaagcttatactggcctgagaaaggtggattcttctcccttccgtatgataaaattggaaatggcacaggcatctgtagctcctgtgagagaaaaccagttggcaatgaattcaagttactttctgagagcagctttgtctttgagaatattacgtataacatccatgactttctgtatatcaggcctgaatttttctcccaaggggagggccatgagacctacaaggctggaaggaatgtgggtctaaaaccttatgcagtctgccatctgctgagtgttcatggtcctgctggatcaaggaaagctaatccagaatcgacaaaagtgaaagtaagaaggttttaccgacctgatgacatttcatcaacaaaagcctactcatcagacatccgagaggtgtactacagtgaagatataataagtgtacctgtggtgatgatagagggaaaatgtgaggttcgactgaaggatgaccttccaaattcagatcttccagcggtggttgaacatgtcttttgttgtgaatatttatatgatcctgctaatggagctctcaaacagctaccgcccaatgttagacttgtgacactgacaaggaaggtacctgcttcaaaaaagaacaaaggaaagcaaatttgtgacattgagctaggtggttcagacaaaccaaaggatgggcaatcagagaactgtcttgcaacacttgacatttttgctggttgtggaggtttatctgaaggattgcagcgatcaggattgtcacttactaaatgggctattgaatatgaagaacctgctggggatgcatttggtgaaaaccatccagaagctgcagtatttgtcgaaaactgcaatgtgattctgaaggcaattatggacaagtgtggtgattctgatgattgcatctccacttctgaggctgctgaacgagcagctaaactttctgaggacaagattaagaatctgcccgtgcctggcgaagtagaattcataaatggtggccctccgtgtcagggtttttctgggatgaacagattcaatcaaagtccctggagcaaagtccagtgcgagatgatcttagcattcctgtcatttgcggagtatttccgtcctagattctttctcttagaaaatgttaggaactttgtctcgttcaacaaaggacagaccttcagattgacactggcatcactcctggagatgggataccaggtccgatttggaattttagaggcaggggcttatggtgttgcgcagtccaggaaaagggcattcatttgggccgctgcacctggagagactcttccagagtggcctgaaccaatgcacgtctttgctagccctgagctgaaaataactctacctgatggcaagttctacgccgctgtcaagagcaccgctgcaggagcccctttccgctcaattacagttcgagatacaattggggatctaccagctgtggaaaatggcgccggcaaaccaacaattcagtacggaagcggtcctgtgtcttggttccagaagaagattagaagcgacatggcttcactgaatgaccacatatctaaagagatgaatgagctgaacctcataagatgcaagcacattccaaagcgcccaggttgcgactggcatgacctgccagatgaaaaggtgaagctgtccacagggcagatggtggacttgatcccttggtgcttgcccaacacagccaaaaggcacaatcagtggaaaggactgtacggtaggttggactgggagggcaatttccccacttctgtaacggatcctcagccaatggggaaggtcggcatgtgcttccatcctgagcaggataggatcattactgtccgtgaatgtgctcgatctcagggctttcctgataactaccagttcgctggcaacatccagagcaagcacaggcagatcgggaatgcggtgcctccacctcttgccttcgccctcgggaggaaactgaaggaagctgttgatgcaaagcgtcagtaggtgctcagagtccttctccgatgatcgagggagatgattctcccctgaaaagaaacaaacaaccaaacatatgagtgtacttattttaattgtgcgctgcatttaactttgtgtgttgattaagattttagtcatatagatccttggtaaccttgtacattttagaggttgtgttgtgattgatacccttgattcaggggtatgatttagtggctgtattcagatatttaaacaaaataatactagttagtgatggttgaattgtt

SEQ ID NO: 21066 - DNA, 1240 bp, Oryza sativa
  Clone ID: TF_OsC3802_1
ggccggaaggagataagctaagctagtagtacactactggagtacatgagaaattctcgatcatcatcagtcacagagcctcacaagggctcacatctcacaaaggaaatgttgctgacaggaattaagttaacacacacacactgcacgcagagctaaccaagtcatcaatcaccacaggtgttgttggtgttcaactctctccccccacctctaaccaaacgaccggcgcagcaaagccgtggccgtagcgacggctgagctgcgccgaagccgttttcctaacagcaacacaacataatgttcttttttttttcttttcttgaacaggctaagaggcggcgaaggccgaattctgcagacgccttggttctcttgcactgtacacctcaaccttcgccacggaaaagcacaaggtatccctcagcagcagatgttacccagtcaagagttttcacctcctctgcctttttgactcagccttaggctcatactttgatgaacctgcatatgcatgtgaaggtctctttgcgccgttttccttgacacaatctgagcacacaaagtgatctagttttttggcctgctcaatcgtcattctcatgcatgatggatgaaaccagtccttgcatccatcgcactgcaccattagatcatccgggttatacggcatctcgcacttgcagtatacggcgacgcggtcgggggtgaaggcgccggtggcggccttgtactcgaagcggcagaagaagtcctcggggccgacgttgtcgagcttggtgtagttcttgaaggagtggacgacgcacttgccctcgatggtgtgggcgctctgcatgtcgaagtggtcggagaggaagagctccttggcgccatggaactgcctcctcccgcccttggactcctcgggccggtagtaccaccgcacccgcacccgcacgctcccccgcccgtccagctccatcttctccaccctccccacgtacggcggcttctccgtgtccgacgcccgcatcagcacgcagtcccccactcggacgaccttgttggtgccggagatggtgtaggagtcgacgtcccgcttgccctgcttggtcttggccatggcgagggggcgaggttttgggaggtggaggaggggggaggtggggagagaaaccctagaggcgacgacgatgagatgggtggggagctgggagaaagggccgcgttccgatccggccggaggaccgggccgtct

SEQ ID NO: 21067 - DNA, 5561 bp, Oryza sativa
  Clone ID: TF_OsC12270_1
tttttttttttttttttttatatgcaagataagcgcaatatcgcattactcatcgatcggatacatcattaaatcacacgataatacagccaacaaagcagtcacgtcaaacgatcggcctgcaatatgcacgacagtatcccaattcccacatacacggtacgccccggttcccatcgatgattcgccatctcgcaacaccacacagtttccactttccacactcacgcaccgaagaaatagtcaagtctagctcgacgcctccgatcatacggctagcgatgctgttgccgccggggtggctcccccgagtcggcgctggagtgggtcccgtactcgctgctgtcctcgatgctgctctcgaaggccaccttcctcaacctgttgatgtcggaagcgtagttgccggagtcgtactccgaccccgtgctgaacatcatgctctgcccgggcttcaccccttcgttcaggtcgtccagcgacgcgtcgccctccagcgcacggacaatctgcttcatctttgggcggcgcttggcggagtggcggacggcggcggcagcgcatgcggccatgcgctccatctccagccggtcgaacttgttctccaggcgctggtcgatcagctcgtcgaaactgccgtcctccgacaaggcgcgcgccaggaggggcctcgcccagtcaaccaagctgtcctccatgtagttcgttgggtcgaccggtcgccggccggtgatcagctcgagcagcatgacgccgaaggagaagacgtccgatttgtccgtcagcttgccgctcgacgcgtactcgggagccagatacccgaaagtccccatgacgcgcgttgagacatgcgtgttggtgtccgtggttagctttgcaagcccgaaatccgcaaccttagcatcgaaattctcgtccaagaggatgttggccgccttgatgtcacggcggatgatcctaggatggccttcgtacgtgacaaccacaatgcaacaaatcagatcgttagaaggacgtacagacaggatttgtccctgcagaaatcttcgtgaaggtacgcgaggcccttggctgagccgagcgcgatggcgagcctcgtcgtccaggccatcaccggcacgcccttccgaatggcgcgttacgatggctgggaaaagagcaggaaagatatggagaccgtggaggtggtgctcaagggtgtcgttggggacgaactcgtagacgaggaggcgctgggatgagccggcgatgcagtagccgacgagggagacgaggtggcggtggtggacacggctgatgatctccacctcggcctggaactcgcgctcgccctgcccgctcccggccttgagctgcttcaccgccacctccttgccgctgcccgcgaggacgcccctgtacacgtacccgaacccgccctgccccagcaggttcgccgacgagaacccgcccgtcgccagcgccagctcgtcgtacgagaaggagctcttcgagaaccccagcgccatgcccggtgacggcggcggcagcggccccgccccgtgcgacccgctcatctcgctgctcggcggcgcctggcctggcgagtactgcgcgtgccagccgccgccttggtccacgctgttctgccacctgggcatgctgttcgcgtagtacactttcccgttctcgtcggtgtagtacggcatgtgcatgtggggaggtctcttcttcttcttggagcagcacacgcaggcgcggacggccagcagcagggcgaaggtgaagaacccgatgaccatgccggcgatgatggcagcctctggccccggcctgttgccgttgctttcgctcttgccacggtcactcgagctgcctccctccttggagctcccactgtccgaggaggagccaccgtcgccgctacgcttcggagcgggttgagactggacggcctttggcgctggcggcgagccatgcgatggtggtggggacccgccgccgccggtattcgccggtggcgccgactgcgacggggaaggtggcgacggtgctgagcccgaggaattggtcggtggggccgacggtgtggacggtggcgggctggcaggaggcggcgatgaccccggaggaggtgactgcgacgacggaggggacgacgacgtggagctcggcggtgatcccgtggagctagagctgtccgcgcctgccgatgaatccaatccatttccatcaaacagattatctagcggggaatcgtccatttcccgccggacgtcgagacggatctcgccccggcgatgatcaagacgattccacccctcccacgagaggatgttctggaatggaacggcgcggcgcgcctccccctcctcggctcctcgtcgcgataaaccccttctagaatctaggatcaagggaataaccacattcactttaagaaaagcaaacatcatgcaaaagaaattggggtttatgaaatattcaaacaactgttccgaatcagctatttcacttccaggagttcctgccgaagatttaacaaccgtctcttgatcagcataaataaaactctctggcaatttgagtactgctcgatctccatcagattcaccccggtaggccagcccaagagcataccccaaagctcgagcaactggaattgcaaccgcattgccaacctggatatatttctcctttagtgggccgatcaatctgtaatagtcaggaaaaccttgcaaccttgcattctcgcgaatagtcagaactcggtcttggctaggatgcaaaataatctggttgtgaggctcagctctggtaactacagtgggaacagtttcatcccaccacaggcgtccaaacggtttagttgacttccccttgacgaaagatatggcatagtcaggcaccaaaggcttcccagatgacagtcgttcacgggaaatgtttggatccagccgcacagtattatctgggccaactatgacgccctttagatcacgaaagttcgctcccttttttacaggtatccgctgcacacgctcataatcatctttgtttagctttagaggttgatgatcaaacaatttaccttcttcagaaggatcatctccacgaaaagagtaatcctgaatgtctttacggttgttccggatataccgttgaaattcagttttgggggcaacactatactctattacatctttaggttgatcatttccaaccttgggtaaatcagatatggcatctgcaaggagaagagcctttcgtaggcaacgggtgtctacctcattgtatgcaacaacactttgcgaaaatgtagttggtactattccacgcacaacagcatcatgggtaggaagtgggaattttggtaataccattgatggaagggctccccagagaaatgcccgcattctgaactgcggtagcccataatatcctgccgccatcatcccaagcctagcttgataattcatagccacaaggcaactcattgcatagcgtccaaggaatccatctgcaaatttcaatatgtccacaacattttccatgaggacatatttgggcctcagatacttcactatatccataaaaacaaccaactgtttgttcttttcatcctcaagtggatcattatgctttctgaatcggttgaacccactgatgccttgacatggaggcccaccacatatgacatccacagcaccgggcaagggcaaaatattttccttgtgtcctttctctacaaattctttaatacgctcagggcaatcactgagcccatcaattggctcccatgtatcataacttggatcataccctttccaccgcaccttaaaccacaagccattttttcctgtgttacttggatcaccatagcatatctcaaggagctcctctacatcgaatatatcttctggaagaggctcatttacatcgtcagcatcatttaagggcatatctatactaggttctagtgtatcgtttttgtggacaacatattttctacaaagtgcatcccactgctgaataagggcaagaaaatcctcagttttctcgttccgcacctgcgagtatgggtgattatgtttgagacaagcacaagcatatttgtttatgtcaacagcccacctagtctctaaatttatgccagaaaatgcaaaacccaaacaaagcccagttgacatagcgccacatcctgagtaaagatcaagcagagaagctgtctctgtttgttcactatatggtgccacaatatcagccgacaattttcccttagaagaattgtcagcatcatcgcaggaaatatttgatgttgcctcactccccaatgcaccatcattatctgctggaagatttgcaaacgtggaatatgcaacagagtaagacatgtcatagtacaggtcacaatcagatatagcatgagctcttgcttgaggcgtcatatttggatcaacatgggcaatctttacttttgagactatgcactcaatcaagttgtcattcttctcctttgaaagaaaaacacgcttatggttatgtctatgatcatgcacctttaacaactttgatgagatgaccgtatctgctgtacggaaaaaccactgacaagagaaatatgatccacggtcgactccttcaaaaaattcagtaatccgtccaatgtaattttcctcatcaggaccagccttgacatagacatcatcatcaagatgatagatttcatcatccacattagcagccaggtagtgacatcgagccttcatttcttcatcttcgtcaggctcctgcttaagaagcgaatcagacccctttctactgtacctcacgggccatcgttgtcgcgcttcatcatccggtactggatcgcccacaaagtggtcatctgagtcctccacccttctcgcagtgcttggccgcgccaccctcttcctcgtcgcagccttctcggctgatccttctccgacacacttacccatcctctcctctgcttccagcacgtcggctgcctcctcctcctcctccatggccatctgttcggcgtccggctcatccgcgcacacgtcttcggccagcgcgccacccgcatcgttcaccttcatcttctcgggcgcctgagccgccgacttctcggtcgtctccttcgtcttctccttggccgtcttcttacgggtacgacgcttgaccttctccaccccgcgctgccgcttgccgcgtgactctgcgggcgacaacccactgtcgagctcggtcccctcgggctcctgcgccgccgccttctccacgtcctccggcttccattcggtcgctccctcatgggcactaggcttctccttcgccgtcctgcgctggcgcttgcgcaactcggggcgcggcatctcgcggtcgatctcgtcgagctcggccaccccctccgccgccgccgccttctccacgtcctccggcttccattcggtcgctcccttacgggcaccaggcttctccttcgccgtcctgcgctggcgcttgcgcgactcggcgcgcgacatctcgcggtcgatctcgtcgaggtcggccaccgcctccgcctcggcctccat

SEQ ID NO: 21068 - DNA, 5321 bp, Oryza sativa
  unsure (1)..(5321): unsure at all n locations
  Clone ID: TF_OsC13482_2
aataacgaaagatacagaaatagattatttcttggtctactaaatttcttatgactgcaaggcagagatggttacaccagaatgccccttgcaagcattcgggaactgcagacagtctactggatagtccataaagttacatgagcaaactgatgcaacggttacacgaaaaatacatgtcacatctaaaatcatatgtaaggctgcagatttgcccaacaatgtgaaaatggtttgtcataagaaactttaaacaaacaagctggactaattacaacggcttcagatgtttgttggggctcaggacctatacggctataccattccatctccagtcatatcggagcaaattagaagcatatgcctgacagctacgaaaatttagcagtgcaactgctgaagccaaggaaaaatgtttccaggaaagtatgaaatatgatgaacatttacagcaaagtatcattcctctcacaattcacatcatcacagggtcatgtatgaactgtatattccagcaggggtgcaacacaccagagcccaagttccacatgcaggtgcctctgcaaataaaagcaccgtacgttgagtgaggggagagggtgctggcaagtgagaaacaagtgggttgttgnnnactggnggcaagtccatacaagctcactggaagctgaagtcactgggaagggagaagtgataacagtgaaaagctctcattgccatgataattgcttgtatgaagaacgttctgcatcccaactgccttctggttccttcctctttattccaacacttggcatttggtacattcttgtatgctcttccccaaaggcatgtggtggcgtgattaaattttgtctaactggtaaagatactcgttcgtcctttatttctgcatctacacttccagggccagaattaagatcaaggccctgccttccccatttccgattactgtcgtgtccaacagtgctgcttccttcaggaaggtttattgcatattgcctagtatgttgagcaggtaatgcacctgctggccctaacagtgttggagcaatgctaggaaaatatggaactcctgcaggtgctgaattggcataagatgtcgagccaattgaaaaccccggtgcttgaaggtgcacaccaggagtaaaagggaatcctgcatattgatacgcaggaggatgaaaaaccatggttggtgaagtagaaataactggagcacggcagggatcacttccacgctggacaccatctgccaaggatgtaatgatcctctgggttccacttccagcagctgtctcaactgggtgaggctgttctcctctagatggtaaaaatggctgtgcagctacaggagcataagggtgtgcagaagcaaaccatggagagatattactcatctcggcactgttcattctaccgccagcaacttgaggtatgaatggtatactgctggtatttttagatgatagactccttgctgcatgttccgtgccagtttcatctagagttggtccattattgagatcaaaatcccttgagccatttgtatcagcactagagaaaattgcaggtaacggtcttgacgataacaatgggacttcgaccctgtggggagtgttcgacacaaaatggttctctgcaacttcatcagctctgttcaaatcaagttcaataccaacacttcgtacaggaccattgcttcttctagtgttgccagattccgaaccagttgtctgaacagaactctgagagatatcttcctcaagaaattgctcatctgctacatttaagtcaatgtcaagtgctgggcggtgtttatctgcagcatcagaaactggaatgccaggtgcgctgagagtcatctcaaaaattttccttggttctgcaggacgaaatgcacttgtggctgctgaacctttccagccagtctcaggctgaaatcttagtaggttctcaggaggaacaaagggacctttagctgtagcagctacttttatcggagcaggtagcccacttgacataggtgatataaatggagaaagacaaggtaaattaattgcagaagaacacacagcaggagaggtttctgcctcagactgatgcacgtcgtctccaggtattccttcattcaagtcaaaatcaagcttggctgtagcacttggcctgatcttggcagcaaaagaagaaccatcatctgatgagacaaggtcctcgttcccacttgcatcatcactcgacttctttgagctgcgccttgcactacgttcagtatcctgtgagacagtagttccaggtcttgcatgactacttgattcactggaattgtcttttaattctttagaactaatcccattttctggaccaaatggtacacctgctggtacagctagttttgtagcatcagctgaagtggaagaaggttgttccttcttttcatcctctctcagcactgcgttaccaaccagcaaaccatcagccttattcacctccacggtcgaagatgaaaatgaaggctccacatccaatttaacagcagcactgtcaccagatcggtcaatggcttctgaattatctggtagacactggcgattcttctgatctgttgactttaacaaaccatgagattgtttatctccaccacgtaattcacttgtagtagatggatatatattcaattttgcgtcaatcttgatatcaactggctgttttgtgaccgacttgtcaccatcaccacctttatctgtagtcctcacttcatgattttcagtcttagcaggagattcaacagccttaacatctattccaggtggagagggtagcccagaagatgtgaccttattgtcctttgcatcccctaggtgttgttcctcctttgcgaccaaacctgcaccaattttctcacccttatcagagatgattttctcagcatcatttgttggccctgcatgccgtgacaagcccatatcactttgtacttttagcttcccaatgttatctccttcacagccctcttcatttcctggtgaatttctaggtgaagcagatgaagaaatcaactcagatttagatatttctccagcaacactggcaagaagattcattgctgtatcatctccagcttgcaaggaatgactagcttcagagtacttgatttcaatcaaagcattcatagggttgaacgaatttctccccccattttcacttgagcaagccgccttttcattagcatctgagcaaacaactcgggaagcacatgcatctttgccagcttcttcagttgtcctactgcgatcatcggtcagcatagcataaggtgatttatcaccttcctcagaaactgaagctcctttaacatcattgctatgccaagattcagcatttgtatcattgcctaaatgaggatttgaattctcagttttcatttttactctgcgatcactctgttcatgcttatctgcaagcacaggagacgaagctctactcccagtaaatgatggatcctcaaaagaacccccacttgcacttctagcagggctacggacaggatttggaaaccggacaattaatctatgcccattaccctgatctgatggtgtgtcagttcctttctcgcatgctgtgacagattgtgatgctttttccggtaacagagagcggtcaagtgaggtagaccttgccacagtagcttccttttggcctcctgaactaagaatcccattgtttgttcttcgatggacacgtgaggaactaccagatgttctaccagcaatgccagaagctgcagttgaactacgggcatcctcctttgaagaaccaattgttttcgcatgttcactagagcatgactggctgttgttcagagactgacttgaactacagcttttctcctctttcaccgtatgcaactcagggctacaagtcccaccagatgatttgcagggttgctccttcaagttggttacagcatttcctggttgaatatgctgtagttttgaagaaccagatatcaagggactcgacttcacagtagtatcagacgctccaggtttgacggtcaaggccttcgatgaagaaagctgagacactgggcttttcagattaggctcacttgagccacttcgtctgtttccagcactagaaatttctgcaaacccaggtttccctggccaggatacagcttggccagatacaactggtttcgcatcatttgacttcatttcagcatcaacacgcttcttccaattttcaacaagacactttgccttcttctgtatctctggatttttatggcttcgcagatggttaacagatttccctatactgcaactttgtaaggcattaagattaataggtaatttcgccaatgcacgaagcagcgctaggagaagttcttccataggcttatcagtttctttaggactaccaccttcaccagacttccctttgtgagcctcttgaagccaatcatcaaatacaggaaggccccttagttgcacaaatctgccaaggcaatcagggttttctgtagctgttataacatctgcaagcattactcgaccagcaaaatctaacttccgttcagttcgatcaagttgcatgagatgaactagcttctccacagcttcagcatgaggaagtccacctttttctgtaatctttgcaatttcagacttcatattgtctcctttcaggtttccaggctcagtgtcatcagtcttaagggtgcgatcacggtctctcttaatttgatcaattccttgttcacctctttccctcttctttcctttagatgaaccgcaattttgggccccatctgaaccagcctttaattgctgggaagctgatgggccagttagccgcttcggtgagcgcccaccttgctgcacggcagtatgcatttcttgccttgttctgtgcagtagccgatttacctcttcctgtcgttcatttatataatcacgatcagtaagccaccataaacacttgttgtcaatatcataaacgcgccaacatacgaatgaagaagttccagctggcagctctgcaccttttcgcaaaaaggcaactttacaaggatggagaagtgagacagccgatgtctcgtcctggtgaaaagaatagaagatctcgtttggagcagcgtcgagttgtaagcccttgttgagcttaatgtcggcaggtctgtaaagccaacttacacgcaacttgggataaccttcttcctgtttctcaatccagcgtatcaatccaatgaaagggggtacatcgacagcccgaaaaagagcgcaatcacccactctgaactcacgtccgtccat

SEQ ID NO: 21069 - DNA, 2535 bp, Oryza sativa
  Clone ID: TF_OsC58534_1
atggcgcccagctccccgtcctccgccgccgcgcccacgcgtacctccacgcgtaagcgcgccgcctccgcctccgcctccgccaaggccaccgacgagccctccaccaagcgcacccgcaggcccaaggcggagaccaagcccaggaagaagaaggacgaggtaaaggaggaggagaagccgcccatggaggacgacgcctgcggggaggagccggatgcggaggagatggccttgggggaggaagccgaggccgaggaggcggaggcggagcagaagcagctggacgcccccgcccccggtgtggcgaggaagcgggtggcgcagcccagcagggtccgacacggcagcgacggcgaccacgacccggagttcgtcggcgaccccttccccgccaaggaggcgcgcgacaagtggccgcagcgctaccagcgcaacgccgccaccaggaggcccgatgaggaggaggacatcaaggcgcgctgccactacagctccgccaaggtcgatggcacgctctactgcctccacgacgacgtctatgtcaaggctgaggaagataaggccgactacatcggtagaattactgagttctttgaggggactgaccactgccactattttacctgccgttggttctttcgggcggaggatacggtcatctcatccataatgatggagaatgctgatgatgaaaagcatgatctcaagcgtgtttttctttctgaagaaaagaatgacaatgtgcttgattgcatcatttcaaaggttaaaatcgtgtatattgatccaaatatggaatcagaagccaaagctcgacggttggctgattgtgatctgtactatgacatgtcgtacaccgttgcttattcaacatttgctaatatcccacttgggtcagaggcatcttcagtgggaaaggctacactccttgatctgtactctggttgtggcggtatgtctaccgggctctgtttgggtgcggcacttgctggactcaatcttgaaacgcgatgggctgttgatttcaatagttttgcgtgcgagagtctcaagtataatcatccaagaactgaggtccggaatgaaaaggcggatgagtttcttgctcttcttaagggatggcatagcctttgtgatgaatatgtcaagaaagatattgatttcagttcagctggtgcctcagagaacgaagaggatgatgatgagcctcttgaaaaggatgagtttgttgtggagaaactagctggaatctgctacggtggcagtggtagagaagatggcctctatttcaaggtacaatggaaaggctatggccgtgaagaggacacttgggagcctattgagaacctcagggattgcccattgaaaattaaagaatttgtgcaagaaggatacaggagaaaaatcttgcctcttccgggtgatgttgatgtcatttgtggtgggccaccatgccaaggaataagtggtttcaatcggttcagaaaccgcaaagagccactaaaagacgagaaaaacaaacagatggtgacattcatggatattgtggcatacctgaagcctaagtatgtcctgatggaaaatgttgtagacatactgaagtttgcagatggttaccttggacgttatgccttgagccgtctggtggctatgaagtaccaagcacgacttggaatgatggttgcaggttgttatggcttgccacaatttaggatgcgtgtgttcctctggggagctcttcctaccatggtgctgccaaagtatccgcttcccactcataatgttgttgtccgtggtggtgccccaaatgctttttctgtaaacaaccatcagcctaatgaagtgatggaatatggttcttcccccaaaacagaattccagcgctatatccggcttagccgtaaagaaatgctggatagttcttttgaagggaaggatggtccagatctaggcaagcttttggatcaccagcccttaaagctaaataaggatgaccatgagcgtgtgcagcaaattccagtaaagaagggagccaacttccgggacctgaagggtgtcagggttggggcaaacaacatcgtggagtgggatccagacgttccccgtgtatatttatcttctggcaagcctttggttcctgactacgcgatgtctttcatcaaagggagatcactgaagccatttgggcgcttgtggtgggatgagacggttcctacagttgtgacccgagcagagccacacaaccaggcgagagttctgaccgtaagggagaatgcaaggttgcaggggttcccagactactacaagatgtttggccctatcaaagagaagtatatacaagttggcaatgcagttgctgtacctgttgctcgtgcattgggttactcccttgggcttgcataccagcgtgagtcggaggggagcagccctctgttcgtcctgccagacagcttcacggaagtcgggcgacaggcggcgccggcaagagcatcctctgttggtatccctgttggcgaggttgttgagcaatag

SEQ ID NO: 21070 - DNA, 1204 bp, Oryza sativa
  unsure (1)..(1204): unsure at all n locations
  Clone ID: TF_OsC33365_1
ccggccaggagggaggaagaggaggaggaggagaggagcgcgtgaagcatttcggctcaaaggggaaataaaaaggggaagattttttttgcatctcatcctctcgctctcgccgtctctcgccgctcccccccctttccaggctccaatcccgccgccgcgtaggatggccaagacgcggcagccgcagaagcgggtgctggagtcgttcaccatcaaggggcccgacggggtcatcaagcctggggatactgtgctaatgatggcacctgactcatcaaagaaaccatatgtggcaagggttgaggaaattgaggcaacaggacctcaagcctctcaagtgaagatcaaggtgcggtggtactaccgcccagaagagtccattggtggccggcggccattccatggttcgaaggaagtatttctttctgaccactatgattcgcagagtgctgacaccatagagggcaagtgttatgtccacacctttcgagattacaccaagcttcgatctgtcagcgctgaggacttcttttgccgctttgagtacaaatctgccacaggcagctttgtgcctgaccgtatagctgtgttttgcaaatgtgagatgccatacaatcctgataaccttatgatccaatgtgaggattgctctgactggtttcatccttcctgtgttgaaataaccatcaaagaagcgaagaaactagagcatttttactgtaaaagctgtattgctgaaaatggaaaggatctacaaaagtccaatggtgctactgtgcaatctgaagaaaaggtgcagtccaaacgacggcggaggtgatgccatggagacagaatctcaatacctccaaagtggatgtaacaattctgtggggagcaaagcctcatcactcctctagatcttctctcttctcttcctgtgcaaggctgcttgcagccagtgaccagtgtactgtgtacatatttaccagtgttttctttttgcatcgtttgcatggtcgtcgtagcgtcgtcgcatgtactagcttggagtcagtcagtcagttagctcgagcaaagggatcaaactccctcttggtcataaactcataagcgatgatgatagatgaaactgggcactacctaccgtggttgtgttgttgtccatcaataataccttgacgacaaactacaaaaaaaaaagtgaaaaatcaaanaaaaa

SEQ ID NO: 21071 - DNA, 4937 bp, Oryza sativa
  Clone ID: TF_12002700
aattcctgcaaacagaaataaaaagccagttgtgtgacttggaaaccaaattacataaagaggaattatctgaggaaggctacctggctaaagtcaagtccctcttaaataaggatttgtccttggagaacggaacacacactctcactcaaaaagccaacggttgtcccgccaacgggagccggccaacctggagagcagaaatggcagactcaaatagatccccaagatccaggcccaagcctcggggacccaggagaagcaagtcggacagtgacaccctttttgaaacttcacctagttccgtggctacgaggagaaccaccaggcagaccaccatcacggctcacttcacgaagggccccactaaacggaaacccaaggaagagtcggaagaggggaactcggctgagtcggctgcagaggagagagaccaggataagaaacgcagagttgtagacacagagagtggtgctgcagctgctgtggagaaactggaagaggtaacagcgggaacccagctgggtccggaagagccatgtgaacaggaagatgacaacaggagtcttcgacgtcacaccagagagctgtcattgaggcggaaatcaaaggaggatccagacagagaagcaagaccggaaactcacttggacgaggacgaggacggaaaaaaggataaaagaagttccagacccaggagccagcccagagatccagctgccaaacggagacccaaggaagcagagccagagcaggtagctccagagactcccgaggacagagacgaggatgagagggaggagaagagacgaaaaacgacacgtaaaaaactggagtcacacaccgttcccgttcagagcagatcggagagaaaagccgctttaagcaaaagtgtgatcccgaagatcaactcaccaaagtgccccgagtgtggccagcacctagacgaccctaacctgaagtaccagcagcaccctgaggatgctgtggatgaaccccagatgttgaccagtgagaaactgtccatctacgactccacctcgacctggtttgatacttatgaagattctcccatgcataggttcacttccttcagtgtgtactgcagtcgcgggcacctgtgtcctgtcgacaccggtctcattgagaagaatgtagagctctacttttctgggtgtgccaaagcaattcatgacgagaatccatctatggaaggtggtattaatggcaaaaacctcgggccaatcaatcagtggtggctcagtggctttgatggtggcgagaaggtgctcattggcttctccactgcatttgctgaatacattttgatggagcccagcaaagagtatgagccaatatttgggctgatgcaggagaaaatttacatcagcaagattgttgttgagttcctgcaaaacaatcctgatgctgtatatgaagacctgatcaataagattgagaccactgttcctccttctaccattaatgtgaaccggttcacagaggactccctcttacgccacgcccagtttgtagtgagccaggtagagagttacgacgaagccaaggacgatgatgagacccccatcttcttgtctccctgtatgagagccctgatccatttggctggtgtctccctgggacagaggcgagcaacaaggcgcgtcatgggtgctaccaaggagaaggacaaagcacccacgaaagccaccaccaccaagctggtctatcagatctttgacactttcttctcagagcagattgagaagtatgataaggaggacaaggagaatgccatgaagcgccgccgctgtggtgtctgtgaggtctgtcagcagcctgagtgtgggaagtgcaaggcgtgcaaagatatggtgaagtttggtggcactggacggagtaagcaggcttgcctcaagaggaggtgtcctaacttggcggtgaaggaggcagacgacgatgaagaggctgatgatgatgtgtcagagatgccatcacccaaaaagctgcatcaggggaagaagaagaagcagaacaaggaccgcatctcctggcttgggcagcctatgaagattgaagagaatagaacttactatcagaaggtgagcatcgatgaggagatgctagagtgggcgactgggtctcggtcatttccagatgattcctccaaaccactctatctagccagggtcacagctctgtgggaagacaaaaatggtcagatgatgttccatgcgcactggttctgcgctgggacagacacagtcctgggagccacctccgaccccctggaactgttcctggtgggcgagtgcgaaaacatgcagctttcctacatccacagcaaggtcaaggtcatctacaaagccccttctgaaaactgggccatggagggaggcacagaccctgagaccacactgcctggggctgaggatggcaagacttacttcttccagctctggtacaaccacgattacgcaaggtttgaatccccacccaagacccagccgaccgaggacaacaagcacaagttctgcctatcttgtatccggctggctgagctgagacaaaaagagatgcccaaggtcctggaacaaattgaggaggtggatggccgggtctactgcagttccatcaccaagaatggtgttgtctaccgactgggtgacagtgtgtaccttcctcccgaggcctttactttcaacatcaaagtggctagccccgtgaaacgcccaaagaaggatcctgtgaacgagaccctgtaccctgagcactaccgcaagtattctgactacatcaaggggagcaacctggatgctccagagccctatcgcatcggtcggataaaagagatccactgtggcaagaagaaaggcaaggtcaacgaggcagacatcaagctgaggctctacaagttctacaggcctgagaatacccacaggtcctacaacggatcctatcacactgacatcaacatgctttactggagcgacgaggaagctgtggtgaacttcagcgacgtgcagggccgctgtaccgtggagtacggggaagacctacttgagagcatccaggattattcacaagggggccctgaccgcttctacttcctcgaggcctacaattcaaagaccaagaactttgaagacccaccaaaccatgcccgcagccctgggaacaaagggaaagggaaggggaaagggaaggggaaggggaagcatcaggtgtcagagcccaaagagcctgaggcagccatcaaactgcccaagctccggacctctggtgtgttttccggctgtggagggttatcggaaggattccaccaagcaggcatctcggaaacgctgtgggccatcgagatgtgggacccggcagcccaggcatttcggctgaacaaccccggcaccacagtgttcacagaggactgcaacgtgcttcttaagctggtcatggctggggaggtgaccaactctctgggccaaaggctgccacagaagggcgatgtggagatgctgtgtggtgggccaccctgccagggcttcagtggcatgaaccgcttcacactcccgcacttatctccaagttcaaacaactccctagtggtctccttcctcagctactgtgactactaccggcctcggttcttccttctggagaacgtcaggaacttcgtgtcctacagacgctccatggtgctgaagctcacactgcgctgcctggtccgcatgggctaccagtgcacctttggtgtgctccaggctggacagtatggcgtggcccagacacgaaggagggccatcatcttggctgcagccccaggagaaaagctgcctctgttcccagagcctctgcatgtgtttgcgccccgtgcctgccagctgagcgttgtggtggatgacaagaagtttgttagcaacataacgaggctgagctcggggcccttccgaaccatcaccgtgcgagacaccatgtctgacctccccgagatccagaatggagcctcgaattctgagatcccctacaatggagagccactgtcctggttccagaggcagctgcgaggatcacagtaccagcccatccttcagggatatttgcaaggacatggcccactggtggctgcccgcatgccgcacatcccactgttcccaggatcagattggcgtgacctgcccaacatacaggtgcggctgggagatggcgtcatagcccataagctacagtacacctttcatgatgtgaaaaatggttacagcagcaccggtgccctgcgtggagtctgttcctgtgcagaaggcaaggcttgcgaccctgagtccaggcaattcagcaccttcatcccttggtgcctgccgcacactgggaaccggcacaaccactgggctggctcttacgggcgtctggagtgggatggtttcttcagcaccactgtcaccaaccctgagcccatgggcaagcagggtcgggtgctccacccggagcagcaccgggtcgtgagtgttcgggaatgtgcccgctcccagggctttccagatagctaccggtttttcggcaacatcctggacagacaccggcaggtgggtaatgctgtgccaccacccctggccaaagccattggcctggagattaagctctgcctgctgtccagtgctcgggagagcgcatcagctgcagttaaagcaaaagaggaggctgctaccaaggactagtgttttcacccagagccccacgtgcactgatgtttttaaccctttgagccccatcatttgaagtcttgtgctcagtgtctgtggccatggctgacactaagctgtttgtatgaggtttgttttgtgaccaagctgtgtagtactttgtgcattctgaattttaaggtttttttttttgtttggtttggtttggtttggtttttttcttatcctgtattctatcagata

SEQ ID NO: 21072 - DNA, 2302 bp, Oryza sativa
  Clone ID: TF_OsC5082_1
atggggcggcggcggcgattcgcgcagctcgccaccaccagcgacgacgacgacgacgacgcccccgccgccgacgcgccgcccaaggcgaagcccccgccgccgccctcctcctcctcaggccccaagaagccgaagcagcgccgcctttcctccgcggcggccgacgacgacgacgacgtcgaggaggacgacctggagctcgaggaggaggaggaggacgagaaggatctggaggagatgcggaggaacgaggaggaggagcggcgggaggagacgcagacccgccgccgccgccgccgccggggccgcaagcccaagcgccccgccgaggagagcgaggaggacgaggaggaggaggaggaggaggccaaggcggaggaggcccgcgaggaggagaacaccgaggcggtccccatcggggagcccgtcaagatcaccggcagggggaagaagcagcgcaagcattacacctccttcgagtacgagggcaacaccttcgagctcgaggacccggtgctgctcacgcctgaggatagcaaggagaaaccttatgtcgccatcctcaaggatataacagaaactgagggaagcttatcagtaactggtcagtggttttatagaccagaagaggctgacaaaaagggtgggggaagctggaaagcaagtgacacgagggagttattttatagtttccatattgatgatgtgccagcagagtcagttatgcacaagtgtgtagtccatttcattcctcaacataagaaaattcccagccggaaggaacaccctggattcattgtccaaaaggtctatgacacagttgcgaagaaactttggaacctaacagacaaagattatgaggataacaagcaacatgagattgatcttctcgttaagaaaacaatagaccgtattggacagctttctgatattgaacctgcagatgctcctggtgacaacaatgatcagctctcaaacaagcgaggactgcggaagagacctgtgcttcctatagatgtttcaagagatgatgctttagcaggcaaatcagagcaatttggaaaagcagagacacctggaagtgataagctaaagaattatgccacccttgtcaagtataaagctgttactggtgatcaatatcgtgataggtggcttgataaattagtggatactattccactaacatcaaaggaaagtgctggggcttctcatgctgatcctggtggtgctaccaaaagttcaactaatggttcatctgcaaaggaagacaatgaaaaatcttattcacctgatgtgattgtttcaataatggcctccttagaaagatctacttatgaagctcttggttctgacttccagaagtataaccagaaattgagacagttactgttcaacatcaagaatagccctgtactacggaaccggctgatgaacaaggagcttgatcctccagtcctgttaacaatgtctcctgacgaactaaaggttggcttgacagcagcagagagaacatctgaacctgaagaatcaaggaagttgcagatgactgatgcacgatgtgtaagatgtgcagaaaaggaagtaggtgtatctgatattattcatgctggtcatggagatcgctatcagaaggtggtggcatctagaagagagaacgaggtcgttaacgtaggtggcgataggaccttgaggctagcgaggctagtggccagtggtgggagcgtgggcacggcaccatgggcaacagccaagttcgatgtcatggagaagcagctcacgagcccacgggatcatcagccggacaagccgttggccgatgctctccacaagagcgcggcacccgtacatgcccacgctggagaagcagaaatcgttcggcaagcacaagccagacgagccctcgtcggcgccagcagctggccacgagtagatcagacggtccacacgcactacacctctcgtcagaactagtagctagctagacacgattagaagagcacgcgcacccacggttcgcatcgtcattagggagtttcagagattacgtgtacagatgtaattgtgttttgtatgtcgtgtactaccatctgagggaggctgagcagatcagacaaactctaggttggcatcctcctgtcgcctctaatcgtgtgttttaacttgcatcactgtcaatgcatttcagtgctgtggacgcagccggtactcctgtacatcgtgagggtgtcaatggatcgtttttggctactgctcatgttttgtgtgtgtaaaaaaaaaaaaaaaaaaaaaaaaaaaa

SEQ ID NO: 21073 - DNA, 3129 bp, Oryza sativa
  unsure (1)..(3129): unsure at all n locations
  Clone ID: TF_OsC6126_1
gaggnncgcncncnacgtcccgtgatctccaggtcaaagaaaaactggcaggagaagagaagaggagaggaggaaaagggaaataaataaaaaggagaggagaggagaagggaagagaagcgaagcgaggccttcttcgccgtgggaataattttgcgctcgggggatcttgatctgaggaggagggggttgttggtgttggggagagggagcgatcggagccagggcgcggatcgcaggcggtgagatttgtgttccgggacaagccatgagcagcgcaaccaccggttgttaaccaagcaacccccctgtaaattgaaagcaaccgaagcgaagcgcaaagaaatggtttttcagaagaggtcatcgctggagatggagtcgggaggcggaagccacgtcgcggagatgccgcgcgtccccaagtccgcgaggggcaagagatcaattcggaagaaggagagccagggtcaggtgatgtgcgcgttcgacctgctcgcgactgtggccggaaagctgcttgatgagggggagggttctctggggaacgcgagctcaggcaccccggccgtggacgcgtcgcccaaggatgtccgcgtgaagcaggagcagtgcgatgaggaggcgaagcatttcaagaatgaggtgatggatcaggatagctgcaatgagagtgcattggtctcccacattgcgtttcagcggccggtgaatcaccatgggcggaagggggaagatccggaggggagtcatgctgtgattgaggaccccaaggccaagtccgaggcactggacaaggaatcctcaatgataagctgcaccaaggctgaattgggttgtaattttgcagcgatcgctgataggtggtcgcctgaatccgtggagtcaggggccttcactggggatgcagctgcaatagcgatgccggctaccacatcaggcttccacaagaatgctccagatatgtataatctgctcgatccaatggatgtggatgtaaagccgcctcctttggtcagctctgacagcaccggcgaaatgccgttgtatggcaataaaattcgccgatcgacctctttcccgagggtccccaagggaggggcggggtttactgtagatagagatgaagatgatgatgataaatcttccgggtgcactcatccgagcaccgctactaacaggggtttcaggcccaattgtacagctggtcatagtagggtaaagaagttgctcgcctgtaagcacaggaaagttgctccagccaggatgcacaaaggagatctttcctatagtggtgagcattgtgagatcccattcaccttttccttttttgaggagcactgcattgatggcactcatattcaaacctgcttactctattcttacttgagttcgttgatcctgctagatgttgaccggaagccttctttccgcaacaagaaaatgtattatacacgacaaaggacacaaaggagcacattcaagcggaggaagatgtttgatcgtcattcagcccaagtttctgaagaatatgcaaaggcaaacacaaagtttgctgcaagagactcgcacgcggtttctttggaagcaaacaaggggaccaattcaacagcattccagaaatcacaagagtcaagtgactgccacgtaaaacttaggatcaagtctttcaaggtgcctgaacttctaattgagatcccagaaactgcgactgttggttcactgaagaaaactgttctggaggcagtaaatgccatacttggaggtggtctgcgtgtcggtgtgctccatcatgggaagaaagtcagagatgataataaaaccttaatgcaggctgggatttctcatgatgaggtactggacaacctgggtttttctcttgaacccaattgtgcaccgcatccgtcacaactctcacctcccgaagataatgaattcatggaaactgttgatactactgaacccctagctaggattgcacctgctgactcatcttccaagcatggtgaagttgatgcttcacaggagcttgcattggcacccttatcagcaaactaccaagggagtgatcatgactttgtgcactctcctgggggcatgtcttcacctgataaggcatccacaaactcgcgagctattgttccagttactcctgcagattccaatgctggggctatagttccagcaaacaaagcaaagaggtcacctgaacaagggcaacgccgaatcaggcgtccgttctctgttgccgaagtggaagcccttgtgcttgcagttgaaaagcttggaaccggaagatggcgagatgtcaaacttcgggcctttgataatgcaaagcaccggacttacgttgatcttaaggacaaatggaagacgctcgtgcacacggcgagcatctcgccccagcagcggcgtggcgagccggtgccacaggagctgctcgacagggtcctggcggctcaggcctattggtctcagcagcaagccaagctccagcctaagacgcccccgctggctgaggctctcctgctcacctaataacctgatctcagctaatggtctcttaggaaaccattccagcttttgtataaagtcagtcagtccattcaaaggaggttaaggaagatattagaaaaaaagatatatataaaaaggtacaagaaatattgaccgatttgttgtaatatctactcaccaattattctttcaagccagggttctctctccttgtgaatttaaccaaaggtatggggtatttctttggcaactttgtacatgatggtgatggaggaagaagatgatccatgaactgagatctgcagtgactactaactcacaatttttttacaattgtggtttaaaagagaagagattaaagcttcagattcttttgtcaattcaattcattcttttgttaggatgagaatggtgaaaagataaggagggatggatcattgcttccccttttttttttcctttttttgttatcctaggtgtactatgttttcttcaccaatcttgtagttatcttggtcccctcaaagttgtacttgatcattataacaaatattaaaaagaaattgtttattctccttcttaccccccttaaaaaaaaaaaaaaaaaaaaaa

SEQ ID NO: 21074 - DNA, 457 bp, Oryza sativa
  Clone ID: TF_LIB3431-053-P1-K1-F4
cgctcgcgtacacgctcaggctcacggcgagcatctggcccgagcagccgctttcacagccgctgcctcacgagctgctggacagggacgtgtatggtcatgactatcgggctcagctgcaagctaagatgcaccctatgactcccgctctggctgtggctttactgcttaccttataacctgggcttatctagaggccatttaagataccgtatcaggtctggcataacgtcagacggtggattcagaggaggttaaggaagatgttatatataaagaggtacatgaaatggtgcccgatatgttgaccgatctgctgacctatctacttaccaagcctgcgttctagctaggggtgtatctaactcggagtatagccaatggtatggggaacttctttcacaactgtgatcatgagaggaatggatccagaaactgatacatgaactgacttctg

SEQ ID NO: 21075 - DNA, 2961 bp, Oryza sativa
  Clone ID: TF_OsC1905_1
ggaaaatcctcgcttcttctcttccacggggaaggtctcctccaatcctttcccctctccctctcctcctcctcctcctccctgcgccttccacttgcagcgattcctcctccccgcccgctcttctcgaaccttctggaaccttcccccatcccccacaagaagcagcagatgggcatcgtcgtcgtcgtcgtcaaccaatcctaggcgacgagcgctgcggcggcgcgcgccatctgctcccctccgccgtgctccggtgctccccgatctgcgcctcccgctccggttggtcggctgtcggaacacgcagctgcaaaaccctagccgagctgcggcgatctcaacgctggcggcgaggccctcctcttcgtcggcgtcgacggaaaaatatggcgcatgttttatttacttccccttgctgtcactgaacacatttcctaaagtcaaggacaagacatggtgttgcagaagaggttggactatggatcccatggccatcgtgctcccattaagccacgtgtcgcaacattggcgccggttaaacgctccacaagaataaggaaaaagcagatgtatgcacttgatttgcttgcgacagctgcagaaaaattgttggctgatcaagacaatttatctagtggacctaacataaatgaaacaccagaaggttatgttacaagcatgaaaccagttaaagcagaacagtttgatgaagcgtttccgttgagaagcgtggctgtgaaaaaagatgactgcaaaggttgtacagtaggctgtgcaggcatctgtggctttctcagacaagctaatatgtgcttggctgaaaactcgtcgactcaaaatctagctgattcagtactagagtcactaacagcaaagcctgatgtgttggctaaggactcatttgttagcagtaaaaaatcatgtcgattgggttttggtcttggcacaattccggagtatggatctgttggagtatgccaaccttggtccacaagatcagcagaggttaaacaagtgcatcgggcgagaccaacagcaatcagaagtcaagaagatagtgatgctgcagctctatgtgctttggtcgagaccatggatttggacaccaaacctcttgctgaggctagctctggtagtaactcaggagtgcacatctgcggccctgacagggggcataactcccatccctcgtgtttggctaaagtgcagcatgctgcagacagagatgatgacgaaaattcttctgggtgtgtacatccaagcacctcaggaaataaccgtggttatattccacattatataggtgaccgcaggataaggagattgtttgcctccaggttaaggaaggcagctcgcaacaggatatgtggagagatgtcttgtaaaggtaacaagctgagtttgtgtgaaaagaagatgcccactacgcgccgaagagtgcaacaaacaactttgaagaggaaaagacttgctcaactttactccgaaaaatcatctgatgaagtcaagttaaccatcaaatctttcaacatccctgaactactaattgagatccctgaaaatgcaacagttggttcattgaagaaaactgtgtcagatgctgttactactataattgaacgcggtctccgtgtcggtatacttcttcaaggaaaaaatattcaaaatgacaacaagacgcttcgtcaggctgggatttaccgtggtaaaaaactaaatgacataggctttactctggaatgtgaagctgggcaagattctcaccctggtgtaatagtgccagaagaaatggattttgttggtgcatctgttgtggacaagtctgctacggtgaaatgcgaagaacctgctgagaaccagcagcttatgcaagattttccaggctgcagcttgagtgatcctggttctgttgattatcccgtggaatggagcacacaagaaacatcagcaagctcccaagccatcgtcccttttgcagatccaaactcactggcgctggccaatgtgccgctttctaggtcaaagcgaccagattttgggcaaagacggataaggaggcctttcactgttgctgaagtggagttgctggtggaagccgtcgagcaccttggaacaggaaggtggagggacgtcaaattccgcgcatttgaaaatgttcatcataggacctatgttgatctgaaggacaagtggaagaccctggtgcacacggcgagcatagcgccgcagcaaagaaggggagctccagttccacaggaactcctggaccgtgtgctcgccgcacaggcctactggtcggagcagcaggcaaagctccatggcgatccccctgttcctgaaatctgccctacctgatcctgatgatgattgatggagaaggcaagaatggccctcgtgtacaaatcggtgtaaaaattgttcagaagggattggttggttgacgtttgattgaaatttgtcgacagttgaaaactcacaacttggtccttcctactgttggttcgttaacaggaggaggaagaagaagaagaagaagaagaagaagcttatttgtaaatttcagcagagtttactgtctttgcaaaaatgcaagtcgttttggacaagttgagctggtttttgcatttgcttggacgtgatcctggctgggccgttgtgatgatgaggtgaggcccaagcccatgaaacaagatgggctttgtcatcgtgggaagcagaccttggctgttacggctgctgttgtctttatctaccggcctggccttcttatccaactgcaactaacaccaaccggccagctgccgtcaggcctgacgtcagcacaagcatggaagcagacgaactccacgtttagctccatcagaccatcaccattcggcgcggattctcgattagcatgtgcactcgtatcatcacaattagagcaagttcaatagaatagccaaccgttggctc

SEQ ID NO: 21076 - DNA, 1851 bp, Oryza sativa; identical to SEQ ID NO: 11363
  Clone ID: TF_OsC47793_1

SEQ ID NO: 21077 - DNA, 1817 bp, Oryza sativa
  Clone ID: TF_OsC156600_3
atgcagtcgaggtgcccttccgccgccgtgttcacccccaccacctgccgcctccggttccgcgtcctccaccgccggttctccggcggcgtcaccgccgagaacgaggacgccgacggcggcgaggaggaggaagaggccgacgccgccgccgtcgccggctgggtggaggaactccgcgagctgcgcgtcgccgagctccgccgcgaggtcgagaaatacgatctctcgatcgggtcgttgcaatcaaaagtgaaacggctcaaggaggagagggaaaagagcatctccggcgagacgaagccgccgccggcggcggcggcggtgaaggaggaggaggaggatgtacggaagggatcaccggaggaggccggcgccgtggaggacagggtctccggccacgaatccggccggtcatgcaaggagtcgaactcgtcagatctgaagcggccggagaacgaccccgcggtcgccgacgacgacgaccgggaggcggaggaggaggaggaggcggcggcggcgcccgcggccggcgacatcgccgtgaaggaggaggcgtcgggcgagtcggtggctgggtcgaaggaggcggacgtcgagaaggagagcagcgacgtgcagagctccgccagcccgtcccgccgccggcgacggaagggcggaggcggcggcgaagaggcggaggcggcgtcgccgtcggtgtccgtgcccctccccgccgccgaggccgagccgctcgtcgccttcctcgagtcggtccggaccagcaaggccggcgccgtgttcgagcggcggctcgatagccaggatggggagaggtacagtggcacgatcaggcgccatgtggacctggagacggtcaggtcgaggctggtgggtgcaacggcggcggcggcggcggcggcgtgctacgcgtcggcgtccgagttctaccgcgacatgatgctgctctgcgccaacgcgctcgtcttcttcccgcgcggctcgccggagcacgccgccgcgctccagctgcgcgcgctcgtctccaagcaggtctccaaggaccggcagcctcacgccggggcgaaggcccccgcggcggcggcggaggaggaggagaagaagaagccggccaaggccgacgccgacatcgctgggccgctgctcgagaaggcgccgatcatcgtctgccggaagcggagctccatcgcgaaggccgcggcggcggctgccaagggggagaaggcggagaaggcagagacggacaagaaggagaaggacggcagcgaggagaagaagaaggctgcggcggcagcgacgacggcgacggcggcggccactgccaaggacaagaaggctcggggcatgaggacgaacaagagccggggacccgcgaggaatcagaagacggcgaagctctcggagaccggcgaggggaccaagaagtccgacaagaagggcggcggcggaggcggcagctcttcggcaggggcggcggcgggcggggttgccaagaagcgaaacgccgtggatttcctgaaccggatgaaccagaacggctcgccgtcgacggagagggtgtcgttgctggagacgctgaagctctccgcggcggcgacggagcagcaggagacagtcgtcgtcgtcgtcatccgggaagggcgacggccggaaggaggccggcggctcaggctccaagaagggcgccgccgcctcgacgccaccagggaggaggatcggtcggccaccgaagcgggcggccgcgccgccgacgccgccgccgttccaagagggccaaggacgacaagccgaccaggaagcgcgggaagaagtga

SEQ ID NO: 21078 - DNA, 1485 bp, Oryza sativa
  Clone ID: TF_OsC84045_1
atggtggtggtggtggtgggaggcggaggaggaggaggaggaggaggaggggtgaagaaggaggagggggaggaggaggcgaggggaagaggaggaggaggcggcgtggtgggagggtgggggacgtgggaggagctggtgctgggcagcgccgtcatccgccatgggggcgttgcgtggggcgccgtcgccgccgaggtccggtcccgctcgccgtgcgccttctcgcctgaggaatgtgaagctaaattttcagagatacaagcacgctactctgcatgcgatgcttggtttgaggagctccgtaagcggagagttgctgaattaagaaatgatctgaagaagtctgaaaattttattggatccctgcagtccatgatcaaaagcctcagcaatagcaagcatgatgatggcaactctgaatgtcacactagtcatactgagtcatgttcaaataatgaaaatacagctgataacaattcatcaagctaagcattgtccaaagatagatcatctgctgctagttttacagaggaagaaagcgacagtcagaactctgataaggtgcaacactgcgatactgattcaattcaagtgaacaatacttcagcagaggctttggtaaaaccccttgttgaaaaaaaggtttgtgctgaagatggtttgctttggggctctagaaagaaaagggccgtgagggataggaggacttttctgatggctgataatagttgcagagctggcgagaatacatctacatcacacatacagacagatggttcctctgaaggctatgcaaagaagggcttgaaaactccaaatctagaatctggtgtgtctgtcgttgagaaagcaaaaccaaacttggcagagattttgaaaactatatctactcaaagtgactgttatatgttgcaacgccgacttgatgtccagcggaagcggactagatacaagaagatgattcgccggcatatagacttccgtatccttcattcaaagatcaagagtggcgcaacatcttctaccaaggagcttctaagagacattctactgtttgtgaataatgtccttgccttctatccaaaggctacgttagagcacatggctgcaattgaacttcgaaatattgcattcagaacagtgcaagagagcgcaagcatgccctctaagagttgtggagtaacaggagcagcaactgcccctttagtgaagaagaacacccgacccgtgcagcctggaagtcatgggcctcatgatgcaaagagaagcaaagtttctttaaaggggactggaagtactgtcaagcagggtgaggccaagggatcgcgtggtggttcatcagtgacagctaatgtaaaaactatgcagagaaatccaccggccaagaagagaggcgttgggcggcctccaaagaatgggcagaagcgtgctgctgcacagcaagatagccctaacaaaggcaggaagaggacccgacgctga

SEQ ID NO: 21079 - DNA, 675 bp, Oryza sativa
  Clone ID: TF_jC-osleLIB3474035c11b1
caccgtctctctcgccggcgaagagaagggggaagcgcggctgcggcggcggcggcggcgcgcggcggaggtagggcttgaggtcctgaggtctctcctccgtctcgatctgcctcctaaccccgaagcgagagggattttgcgcggggagggtgggggtccgtacagcccggccgccgtatcccggggtggcgctgaggctgccatcagcttgcctctatctgaatcttctggccctgaaaagaagctaaaattatttttctttgtcaagaccaaaaagtatttattcaaaccaaacactatgaccacacaagcttgtaagaagagaagagcagtttatataagcagtgaatcagaagactctggtacagactctgaggttgagggaagcaaactctccaaaaaagatggggtcacgtcagtctatacatgtggtcaccagccaacctctaagaataaggttgatccgatgaatactagcaagtcaaggcagtgtggaagtattctgaagaagctcatggatcacaaaaagggatggatttttaatacaccagttgatccagtggtatatggaattcctgattactttgatgttattcgcaatccgatggacttgggtactgttaaaaggaaactcacaagcaagcaatattccaacccttatgagtttgcagc

SEQ ID NO: 21080 - DNA, 1677 bp, Oryza sativa
  Clone ID: TF_OsC18330_1
tcaacctcgtttcttcttcttcttgtcaggaacatttggagtggtaggcgtcactttgaacggttgggaggacgagccggcgaactggctgaagcccagctgccggccggggatgaccagcttgggcggcgcgaatggcccgaactcgacggcggctggcttgctggcactgcccttcttcttccctggcttggccgccgttacgccggccttcgcgccgccgtcgtcgtcaccggctctggtcacagctggtttctgatcgtgtccctgctttgagctgctctcctggcgctcatggccgagcactctcctggctctctccatgaacgccggcctgccgatcagcacgaggagcttgagcacctcgtccgtcttcagcctgcaccgcggtggcgccttgttgccggcagcgtcggcagatgatgcagcggcagcgccgccgcctccgaacgccgcgctcggaggagacggcggcgggcagcggccgttgcgggaggaacgacctgctggccgtgccggcgccggagctggaagcgaaaccacagttcggcagtagcccggcgccgggcgggcctgcctggcccgtacgtcgcactcgaggttcctgaactcggcggcgacgcgcgccttaagcccggcgtgccggacgaatcgccggaggctatcctggtacgtgtgcgccgccgtctgcggccggtaaacgagagtggcgtgctggccagtggagacgacgggcactggccgccagccgccgtgatcagcctcgtcggcgtaggctaaccgtctctgctccacggtggcgctggcgccggcgccaccgtgctccgccgtccccggcgtcaccgatgcagcttttcttgctcttcttcccggcgcaccgttgctctccctcgctgcccgctgcctcgttgtgctcttaaccgaggtggcggcggcgacagcgccggttttggcggcgatcttcttcctcgccggcgcgctcggccgctgtggtgtggtcggagcggcgccgccggcgccggagccggagcctactttgctgccatcgaatttcccgtttagcttggccggcgactggctcaccagatttttctggcgccacgctgcgagctctgactccgagtacatctggttgctcttcagggacaggaatacctgcttggcttgatgtagcagtgacattgcctctctgtaaggtatagtgtcctcgctgtttatggacattgctttctggaacaccatgtaaacatcattctcgaattgctccagtgtgttgtacatgccatccttgttcttctgccttaatgttgcaaagtcaccgggcctgttcacccgttctgcataatcagttacttggatgtcatcaggcattgcaaataactcatgagtgtctctcatctctagtgtatcaagaatgtactcaatgatttgtactgctgaacttttgcttgacaaattattgatatcggttgttgcacacagtgcttggctagaagaagcttctccctgcaaatgctggatttcttcattcctttttctcttccctcgaacaccagcaatgctgtttcggattatctgccaaggatctaggagacaaccagtggcagtagtgtcatcgttcttctgctcttcaagcttcagtaatctagcacttcgcctcttcccttttccagacat

SEQ ID NO: 21081 - DNA, 883 bp, Oryza sativa
  Clone ID: TF_OsC76474_1
aaagaccattaacattttatcatttttattgatgatttacggggtctatacacaacgaataacacggtagtgcattttacactaccagctttattttttaacaaggcccttgatgttccttttgtcgaatcggtaattgatttttcttcacgaagatctaatgatcagaagcgttagttaaaatcaacttgggcaagcaaaacaatgcattaaatagtgttaagctgttgagcatcttgaaaactactttagtattcctctaacaaaattttccgcagtaacacctgtagaatcatactgtggctgcgaggcaaattctgcttgcacaaaaagaagcctgttaactgggcactaaccatcaagcaccactctacaatgatgaaaaggtttgttcgatccaatcagatagcctccgaatttttttggtcatatcagtgctctttgagaaataagactgggcatttgcaagcatcacagtcgcatcatgtcgaatagcttccagagttctgtagtaattgttctcaagccttatcctaatcacctcaatggaaaactggacaggaaacctgttaatgaaatctgatttctctgcaacactgttcaacttcagaacgccatagcgatcctgatttctgtgagacaattcgagtaagttgtccaactctgatagcaatttgtcctttataccaagatcaatgtgtggatgtttccatgggacccacagattaccagtatcatggagttcccaggggctatgtgggtgatcagaaccatcattcttatactggataacatatttctcccatggactctcaggaaaatcaagtgatttaggttttacggctgatacccttccttcccaccaacttcccggacgcgtggg

SEQ ID NO: 21082 - DNA, 659 bp, Oryza sativa
  Clone ID: TF_jC-osflLIB3477P007b02b1
caggaaccccatggatcttggcaccgtcaaggagaacctcgccttcgggaggtacccctcgcatgaggcattcgccaccgatgtccgcctcaccttcagcaacgcgctgcggtacaatccggccgaccaccatgtccaccgctacgccagtaacctcctcgccaccttcgaggggttgtacaaggaggccttgtcctggttcgagcaggagtgccagcgtctcgagccgccaatgccgctcgctttgccgccgccgccgcagcccccggtgcctatgccgatgcaggcgccgccaaggattgggggtggggggaggaggccgaagcccaaggcgagggagcccaacaagagggagatgagcgacgaggaaaagcacaagttgagggtggagatcgggaatttgcccgaggagaaaatggggaatgtgctacagattgtgcagaagaggaataccgatccggcgctaatgggagaggttgttgagcttgatttcgacgaaatggatgtcgagacgctgtgggagctcgatcgatttgtggtcaattgcaagaaggcgctcagcaagagccggaggactgtcgcgatgaacggtgatgctgttgatgcgactgctattgttccaattgaggacgataccgtgcaagtggatgtgcatcatc

SEQ ID NO: 21083 - DNA, 366 bp, Oryza sativa
  Clone ID: TF_LIB3434-060-P1-K1-C1
ggcaacaacttactaatctaatgcgttcattgttgaagaatatgaatgagcatcctgatgcttggccattcaaagagccagtggattcacgtgatgttcctgactattatgacattatcaaagatcctattgatttgaagacaatgtcaaaaagagttgagtctgagcagtattatgtgacgctagagatgtttgtagctgacatgaagagaatgttcagcaatgcaaaaacttataactctcccgatacaatctattacaagtgtgcctcacggctcgagagcttcttctcaaacaaagtagcatctcagcttgcccaagcctcaacgaagaactgacatggtctttggtacatctgatatagtc

SEQ ID NO: 21084 - DNA, 3577 bp, Oryza sativa
  Clone ID: TF_OsC51154_1
cggacgcgtgggccgcttcgaaacccccgacgcgaaggaagcgagacgaaaccctcgcgcgagccgcctccgccaccgccgcctccttccgaccagccgccgccgccgccgccgcgtcgccgaatccgggcgggggctaggcgcgggctccccgctccccgccgatcgaatccttcgagggagcaatggccggcgtggtgtggatgaggacgtgaggtgggagcgatggtggggatggaagggaagggggatgcatcggtgacaccagtgaggactagtgaccggctgcgtaagcggcccaagtacttcggtcgcaattatatgtactacaatccagccatacgcaagaagatgaagtctaagaagagagcggctgcatcacagattgccaagaagctgcttcgcaagtcagctgccagggcaccgcctgctgatagtgcacttgagataattgagagggttgatagagtgatattggatttgcttggtattattgttagtgtttggtcaaatctacgtcgttcaacacgaaagcgaagaatgtctgtaaatctggaggactatgacaccgatagttctagtatggaagatgatgatcttatgaggcccagatatcgatcttcaaagaataaagtggatgacgaagtgtcagctaggccaaagcgcaagaagctgtccaactctagctccattcctcgccgtgagggtttacggcctagaagatctatccgaggacaaagacttcatccataccaagaatctgaggatgaccaggaaagctctgaagaacagcctgcacaagataggagggaaaatggtaatgatatcgaagaggatggcaatgaggaggaagttgatggaggtgatgaagctgaagcggatggagatgatgaagatggtgaggaagaacaagaagggaggaggagatatgatctcagggatcgttcagaagttcgtagaccctccccacggaaggaagggaagcacagaacacaatcaccccgtagagtactagtacatggaattggtccaaagaacagcaaatatttgaaaaagggtggttcacgcatgcataagcgccctcgattctcattgccagatgattcagatgattctcttcttgtggatgagccagatgaaggtccatccatgccatggatgcgtggtgggagaggaggtatgccgtggtttttaggtggattggatatgcattgtccaggagcatggggtctgaatgttggagcatccggttggggtcatcagggtgacaacacagtgagtacttcttcacttatgccagggatccaaactgctggaccaagttccaagggaggagctgatattcagcctctccaggttgacgggagtgtgagttttaatgatataggggggctgtccgattacattgatgcattgaaggaaatggttttcttccctttgctttatccagatttttttgcaaactatcacattactcctcctaggggtgttcttctctgtggccctcctggtacagggaagacattgattgctcgtgccttagcgtgtgctgcctctaaagctggtcagaaggttagcttttatatgagaaaaggagctgatgttcttagtaagtgggttggagaggctgaaaggcagctcaagctactgtttgaggaagctcagaagaatcagccatcaatcatattttttgacgaaatagatggtttggcacctgtgaggtctagcaagcaagagcagattcacaattcaattgtttctacattgcttgctttgatggatggtctggattcacgtggacaagttgttttgattggagcaacaaaccgaattgatgccattgatggagcattgcgtaggcctggccgatttgatcgtgagttcttttttcctctacctggttatgaggcaagggctgaaatactggacattcatacacggaaatggaaggaccctccaccaaaggaattaaagacggagcttgctgcaagctgtgtggggtattgtggagctgatttgaaagccttatgtacagaagctgctattcgagcatttagggagaagtatcctcaggtctacacgagtgacgataagtttgtcattgatgttgattcagtcagggttgagaagtaccacttcttggaagctatgtctacaataactccagctgcacatagggggtcgattgtgcattcaaggccgctgtcaccagttatcgctccttgtctaaaaaggcatcatgaaaaaataatggaaagaattgctgatattttccctttcctatcatcagtagatgttagcaagttctctgccctttcctatggatcatccatccctcttgtttatagacctcgacttttgatgtgcggtggtgtgagtgttggactggatcatgttgggccagctgttttgcacgaacttgagaaattttctgttcactccttggggttgccgtctcttctgtctgatccaagtgcaaagacacctgaagaagctcttgtgcacatttttggggaagctaggagaacaaccccgtcaatactgtacttgcctcagtttcatctttggtgggatacggcacatgaacagcttagggccgtgttgttgactttgttgaatgagctgccatccaaccttccagttttgttgctaggaacctcgtcagtggcctttggtgaccttgaagaagagtgtgcttccatattttcttctcgtaatgtatatgaagtggatcaaccaagtgatgatgatagaatgagatacctgcatgcactgtttgagtcattgctctcatttcaaatggaagagtctaggagtaagtctaaagaccagaagtcttctgttgatcttcccaaagcaccaaaggaagtggatggtcccaaactttcagagctaaaagcgaaggcagaagccgaacaacatgctgttcgacggatgagaatgtgtcttcgagatatttgtaaccgcattctgtacaacaaaaggttcgatgtgtttcactgtccaaattctgtagctctgttctctgactatagatctgtagttcacaatcctatggatatggctactgtcttacagcaggtggactctgggcagtaccttactcgggcctcatttatgaaggacattgatcttatagtctcaaatgcaaagacatataatgggagtgactacaatggatctcgtattgtcagtagagcatgtgaactacgagatgtggtgcaaggaatgttgtcacagatggacccatctttggtgtccttttgtgataaaattgctgaacaggggggaccactacaggttacggatgatggagatagctctattcttcaagcagcgcctgttgctcagctggtatctggtactaggatgagcgcaaggcttcgtaatgtacaaccagaagtaaatctatcacgaagttatgaggcgttgaagcggcaaaagaaaagcaccgaaactgaacaaggcatggttaaagaatcgacaacaagagatgacaagtctcttggtgatgttgatttgtcaaagccaatctccccagaagaagctccaaaagaaccggttcaaatggtgttct

SEQ ID NO: 21085 - DNA, 1750 bp, Oryza sativa
  Clone ID: TF_OsC57969_1
tctccccccgatccgccgccgcctctcccgattcgccgccgccgttgacccgccacctatggcctcagggccgccgtcgtcgccctccagcaaggcgttctcccgcaaatcccacgcccacgcctccggccccaactcctccaaggcggcggcggcgggcggtggcggcgggggtgtcgcggcggccttcgatgctcacaacgggacgcacgtccgcaccgtcaccttctcgctgtcgtcctcgccggccgcccgcagggagctccgccgccggctcaccgccgagctcgcgcaggtgcgcgccacttgcaagcgcctcagctccctcccggcccccgcgccttcctccgcgctctccgccaccgacccttccaccccgctgcccccgcacccgccggtctccaagcacaagtcgaagaaggggaacccctcctccaacccgggcctctccgcggaggcgcggcggaagctctacgcgcccgtgttcaagagctgcggcgcgctgctcgctaggctgatgaagcacaagcacagctgggtgttcaacacgcccgtcgacgccagcgcgcttggcctccacgactaccacaccatcatcaccaagcccatggacctcggcactgtcaaatcgcggctggccgctgggcactacaagtcgccgcgggagttcgccggtgacgtgcgccttacctttcagaatgccatgaggtacaaccccaaagggcaggatgtgcacttcatggcggagcagctgttgaacatgtttgaggagaagtggccagaaattgaggccgaggtagcacagctgtcaccacagccgccaacgccatcatcggctgcacccaggaagccgaaggagatagataattctaaggtgttagagaggtcggactcaacagtacatgctgcggggatggaggccactccaaagcagaacactggtcggcccccagttttaaagaagcccaaggcaagggagcctaataagagggagatgaccttctgggagaagcagcggcttagtaataatctccaggagttgccaccagagaaacttgacaatgttgtgcagattataaagaagagaaacttgtcactcagccagcatgatgatgagattgaggttgatatagatagctttgatgttgagacattatgggagctcgataggtttgttacaaactacaaaaaaagtataagcaagaacaagcggaaggctgagaatcccgtggcagggcaggatgagatgaatcatgatatagagctagagaagacagagcatgcaaggttggatgaagtagagcaggatcagatgcctccagtacaagagacgttacataatcctgagccagaatcaattgatatcgaaccacctaaagaaaacacagcagatgataatgagaggtatgtaggctcatcatcacctgttcatttggaagatcagaagggggagaatgcgggtagatcaagtagttctggaagttctagtagcgattcaggctcttcgtctagtggtaaatgctctcatcctttgcagaaatttatattagcagcatttctgtttgcaattaactctataaaggatattttcatatacatctgcataacatatgaaatttaccgtgagaagcatatgcagatacagacacagatagttcatcagcagatggctctgatgctgcacagtcacccagaacgtaacatctataggccaggggatggctttggtacggtttatttggttttttaa

SEQ ID NO: 21086 - DNA, 2849 bp, Oryza sativa
  Clone ID: TF_OsC1956_1
atgacaccgacggtcctcatggagtttgggcagcaaaggcagattaagcggggctacgatgaaatggcgttccggggcatggcgtcagcggcgccacggggttacgcggagaccgttggcgagtcggagggcgcggcaggcagccccgttcgtgttgactccgaggactcttcggcccccaagcgcaagtgcatcagcctaaacagcgacggcttcgatgtcaagcgggagattttcgtcccagccaagatgtcctcctccgagaggaggcatctccggaagaggttccgcacagagcttgattcggtccggaatctcctcaagaagccggagtttgctgtccctgtccctgtcaatagagctcccgcgctctcgtcctcggctgcccctcgaggtaagaagggacagcgtggtaaccatgtggtccgtggtgccaaggggcgtttcttgcctacaaagccccgacctgaggcttccacggtgttgactgaggatgcgatttttaagcaatgcgatgctattctgaaaaagctgatgactcagaaatgtagtaacatattcgactccccggttgatgctgttaagctgaatattccagattattttcaaatcatcaagaaaccgatggatcttggaactatcaggaataagcttgactctggttcctacacgagtccatctgaatttgcagccgatgtacggctgaccttttcaaatgcgatgacttacaatcctcgtgggcatgtagtgcatgattatgccattcaactaaacaagatgtttgaatcaagatggaggacaattgaaaagaagctggcttccattgccacagaggcgcacgtcgaggttgacagggctgactcaaagaggaggaagactccccctgtggactgcagtgaggtgtcaacagagtgtgtgaggccaacagagtctgttagaccaacagagtctgtaaagccaaaaatgacattcgaggagaaagaatcatttgggaactgtttggcatctttgtctgaggatccggaggtaccttcacacatcattgatttgttgcagcaatgcattgacaacaacacagatcagcttggtgatggagagatagagattgatatccatgctgtcagtgatgacctactattcgagttgaagaaacatgttgacaagtatttgcaagagagagagcagagccagcaggcaaaatctgagccttctgagaatgaggctgctaatgtatctggccttagccactcctctacaaatccctgcaaaggtggtgatccagttgaggaggatgtagatatttgcgggaatgcatcccctatattgatagaaaaagatgcacacaacaatcctaacaagtgtggtagcccaagtagttccagcagtgactctggatcttcttccagcgattctgagtcgggcagtgacagtgaaagcgaacaagaaaaaggtggtagcccaggaaagccgaagggaagtaagagatctgaacaactggtggagcaagaaaagagtgatgttataagtccagtcgatgccatccgtcctgctgatgatgtggagctccgtgagcaggataacgagtcaaagcctgccccagagggggagaattcaaaacccgacaggcaagtctccccagacaagctcttaagagcagccctccttaggagtcgttatgctgatgtgattgttaaggcacaggggattctcagccagggtggagacaaacaggaggagctggaaaagctccagaaggaagagaaagcaaggctgttggctgaaggaaatgcagctatggaagctcgaagagctgaagctgaagctgaagccaagcgtaaacgggaccttgagagggagaaagctcgccaggccctgcaggagatggagagaacggtggaaatcaatgacaacctccatctaaaggatttggaaatgcttggaacggcaaccacagaacatattgtgagttctgttgatgagactagtcctgagcattcccaggatggcatgcccagttttcttcctggatcaggcaatccattggaacagctgggactcttcatgaaagcagatgaggaggaagaggaagaagatcctagcagtgtccccagcactaaagatgcagaggaaggagagatcaactagtcccagtgcttgtgggctagttgctgaattagctgtgcatatggtagacgctccttccttctgcttccaaactagctcgaacaaggccctcaattttgatgctgctggatgtcgtaaattatgcgcctggagtatcgcggtaacctgccctacaaatcatcatatgtgcttggaggacggcacagccataatggccgcgacttgcggtactccgagctgttgtcgggtgtatgtatgtagccatctttgaagtgccatggccaggccgcaaggtgggtaagcaatgagaggaccaaatggttctttgcacatagtgaattagtgatccaggtgctaaagctcccagcggcaaaaggtgttgcccagcggcttatagatttttcgttcgttcttctctagttttgggtttgtccaattgcttcctgctgtaaattcgaattttgatgtagtggaggaagcgatagttgtttgctgggcatatgggcaaataggaaaaagcttctgcttttcttgtttacagggaaaaaaaaaagaaaattcatgcgtcttttagcgcaatttgttgtctcctgtcagatgtttgtcgactgtttgttgtggatgttcaatattctcaatacacaagatatttcttgtctttcctcaaaaaaaaaaaaaaaaaaaaaaaaaaaaaaaaaaaaaaaaaaaaaaggagggcctcgtgc

SEQ ID NO: 21087 - DNA, 2205 bp, Oryza sativa; identical to SEQ ID NO: 11368
  Clone ID: TF_OsC1956_2

SEQ ID NO: 21088 - DNA, 6196 bp, Oryza sativa
  Clone ID: TF_OsC48901_1
atgggcgacggcgagcgccgcgaggacgagaacccgaccaccagtgccgcagatgacgatgatgatgaggattatgatgaacctggtggagggaatcacttcttgggcttcatgttcggcaatgttgatgattctggtgacttggatgctgactatctcgacgaggatgcaaaggagcacctttttgcactggcggacaagcttggcccatctttgaaagacattgatctgatcaagccttctgcagcaccaactgatccttctgagcaagactatgatgcaaaagcagaagatgctgttgattatgaagatattgatgaagaatatgatggacctgaagttgaagcagctacagaggaggaccatttgctatccaaaaaagattacttctcttcaaatgcagtttatgcttcggtcaatagtaaagtttcagtgtttgatgaggagaactacgatgaggatgaagaaccaccaaatgataatgatttgcctagtgataatattgtgcaaaactgcacttcagcttcagctgagcaactggatatggcaccgtcaaatgacaaccttgctgttgaaaagatgtctagttcgttatcagaaccagaagaaagttttgaaagtgaagcttttcagaaagaaatggttgctgaagagcaacttgagtctaaaactgcaacttccctcccagttttatgcatagaggatgggagtgttatattgaagttctctgaaatttttggagcccaggagcctgtaagaaaagccaaaatggaccgccataagcgcccagtgaataaagagctccagattacaaatttcacagatattgttgaagaagacgaggaggtatttctacgcagcactattcaaaatttgtcagctttgaagcatatcaagacgaacgataattttgttgagagtgacagtgatgagtcaacttcagatgttgccttaagactgaaagactcgtgcctttccgaacaaccgatgaaagataaagatattcctactgctgtacaatctccagttttccctgatttttatccactcgagcatgaaaattgggaaaatgatattgtttggggcaattcaccaacaaccgcaattcagccttgcttaacaagctgtgcaatatccaaagaaagcttggatgaccacaatgaagaccaggccgagggttatgtctctgggtgttgggatgtacagaataaatttcatagttcttcagtaatggcagatccttttgggcatacagaaatacctgattcaactagttaccgttcccctgagaacagctattctccattaagaaaggagactgctcaggagaataacagcttagatgaaccaaataacataactcaaccggttaaaatcgacaccacacggcatttaaacaagctctctttactgaacaaggagttgttagaaggatcttggttggataacatagtttgggatcccagtgaggatgtaccaaagcccaagctaatctttgaccttaaagatgatcacatgctttttgaaatattagatgaaaagaatggggatcacctccgctctcatgctcgtgccatgattgttactcggccaatgaaaacttcagcagtggaaaatgttgaccataacaatcaagcaattgcattgagtgggagattcaacatttccaacgacaaattttattctaacaggaaaatgtcgcagcaagctagatctcatgctaaaaagcgtgctacaatgggcttaaagttggtacattctgttcctgctcagaagctccagaccatgaagccaaagttgagcatcaaagaaatcgcaaacttccatagaccaaaagctaagtggtatccacatgaaaataaacttactgctagatttcaaggagatgagtgcagtcatgggccaatgactgctattgtgatgactttgggaggaaaaggagtcaaatttctggtcaatgcagaggaaactccactttctgtaaaatcaaaagcttccaaaaagcttgaatttaaaccttctgagaagatcaaattgttctgttctggaaaagagcttcaggatgacatctccttggctatgcaaaatgtgcgaccaaactctattctgcatgttgttcgcactgaaatacatttatggccaaaagcacagagattgcctggtgagaataagcctctacgtcctcctggtgcattcaggaaaaaatctgacttgtctgttaaggatggacatgtatttttgatggaatactgtgaggagaggcctttgcttcttgcaaatgcaggaatggctgcacgactgtgcacgtattaccagaagacttcaccttctgaccaaacagctacatccctgcgaagcaacagtgatggactgggtacaatgcttgctattgatcccgctgacaaatctccttttctggggaacattcgttctggctcccaccaatcatgtcttgagacaaatatgtacagagcacctgtatttcctcataaggttgcgacgacagattatcttttagttcgttcacccaaagggatgctttctcttcgtcgcattgacaagttgtatgctgttggccaacaggtgaaaaagtcagtctcctggatttatcacagattgactagaagggcaactaatttcaaaattttattctcctggcaggaacctcatatggaagtattttcacctgggacaaaaaatatgcagaattatattctgaatcggattcttgtgtatgtatatcgtgagttccgtgctagggagaagcctggtattattcctcagattcgagctgatgaattacctattcagcctcctataacagaggctattaaaggaccaaagggacatttgttctatattcagagacctgattttcggattccatcggaggaagaactgagaagattattgacacctgaaaatgtctgctgttatgagagtatgcaagctggccagtatcgtctcaagcacttaggaattgagaagcttactcagcctgtgggacttgcatctgccatgaatcagcttcctgatgaagctattgagcttgctgctgcagctcatattgagagggaattgcaaatcactagctggaatcttaccagcaattttgttgcttgtacaaaccaggacaaggaaaatatagagagattagaaattactggtgttggtgatccatctggccgtgggctaggatttagctatgtacgagtaactccaaaagcacctgtatccaattcaacacataagaagaagtcagctgctgcaaaaggcaccactgtgactggaacagatgctgatctccgcaggttgagcatggatgcagctcgagagttgctactcaaatttggcgttccagaagagcaaattgacaagttaacaaggtggcatcggatcgcgatggtgaggaagctttcaagtgaacaagctgcatcgggtgttacaatggatgaaattccagttagtaagtttgcacggggacaaaggatgtcttttctgcagcttcagcagcaaactaaagagaaatgtcaggaaatttgggacagacaaattcagtcactttcagctatggacggcaatgaaaatggcagtgacacagaagctaacagtgatcttgactcatttgctggggatcttgaaaatttgctagacgcagaagaatttgatgatgaagatgttggtaatacagacataagaagcgataaaatggatggaatgagagggcttaaaatgagaaggtgtcatactcaatcccaaattaatgaggaaattcaagatgatgtagcagaggctgctctagtagaaaaactgcttgaagagagtgatagtgatatgaagaggaagaagcagcctgtggaaactacaaattatagcactcctatgtataatcagggcaataaaatgaagcagggtaaggctggccaaatgattaaatcgtctgtatatgccggtgcattaaccccaaaagagagcataccaagagaagccaaggaggttgaaaattttgctgaaggaagtttaccctcaaaactaagaacaaagacaggatttgatgcaaatgatgatattattctagtaaaaaggaaaaatatcccaggaaaggatgggttcaaggaaaagagacagggtgcaaggggagacactcttgtatgtggagcttgtggtcagctcgggcacatgcggaccaacaaactgtgccccaagtacggggaggaccctgaaacatccgaaatggatgtcaattccatcaggtctcatcctcctgatattgtgagtaatgctcaaataaaaacatcaaacaagaggttggtagcaaaagtttcgtctgaagcttttgaaactgaaggacctgaaagtattgaaaaggctaaacctgtccctgtaaaattcaaatgtggagcacctgagaagtcattggataggaacatgtcaatctcagcttctttggtttctgataaacgtatgatggatgctacagattcgaaatcaactggaaaggttaataagattaaaatatctaacaagataaaatatgatgattatcctcctgatactcctaagccatctgttgtaataaggcctcctgctgaagtggagaaggatctacctcgtaagaaaattattatcaagcagcccaaggtgcttggagatcagcaaagacctactgaacttaggagtggtcaggagcccagaaagacaaggaaaattgttgaattgtcaagctttgagaagagagacagagaggatgataatggtttttctggacaacctattcagatcaattcctcacatgatagggggtggggtctggtgggaaaaagaagcaaaggaataatggaaagtagtgaatcctggagagcttttgaggagcaacgagagagacaagaacagagactaattgaagctaggatatatgatgcaaggagagaggatgagctccagaaggcaaagaagaaaaacaagaaaaagaaaaaacatgaatttcgagatgatgacctacttgatcctaggccatacaaaaatgacagaagggtacctgaaagaggtcgagcggcaaagagacgtaccccagctgatatgacagaatacacaccaccagctaagcggcacagaggaggagaggttgagctctccaacatattggaaaaaatagttgaccacttgcggacaatgagctgttcattccttttccgtaaaccggtgacgaagaaagaggctcctgattactttgacataattgagcgtccaatggatcttggtactataagggacaaggtgcgaaagatggagtataaaaatagggaggattttaggcatgatgtggctcagatagcactgaatgcacatacatacaatcttaaccgccatccccacatccctccgcttgctgatgagctcttggagttgtgtgattatcttcttgaggaaagcgcggatgtgctagatgatgcggaatacgcgatcgaggactagtgcacactaaccagatatggcatttagatcttgctatattctaacttagatgctgtaatgctgacctgtaggaggggggaagagcacctgtagaatttttcattttaggctctggctatggtatacctgggatccccaattccaactattttgcctcttgttggtattgggagttgggagttggaatgtacacaaactctaggttagacattgagggcccactgtaactattggcctcttgctgtaaaaatgtagcgatgtaattttttgtccatatccatggccttgggtgtctcaaattctgatgttgtagcattaaatcctatgtgaatggcatctaaccatatgagtcaaaggtgcaacacgtcaaagtatgtgctaaaggttgtacccggtctaacctgattggtgaaggtcccttcaaatcctgcatgattagaggcttaccatacaactatgcgaagtcaaaacctgtaattgtaactgtaacgtgagagatggtgtaccggcagtacaagttgtttgagttgctgccagatgatgatgtatttgatgttgcatgctttgaatgagtattcaccgctcaacgatatcattggatggtgcagttcatagtttcatacctttggtttttggtttgtgatgttgtagcaacagaacaacaagtaatcatccattaaacaatcaagtccctttctcctaaaaaaaaaaaaaaaaaaaa

SEQ ID NO: 21089 - DNA, 504 bp, Oryza sativa
  Clone ID: TF_OsC48683_1
atttatcctggccttttctagaaccagtagagggtgtcattcttaccatacctgattattttgatattataaaaaatcctatggatcttggaactattaaacaaaatctggaatctggaagttatactactgtaaatcaatggattgcggatgttaggcttgtatggagtaatgccatgttatataatcctcctggaaatgaatttaacacaatggcaaaaactttatccgatacatttgagaaaaaacttgctcagatggttcataaactaagttattcctcttcacagaaaagagatcagctacgtagtactctagagacgttagtagcacaatataagaattatgagtcagaattgggaatgctcacaaaacaggcagaggatgaagctagagagcatcctgatttgtctccccccatcaaaccaagttctgcactactcaggtcacctttgaattttaatgagaagatgaaattatatcataatatcaactcgctggata

SEQ ID NO: 21090 - DNA, 1752 bp, Oryza sativa; identical to SEQ ID NO: 11372
  Clone ID: TF_OsC105877_1

SEQ ID NO: 21091 - DNA, 2763 bp, Oryza sativa
  Clone ID: TF_OsC35984_1
atggcgaagacccggaaggccgcggccgctccgccacctccgcccccgcccccacccgcggagaccccagcgaggaggaaggggaagaagaaggggcggccgtccctcctcgacctgcagcggcgcagcctccgcctccaggcccaaaaccctagcccggccccgtccccctcgcggcgggacgccaatccgtccgacgaggacgacgacggggtcgggagtggggggcgccgacggcagaagcggctcaagagcgtcctctccagcagcggcggcggcgaggtcgggcgcgctccccccctcttacctgtcgcgccaatttttcgaaatttgcccgaggtttttgggggcctccccgaggagaggagaggggggtttttgccgtgggacacgcggcgatgcggttgccgtagtggttggatctgcgattttggaatttttttgaggggggtgggtttcgtggatgatgaggcgcccgcggccgccgtggtggtgaaggtggaggtggaggagaagaagaagaaggtctcgtcgaaagcgaccgggaaaggggacgctgcgtcggatggcgggcccactacggggactcccctcccggacaaaaagttgcttctcttcatcctcgacaggctccagaagaaggacacctatggagttttctcggagcccgtcgaccatgaggagcttccagattaccatgagattatcgagcatcctatggacttctcgacgatccgcgagaagctgttgaatgactcgtataccaccctagagcagtttgagaatgatgtgtttctacttacatcaaatgccatgtcctacaattcagacgacacagtctactatcggcaggcacgatctattgaagctctggccaaaaaggatttcgagaacctgaggcaagctagtgagcctgaagaagaacaacaacccaagactgtacccagaagaggcagaccaccaaaatatgcaaagaaaattgagaagactgaaaatgatgtttcaccagatttatccaatgcaaaaacaaaatctgcagaccatgctgaaacaattagaaaaaggttgactggggacagaactcgaaatgcaaatatcacaacaagagactcaccctttcttcaacataatacacctggttcttttgctggtaaaagaacagatagatttggtgattattcagggccttcgaagtacggaaagaagaccaccccgactatttcagatgatgagcgtcgtagtacatacgatcagcaatacttccatagtagtcctctgttttctgcccttggtggtgagaggaaagtacttgtgccggtgggacttcaacagcaacatgcatatgctaggagcttggcgcggtttgctgcaaaatttggtcccgtaggctgggacatagcagcaaagagaatcagacgactactgccttctggaacaaattttggcccaggatgggttgtggatggtgagccacctgagaactctcagtggcctcgagttcccatgctctctgatccatccatccagtctactggtgttccagctagcaacgtaatatccaagaatgatgaatccaatcagaagtctggactgacttcgaacgaggattctggtgaagagcatctagctagaaccgagccagtggcttctacatctgcatgcgttaacacaaactctgtatctgccaccaagctagctaccaagtgtgaaaacggggctaatgtgtcatgtgatggtgtgggtagtactggacagacacctcccttgcagcagcacagccatagtcgagagatccactcaaatatgaatggcttcactgccttgccaaacacaattagtcaatacgcagggcaaggattcttgggacagatgcagttgacacatgctcaagttcttgggatgttttccggagtcaatggcagaacaaatggctttatccatgggcacccactggtggctaatagcattaaagcaccacaaaatggggatgttggaaaggtagccactaatccatcaccagatgcaggtcatgattcagaagctgcattatcacaaaccatgactagttctgctccaagtttaagtgctggtgttcaaccatcaggttccatgccaagcgaaaagttagcaaatccaaaaaagcacccggacttggcattgcagctctgaagacaattagccattgacatagttcagcttagcgccgtccttgattggaaacatgattcagaatcccagcttctcgagtccttattctccgcttctgctatgctgatggatattgtagcagcacactgagtggttctgagggagaattaacaatggatttctcgtcgaagaataattcattgtgaggcgaggtcatgggaaggagtaactagagccgatgaatcgtttgactcccagcaaatttgttgtaaaagggtaggtagtctgtatagattctaatcttatttccgatgataatgtttcggatgggcagcatctggcatccaatgtgtaacattatactagtggaggtatacaagcagggagggaggcaagtgcataggtgtgcctttttcctgcgaggattgatccgattccaggttgtatgagactggcggatggacgactgctgcaactccaccccagttgagctgagtagcaagtagcctgagtcaccaaaatcttgctctgagcccctgacatgattctgtgttgacattttcactgacatgattatgtagtgttttaacatttgttgatgttgctcttgactgt

SEQ ID NO: 21092 - DNA, 568 bp, Oryza sativa
  Clone ID: TF_uC-osroM202030e06a1
gcgagaagaagctccgcctcgtcatgggcctccccgacggatcggccaagggagaaaagacgaggaaagcgacggatgggagtgaagagccgtcagattccgggcccacgacacctttgccggacaaaaagttgttagtcttcgtccttgataggctgcagaagaaggacacatatggtgtattctctgaccctgttgaccccgaagagctgcctgattaccatgatattatcaagcatccaatggatttttcaacaattcggaagaagctcaataaaggggcttatggcaacttggagcaatttgaggatgatgtattcttgttaacctcaaatgcgatgtgctacaattcaccagatacaatatactatcgacaggcacgggcgatccaagagcttgccaagaaggactttgagaaccttaggcaggatagtgatgcaagtgagccagaaccagaaccggaaattaaaccagatcctgaaccaaagccacaaccacggaggggcaggcctccaaataagaacactatcaaacagaaagttgggaagccaccggtagaacgcgctac

SEQ ID NO: 21093 - DNA, 2279 bp, Oryza sativa
  Clone ID: TF_OsC34269_2
ttttctcctcttttttttttttttccccttgcccaccaccaccaccgcctctctcgccggcgaagaggaagggggaagcgcggctgcggcggcggcggcggcgcgcggcggaggtagggcttgaggtcctgaggtctctcctccgtctcgatctgcctcctaacccgaagcgagagggattttgcgcatggccttggcacagccaacattgacacttacccagcgctgtgggcctgcgagatatggtgagagcttgcctctatctgaatcttctggccctgaaaagaagctaaaattatttttctttgtcaagaccaaaaagtatttattcaaaccaaacactatgaccacacaagcttgtaagaagagaagagcagtttatataagcagtgaatcagaagactctggtacagactctgaggttgagggaagcaaactctccaaaaaagatggggtcacgtcagtctatacatgtggtcaccagccaacctctaagaataaggttgatccgatgaatactagcaagtcaaggcagtgtggaagtattctgaagaagctcatggatcacaaaagtggatggatttttaatacaccagttgatccagtggtatatggaattcctgattactttgatgttattcgcaatccgatggacttgggtactgttaaaaggaaactcacaagcaagcaatattccaacccttatgagtttgcagcagatgtgaggctaacattctcgaatgcgatgaagtataatcctccaggaaatgatgtccacggaatagctgatcaattgaacaaaatatttgattcggaatggaaattattggaaaggaaatggaaagacagaaatttggtacaagagcagccatcactgaaggtattaaaggctcagcctgctgttaccccaaaacctgtgctacctaagggggtgactgcaggcacaaattcagctgtgagcaagacactggcaactgcattatcctccaaagtaaaaattaaattttctgtgcgaggctctgagctgacctcttccaaagacacgcctttgcaagcagttggcagaagagacggcacaattaaccaatctctcccttgcaccaaggacaatgctaagacaccaaggatacaatcaagtgaggacagatctgaatcaactggagatgaatatttgcctggcgatgatgcttcaccaagcaaggctcttcgtgcagcaatgctcaagagtcgttttgctggtacaattgtcaaggcgcagcagaaagcacttctggatcatgggaagaaaatagaccctgcgaaattgcagttagaaaaggagaggctggaaaaaaggcagcaagaagagaaagcaagaattgaggcccaggtgaaggcggctgaagctgctgcacaattaaagctagacgaagaaatgaggatgaagagggagcaggaaagacgagcagcacgcctggcactacacatgatgaagaagactgttgatattgacaacagtgacttccttaaggacctggaaaacttaagcaaaaagtgggagctgaatccccctggcaaacttattgttgattttgtcgacgggatcgatctaccacctggcttagggagtccgctagagaggcttggccttttcatgaagaaggatcttgaggaagaggtcgaacatgaaatggaggacagtgtatcaccatctacggagatcgacgtggaggaaggagagatcagcttctgtcaatagcacggctctaaaatatccattgtttcttcctttttttctttccccccatcagactctgaagcaacatgctcgcatggcttataaaattgtgcgcgagtgctgtgttatttattctgcctccagacaacatcataacataagccgagtaaaatgaagcgttggttcatctagtttgtgttgtctaaccagaaaacaaaaatgtcagctgaacactgaagtggagttatcggttgcgtggacttcgccccgattttgtcggttctgtgaaaccctgtatgttgtaggtgttccacgtatgcaattctgtaaaaaaagaaaaaaaaaaaaaaagttgtatgtaatgtgatgttagactgttagtatataataatattatagttccatatggcgcaaaaaaagttggcccccttttaaacccgggccccggaaaggttttaagaatgcggctgtgtgttgttccccccaaaaaaaaaaaaaaaaaaaaaaaaaaaaaaaaaaaaaaaaaaaaaaaaaaacccaaaaaaaaaaaaaacccccaaaa

SEQ ID NO: 21094 - DNA, 2376 bp, Oryza sativa
  Clone ID: TF_OsC6193_1
atggggaagacgcagaagttctccaaggggcacccgctcggcttcgtgccggattaccggcacggcgtggagacggtgggggagtcgaagggctgtatcgggagcccggagcggatcgtatcggggagctcgtgtgctgtgccgaagaggaaatgcggaatcctgaagacagaggatggaggggagcttccggggttcaatgtgccgcgggacgtcttcatgctgccgaggatgtcgccttcggataaaaaggacctcgagatgaggctccgcaaggagcttgagcaggttaaggccctacagagtaggctgtttttgaggccggctgcggtgagcatgaatggcggggcggcgtcagcttctggagacgtagttgcaaagagaaacgatgcgaagcttaaacggagcaattcagtgcagtctggcagaggagtgccaccatcagcagccacacctgtggtcaggtctgcaaactacgcagaagcttttaaacaatgtggcaaccttctgaagaacctcttcaagcatcagtgggctggtccgttccttgcgccggttgatgttgtacagttgaacattcctgattattttgacataatcaagaagccaatggatttgggtaccatcgagaaaaagttgaatgcaggcatgtactctacaccttgggattttgctgcagatgtgaggcttacttttgacaatgccgtgacttataacccagtcggtaatgacgtgaatttaatgggcaaaactttgaaatgtatttttgaaactagatggaagtttatcgaaaagaagcttccttcactagatgataaattctctgtgagaagagagccatcacaaaagggtgcagttaagaaagataccattgagaaagattacccttctgagaaaaagcactcgacaaaaggtgtacacaagaaagatatgtttaaaaaagaggatgcttcaactaagccagctttgcaaccaaagaagagaaaagcttctcccttggttcagggttctcttgaaatacctgtagtagaagctgataaggtcattgatgatgctcaagtggtacagccttctaaggtgattgatgatgcccaagtggtgcaggcttttaaggtgattgatgatgctcaagtggtacaggcttctaaggagattatgacggacagacaaaagtatgagctaagcgtaagacttcaatcatatggtgggttgattccaaatcatgtagttgatttcataaggagccaccttcctgatgataatgagggtgatgaagatgagttagagcttgacatgaatgtcctaagtgatagtacattgtttgaacttcagaagcttcttgatgactatgatagggtaaatcagtcaggaaaccctacaaaagatgagcatcgtgaggttgagtttgaaagtgaatatgggcttagcaactcatcgatgcatcatgaagaaggtaatgagctcgttgaagaagatgttgatattggtgggaatgatcttccacctttgacgtatcctcctgcagtatttgaaagtgaaactgcagaaagaagcagcaagcatagcacttctagcagttctagtagtgattcagaatcatcctccagtgattcagattcaagcagctcttctggaagcgatctggatgtcaatgttcctccatcaacaagtggggccaaggacaacacgcaatctgcggttaggttggatcaggaaaacgatccactgagctcgaccaatctaccacaacaaagtagtgatcctgtacctatttctgccgaagatgagggggagaatgtgtctgagaaacaggtcccccctgcaaagcaataccgagctgctgttttgttaaaccgctttgctgatacaatttttaaggctcgtgagaaaactcttgatcaggtcgcgaaaaaggatcctgagaaacttcaacacgacatggaggagcttgaaaggttacgaagagaagagagagctcggatacaagctgaggcaaaagcagctgaagatgctcgcaagagagctgaggcagcagcagctgctgaggctgctgcagaagctaaacgccaaagagaacgtgagagggaagcggctcgtaaagccttgcaacagatggagaaaactgtagacatcaatgaagggaacctctttttgaaagatcttgaaatgcttggaactgttacatcaggtgaacagtttcccagctcggttggtgagacgagtccaactcatacgcctgaaggccttggatttcagctaggtagcaaccctttagaacagcttggtttgtatatgaaaaatgatgatgaagaggatgaggaaggtgagtctgcagatgaaccaacgattgatgttgaggagggcgaaatagattga

SEQ ID NO: 21095 - DNA, 2153 bp, Oryza sativa
  Clone ID: TF_OsC11739_4
tttgaagaagaatcggcccaaatactaattaaatcttttgacaccaacaatacaattataaggttcaagtacaaccctactccagcgcggtaagcaatgtggcaacatgtgactatcacaattatcttgatacaaatatgaagcttacagccttacacatagataattgtcatacaatagacaggtatctcccaactaatttcgtacctaaatcaagctatagcctctgagctcaaagatatgtttcaactaacctgttttattccaaccagctcccgtgacttcagggtacagctttctttcccaaagtcacaacgctgccttgagcttcctttacacgaaacggctgctgctaagcagccattggagggacaaaactcctaccgtttcattatcgctgttatggccgcatgcagagggcttcccttcattgaaacctgccgctgttgctgtcggaacagagaatggcgtcccctgaaaacagaactctggttgctggggaaaagccgtgcgcagagttgcaagaatgattggttctccttctgtatgggataatcctccatttcaatctcctggcttgtttctgttggctccttatgttggtgttgtgcaatttcggagccatcattgggctgactggatgtatgttcctcctgactgatcaaatccgtatagtctacctcttctttttcgtcaaagtatggtctggagccttcatcctcataatcatgtggcagtggctggttgttgaagaatttcacatgattttctatcagagtccctgaatcatctgctaccactgttcttctgtacatatcagtttgtggtggttgctcctgactagaggtagtgtcatgactaccagcgttattaatgcctgagtctacctccatgatttgctggtcagaaatgttactattcactgcagctgtatcgttttcaatgacagccaagatttcatccttttcctttttgcggcgtgtaacttgacaaacagcacatgcacagtcatttttgtgtcgatcattccctaggcgccgccgtttttgcttagacttgccttttgaacctttgacatcctcatcgcctgtgttatcattgccaccattctcctgcgcatcagaatacaagcctgctgccagccagtttttcatgaagcccttcttcacccgtttcataagctctataatgtaatcacctttactgttgtacttggtacaattatcccatataaattgcacgtccttatacacatcctccgagttcatatacttatcaccacgttctagattttgacatattgtgccaaaatccataggagtatcaataatatcaaaataatcaggtattcctagagcaacagggtccaccggtgtgttgaacggctcagctgcatccatcttcatgactttcttaatagcttcaagtgcagcagttagctctctgtcatctcgctgacgttctggcgtagcctgctttacctccaactcttgtgagcttctcggctccaatgcagtctcgctttctacattttccaatacggtttcctgcttgcttggaagaggttcactgactgaatcagctttcctgtcctgatttttatcttctaccgaagataatcctacagacttgatatttatgcttgctacttttcttgccatcttatccttatcagaaccactcaattctgctgcctgcgcatctttctgtccgtctggtgatacaatagccttctccgcaacttctttgctcgcttcaggagcagcacttgcaggtttaccaccaccaccatcaacaggtgcttttgcttctgaaggaccctggtgcgtctccaacactttggcagatttgaacttcaacctgactcggctatagacttttggcttagcattctgtacgtcagtagacacggctggcttctccggctcaggaggtgctggttcaggcactggtggcggagcaataacaggcgcattatctgcctgatgatgcgctgggctggtgccgttctcctctgtgcttgggctggagggggactttgaggaagcatccacggtgctcgggctggacggggacattggagaagcatccgctgtgatggaagctttcaacttgcccttcttgcccatcttacgcccacgcttgcgcttcat

SEQ ID NO: 21096 - DNA, 2259 bp, Oryza sativa
  Clone ID: TF_OsC11739_1
tcacctctccctctctcttctccatgggccgcggacggcggagcagcgtgcgggtgggcgcaggcggaggggcagcagctgcacgagcggcggccggcgagggccgtcaccgcgtcgtcggccggatctcctctcccgcctcgcgcccgttggcctcgtctggctctccatcgaagaggatgcggcgaggagggagttggcaaaggggcggacgggaggatgcagcggcactcgatctctccgcggcggagagcgcggacgggaggatgcggccggcggaggcggcgtgcgagcggagcggaagcggaggcgcggcggtggcggcaggcgacgccccacgcggccaccgccaccgaacaaaaaaacaagaaggacgcttccgccgccgaccgccgctcgccgcactccggttgccgtgccgccgctcgtcgccggccaccctccgccgttcgtcgctagccgcacgccgccgagcctgagagccgatgcacgtcgctggcccccaagccgccggtcgacgccggcaactgtccgccgaccaccgtgcaagctagccaggtgcccaggtccaacctgcatggcaaagaggaggcctaggaggttgcactcctcgtcggcgacgaaaagcagcgacgacaccgactcgatggcgccggagcgcgtcccgcttcttgccgtcggagcgcggcctcgccgagccgcgggtttgtcacgaccgttccaggtgagcatctccaccagccggtccaccatcgccgctgacgtgccgacccgccggagcgcgacctcgctgagccacgggttcgccgcgacgttgacgaggatcccgacacggccgcggccgcccgtcgcgccatcctcctcgccggcggcattctcctgcacatcagaatacaagcctgctgccagccagtttttcatgaagcccttcttcacccgtttcataagctctataatgtaatcacctttactgttgtacttggtacaattatcccatataaattgcacgtccttatacacatcctctgagttcatatacttatcaccacgttctagattttgacatattgtgccaaaatccataggagtatcaataatatcaaaataatcaggtattcctagagcaacaggatccaccggtgtgttgaacggctcagctgcatccatcttcatgactttcttaatagcctccaactcttgtgagcttctcagctccaatgcagtctcgctttctacattttccaatacagtttcctgcttgcttggaagaggttcactgactgaatcagctttcctgtcctggtttttatcttctaccgaagataatcctacagacttgatctttatgcttgctacttttcttgccaccttatccttatcagaaccactcaattctgctgcctgcgcatctttctgtccgtctggtgatacaatagccttctccgcaacaacttctttgctcgcttcaggcgcagcacttgcaggtttaccaccaccaccatcaacaggtgcttttgcttctgaaggaccctggtgcgtctccaacactttggcagatttgaacttcaacctgactcggctatagacttttggcttagcattctgtacgtcagtagacacggctggcttctccggctcaggaggtgccggttcaggcactggtggcggagcaataacaggcgcattatctgcctgatgatgcgctgggctggtgccgttctcctctgtgcttgggctggagggggactttgaggaagcatccacggtgctcgggctggacggggacattggagaagcatccgctgtgatggaagctttcaacttgcccttcttgcccatcttacgcccacgcttgcgcttcatcttcctattagtttagctatcacctcaccacacaggccagcagagaagtacacacttctccttcctctcctggtgccctcatgctgggaggtgaaggaccacgcaggccccacctccaatccaatcggatgaagatcaagacgacgttgttgctgatggcggagggcggagtcttctccctggcgggggtggcggagaaagcggagaagagcggcgtggaatcgacggtcggtggtcttgcggcaaggcgttcctccttcttttcctcccgcggcgcggcgcggcgctgcgctgcgctgatcgggggcggcgagggaggagattagggttagggttaggggaggctgcggcgtcggcgtgacgagggagaccgcggcccgaattcctgcagcccgg

SEQ ID NO: 21097 - DNA, 1513 bp, Oryza sativa
  Clone ID: TF_OsC48985_1
cgcctttttcgctcgcagacggccgccggcgacgcgcgtggcggcgagccctagatatggtgccgggaggtggagtcccacagggggcggagggagggagggctatggcggcggcggagacggccgccactgccgccgccgccggggagagggccccggggacggaggtggacgcgttccggcgccaggtcgaggacctcgtctccaagaccgaccagctggagaggagggtgaatgaagtggtgggattctacgacgggaagaaacatggcagtggtggccggaaggctggtcgcaaggatagcagcctttccaaagggatgcctgatcttatgcgccagtttggcacgattgtgcgccagatcacatctcatgaatgggccgagccatttctcaagccggttgatgtggtaggccttcagcttgatgactattacaagattatcaccaaacctatggatttttcgaccatacaaaagaaaatggaagggaaagatgacaacaagtataacaatgtccgagaaatatattcggatgttagattaatttttgccaatgcaatgaagtacaatgatgaacgacatgatgttcatataatggcgaaatcattgcttgagaaatttgaagagaaatggctccagcttcttcctaaagttgaaaatgaggaaaggaaacaaaaggatgaggaatccaacggtgttccaaaagtgaacatttctccagaagaagctattgcaaaactagcaaaagatactgacaatgagctgattgaaatcaacaagcagttggaggagcttcggcaaatggtggtccagaaatgccggaaaatgactacatatgagaaaagaaaactgggtgcaggtctctgccacctgtctccagaagagcttactaaggcattggagatggttgcacaagacaaccctagcttcgaagctaaaggagacgaactggaacttgatatggatgctcagagtgagacaaccctctggaggttgaaattctttgtgagggaagcattggaacgacaggccaacgtcgcttctggcaggactgatgaaaatgcgaaaagaaagagggagatatgcaatgctctggccagaactgcttcaaaaagagtcaagcagcaacctaattagtggcctctgaccattgtgcatttgtgtcttcacttgttgtttagaatgtttctgagaaatagccttgcaaaataatctcttccttctatggagcatgtaaataactagtctctgcttagctgtgtgaggttgcaacaatagcgaaatgtttcccaaaaaaagggtcttatgttccacctgtagattgtgtgttccatgcaattgtaccatcaagaaaaatctagtatagcgttgctggcgccatttaaaaaaaaacaaaaacccataaaaaaaaaagaagagcaaactgtgaaaaaaaatccataagaacaaaatgtgatttttgttttcaaaagaatgaacaattcttagcattccaaaaaaaaaaaaaaaaa

SEQ ID NO: 21098 - DNA, 2171 bp, Oryza sativa
  Clone ID: TF_OsC166303_1
gcacaaaaatggatttatttgaataaccaccagcaatattggaaaaacagactgccatcaataggatcattgaaacataaattaaaagtaggaactcaataataacagaaaaaccttaaattaactcactaggttagattatagggaaacaaatacagcaataaaaacacaaaaactacttaataaaacctacctacatttcaagatgaattggcggcatctgatccatctgaagaggagctatcactgtctgagtcactagaagaggatcctgtatcactgctggagctgctagagctgctcgatctacttgcattttgtccattattatcagcttgttctggcacagaagtagctaatttctcatccacaatcaaattttgctttggagattttacaccaatattaggctcttgacttggttgttgtggggcaacatgttgtgcatgcaactctgcatcctgccttgcaagcatggctcgctcagccttcctcttttgcttgctcaggttcttcttgtagttggccacaaatctatcaagttcccaaagtgtctcagtatccatgctatctatttcaacctcaatctcatcatcatgctgtctaacagacagattcttgttcttaatgatctgcacaacaacatcaagcttctccggtggcaaattctgaaggttgttactaagcttccgcttctcatctattgtcatatctctcttatccggatccttggcctttggtttcttcatcgatggagtcctggcactataagtgggagtatgacttaatggccttgacttggagtccaacaccatatggtgttttacagaatctgaccgatcaaggaagcgcacgtcaattggtggaggtggaaacttatttggcaatggcggacatgaggcaaggtactgaacctcagcctcaatttcgggccactgcgcctcaaagattcccaacaactgctcagccatgaaatgcacatcctgccccttgggattataggtcatggcattatggaacgtcagccgtacatcatcagcaaactccctcgggttcctgtactggccatgcgtgagtcgggtctttatcgtgccaagatccattgggtgcttgataatagcaaaataatcatgcaaaccaagcgcaacagcatctacaggcttgttaaacacccaaccaaatttgtgcttcattagcctagaaagcagcgacatagatttcttaaaagcatgagagtatagcctctgctcagcatcataaccagcaccatgagatgctaaggaacgatgcttcttcttgtggtgcttgggtttcttacgaccatgtgaatctgaaggcggaaacttatccttggcaagcaagaactctgaattttgatacaactgattcgcctttggtgtccgcttctccttctcgaaggactctgtgtgagtcactgacacggttagtggcccgcgctgcatcactgagcggaccggaacaatagcaccagcaacttgaccaggtatgggcgtcacaggatcagcgagtgcgaactgcgagtgcgcatacccaacaggaagctgaggcggcggcaccaccacaggcaaagcaagggccgctgcagactcagccgcgatggcctcagcggccgccttcagccgcttggaaagcccacgcacctggtcgagctccgacgcaagctgccgccgcagctcgctccgcgccctccgcttccgcgccttctcctcggcggccgcccggacgtctccatggccgttgggaacggccccgccgtcccgattaggccccgcggagacgtcgtcggaagcgggcgcggcgggctccccctgctgcgcgggggcaaccggggcgctcggcggagggggatggggggaggaagcgggcgcggcgggcggatcaggccgaggcgccgcaggcccatcctcggggcggcgaatcgacctccgaatcgaggctagggtttgcgcgagggggctggagctagggctagggttcggagggggtttagggtttttgcgtgggtacttgcgccggtacaccctgatctccggcgcccaccgcgacgtcaccggcccctcctccaccgcctccgccacggccggggccgcggggctcgccgcgggccgctcctccccgccggcgccggcgccaggaggggacgaggccat

SEQ ID NO: 21099 - DNA, 1334 bp, Oryza sativa
  Clone ID: TF_OsC59345_1
cgccgtcgcttcggccaccggcggcgactgtggccccgtccgtgccggatccctccccgtcgggccacgtgacgatccgcccctccgagctgtcccgcagggaggcccaggtgctccgcgcgcggctcaccggcgagctcagccgggtccgcgccctcctctccgacatcgacgggtgggaggcgcggcggcggcggccggcggagcctccgcggcagcgggggcacgtgtcgccgcccccggccctccaggcggcgatgcggaagcggtgcacgcagatcctgacgcggctgcggaagcagaagatcagcgtgtggttcaactcgccggtggacgtcgagcggctgaagctgcacgactaccacgccatcatcaggaaccccatggatctcggcaccgtcaaggagaacctcgccttcgggaggtacccctcgcatgaggcattcgccaccgatgtccgcctcaccttcagcaacgcgctgcggtacaatccggccgaccaccatgtccaccgattcacacggggatgatgcccaagtctcccgattaggtggtgcttctccctctaacaattaggattttagtggttttattaggtgactgaggtccattttggcaacgtatttttagtagcgtggtataggaaattggatgggttctctgttcaagttgttgtgagctatgttcgtgtgtccgcctgcattcaccttaggttgttggtagtaatggatagctagtttatgtgggtagtttggcaaacgaagaccattgtaaagaagggaatataatcgaaggaaaagagaaaggtagcaatgtgttagcatttaaaaaaaacgctaatgggagaggtcgttgagcttgatttcgacgaaatggatgtcgagacgctgtgggagctcgatcgatttgtggtcaattgcaagaaggcgctcagcaagagccggaggactgtcgcgatgaacggtgatgctgttgatgcgactgctattgttccaactgaggacgataccgtgcaggagaatgacacgccggagaagagggtttcagaggttgatatggttgatgagtatgttgatattggcgatgagatgccgacggcaaattaccagtcggtggagattgagagggatgcccaggtgactgaggtccattttggcaacgtatttttagtagcgtggtataggaaattggatgggttcttgttcaagttgttggtaatccattcaaattgctatgggacatacaccttttgggttgaaggtgttttcccctatgctgactccattgtcattgcaaccaaaccaaacatccttatattctgtcttgactcttga

SEQ ID NO: 21100 - DNA, 1904 bp, Oryza sativa
  Clone ID: TF_OsC82910_1
gcgcgcgcccactctcgccagcgcagcagcagcagcacgcgaaaccctcgccggcgacggcgacggtgatggcctccgccctgctcgccggccggggcggggttaaccaccaccaccaccaccaccagtggggggagacccgtgccccgctcgcgcccgtggcccccaattccgatcccaaccaccctctccagcagcgcgccaacggctcggccacgaggccgccgccgtcaagctacgtggcgctgcggccgggggcaatggctcaccgcgaggcccgcgcgctgcgggaccgcctcgccggcgagcttggccaggtccgcgccctcatcgcccggatcgacacgtggcagcagggtcaggtgaagcgccatggctcgcctcgccgggacctccccacgccgccggcgaagctcagggcggcgatgcggaagcgttgcgagcagatcctggcgaagctgcggaaggacaagcggagcatctggttcaacgcccccgtcgaggtcgaccgcctcgggctccacgactaccacgcagtcatcaagtgccccatggatctcggcacggtgagggcgaacctcgccgccggaaggtacccctcacacgacgacttcgccgccgacgtccggctcacgttcagcaacgcgctgagatacaaccctgcggggcacgaggtccacaccttcgccggcgacctcctggcgtcctttgagaagatgtacaaggcatctatgtcttggttcgagcaggaactcaagctccttgagccgccgatgccagtgccgccaccggaattgccaccggcgacagctccggtgcaggtgaaaccaagggcagcgaatgtgaaaatgcggaagccgaaggcaagggagccgaacaagagggatatgacgctggaggagaagaacttgttgagggttgggttggagagcttgccagaggagaagatgcataatgtgctgcagattgtgcggaagaggaatggcaatcctgagctggttgggggtgagatcgagctggatattgatgagatggatgtcgagacacagtgggagcttgatcgattcgtcaacaacttcaagaaggcgctcaacaagagtcgacgggctgccattgttaatggtgaaaatgccgatgtcattgatgcttccgtggctaatgatagtgatatgctggtgaatggcagtaccgctacgatggtggacaacggtgatgtgacaatggcaatagagagcaaggatcctgacaagatcactacacaggccgagcagttggatgagtatgtagatatcggggatgaaatgccaacagcaacttaccaatcagtggagattgagaaggatactgaggccgcgagcagtgggtcctcatcatccagtgattcagggagctcaaaggacagtgtctcagaatctggcaatgcccattctctggtgtaaggcctccattctaacagtaggatacgagtaggtggatgattaatttccttttgtgtgattggtggtgtagagacaccaaaagtgtaggtgttttgtaagttgattaagaggagttggtatctgtttggatttagtcaagattaatttgtagcgagtgaactggctttgtggctattctgatagcgcaggtgtcctatgtacatataagtgaaaaatggagactacggtagcaattggtagactggtagttcaccaggctttctgatctgaagaagtgaatatggttcatgtggctgtctgttcttctagttctcaatgcagttgttttgttacaactgtcatatactcttaatactcttacgtaatttgatgtgtcattatgggtgattgtaactgtggcaattgaagtagcaacatataatcttttctgggagcaagacatctcccagaaaagattcctcgtgc

SEQ ID NO: 21101 - DNA, 4507 bp, Oryza sativa
  unsure (1)..(4507): unsure at all n locations
  Clone ID: TF_OsC13486_1
nnnannnnngnaattgtaatacgactcactatagggcgaattgggtaccgggccccccctcgagttttttttttttttttttttgtgaaatggcacataaactcactctgatagcataaaagtacactgaatctttgccaagagagggttattaacagttcgcattcagcatgtcatttgaactgaatggatcaagtaacacagttcctggcacagaatatgaaagtgggaagcaatttcattcagaaaagaagatctagtctaacaatctattcaatgctgaaccatttacaacaaacatacaatgtgacaaggggcattacataggggcgaccacgtagtcttctagtctaccgaaagaacgatatatcctaagttctggtgcaaaaatttccaccgtggaaagctatagtgtggtcaggcgggtgcgctaagtattttggatcatgagaatgctctaccaagaagcatgccaccacagcatttactcaaaatgctggattctgaactccggtaatgaacaaaatgcccaagcatatataatgatgtcatcctaagcaggtgttcatccatccattttctcatatctttgcacatggaggatgagtcacaaacaatgtacgatggtctaccatgaatcgtcatcgctccattgctgtcgatccatctaatggatgtcccaatctgctgtttgcgctttgcgcctaacttccatttgtctttaattgttcaagttcaagtctgccattcaatctgtggtcacatccgttcattatccgttccaagcttacaactgcaaagcaaggtctggctgttgtgcttccaaattgatgcccgaagactgtcgagctggtggtgaaccaggagaagggaacccgatgttcaagtctgggcgaagcatatccttgtttggtttctgttgcatcgggggaaccaggccttgccattgtggttggccctgtgatcttgagaagtctgtctggaccaactgggggaatattaccaaacccttgttttgccctggactttctctaaccatctgaacgggttgcctaaagaactgtggaacagcagtcatctttgcttcatcaggacgggcatttgcaaatggcatcttccagccagaattactatcatggaaagttggactgacaatggttggtttgctctctgacgaagcaccaaatgagatccaagattgagccactggagcagatggaatgctctgattctccctgacagctggtggaaatgctgagaaaatattccgggaagaatcaggccctctgtttgttgtatttacctgcacaggcattacagttgatcccactgattttacattgtcattgacattcttttgcccgttcaaattcattgcaaagctggccgcatttacttgttgatttttagtgataaaacccatgctgctcattggtctgcttttgtcggttgtcccatacttcccatcaccaggtcgtccatggtatacccatgtattttcatttctgggttgtggaacagctgcttcttgcgactggaagaagggtttaggctgcccacttgtattgtttaaggaaggcatatcatgaacaccagaagcaccttttgcacactcaagcctctggtgtgccatttcaagtggatgagaacttttaggtgtctcgctttttctcatttgctgagttatagctgcttctgctggttggaagaagggtctgggctggccagtcattttgttcaaagaaggcatatcaagcacattggaagctccttttgaaatttcaggcctctgtggttgcttttgaagagggcgagaactggaggacgagctccctttccttgtttgttcactgggtgcccttttggtctttgcaacacttccaggcgcccgatgattttcatgcagagatggtgcttcagtgctcctctgctggggctcagctgtaacaccgaataatcttggcttaatttctggactttcaagagggccaggaactccaaccacattattaccagtggttattcgattaagtagactcaaactcatatcctttggattgacactttctgttggtctgatcctttcattattcctagtcattgaagcactcctttgtacattagcctctgagctaaccagacttctcggttggttttgcacaaacagaataggtggtaatggtggctcgtattctccaacccaaccacgtccaaactttacatcagtgggtaatacccgttgaatgcgttcagaagcaagtctccagccttgagtaccaagtgagccagcaaaacgagcaagacttcttgcatatgagtgctcagaatgaggtccaacattaacaagctcttttggctcctcacagaatacgtcgaaaattgtgtcagattccgatgaaggctgttcttcatatgtatcatatgttttgcgtcgtgtctcatctactacaattgacttgtagcttggcttcactgaactttccctagctgaaatatcatctggcttctcagatcttatttcatcaagtggggaactgatatctttgtccataaacccgttggctgcaatacaatcttggggctcaacagcatttgcctgcgacatgcttaaaccattagaatcatctcctgcagaagcaatggttgcagcagaaacatctgaacccaaagcatcttggctattcatacgcactggcttcttaacagtctctccattgcaggagtaacccatatcatcctgtccatctccacaaatagacttattattcaacccttttttgtgggagtgacctaggtcatctctatttcggcaaatgggcttctcaactagccttttcggggacaagacgcctacatgttctccatttgtgcaaactggattctctactgaatctcggtgtgatgagaaatctggttcttcaccattcgtgcaaacaggctttcttatgtgttttttctgcgatggcaattcatcttttgaactccgggaagtgggtctcttgtcatgctgtttgtggaaagatgcaactctatcattttctgaatttctggagatgactttccttccttgctccttgtggaatgaagagcttatatcatcccctgagtttctggaaatgggcctcttaacttgttctttttggaaggaggaacttaaatcatcgtctgaattcctgacactggatttcttaactcgttctttctggaaagaggaacttaagacatcctcagaattccttgaaattgtcttcttaacttgatctttgaactttcgatcatcctctaagtctttggaatttggtctactaacttgctctttgtgggacatgaagcctagatcatcatctgaatacctcaaaacaggcttcttaattggttctctattgctagggtgtggtctaattttctgttcactctttattaggttttcagtgggaatgccttcatctctcagttcctgaaacttttttcttgccaattcatgtatggaatgggcctgtctgaagtagattgtatcaggtgcattgtactgcatcgcattactgcaaattaagaatacatcatccagtagaaagacgaaatctacagatgtaattgtaaacctgtgattaatttgatataatgctatgccattgcatctgttgggctgtaactcaaattgctcgaacgagcgatatgcattcctggcaagcttcctcctgacggtgccaaagtccattgggtgctcaatcacatcatggtagtcaggcaactcctccggatcgacgggctccgcgaacactccgtaagtatccttcttctgcagcttgtcgagaatcatgtccagcgccttccggtcaggcagcggcgtcgtcctcgccatccctggcaccgggaggcgcttcgtcctcggcgcgctggcggcgtcgctcctcccaccaaccagcttggggttggcggtctctccccgcacctcccgatggcgagatctgtcgccgcgcggctcgatccggcgcttcttgggcggcttgacccgctcctcgccgccgctgacgtcgtcgccgccgttgccgccggcctcctcctcctcctcctgctcctgctcgccgccggaggagtccgagtacgaggggggaggcgggccccgccggtggtggttctggtcgggggcgagctgtgagagcttcacgacgagcttgagcttccgccgccgtcggtcagaggccgaggagcccccacccccacccccgccgccgccgccatggccgtccgagtcggagctcgacggctccggcgacggcctccgctgctgctgctgctgcggcggcggcggcctcgacggcgacgacgacggcgaggaagggaacgggaagaagtcgtccaccagcggcctcgacgacggcgccgccgccctcctcggccgcagcgaccgcggcggcggcgccgccgccccggcgggccccctccggcgcgccgggtggtggtggtggtggtgcctgtcaggcggcggcgacggcgaccgcggcat

SEQ ID NO: 21102 - DNA, 1849 bp, Oryza sativa
  Clone ID: TF_OsC187148_1
atgggtgccgcgagcgagcgaaagtgcacggcgtgcggcggcaccggtggcgacgaagtgcagatcgacatcgatcggcgaagaacgtctcactggtgctcctcctggagtacatcatccgcccgcccgccccgaccccgttcctcgtcctcgcccgcgccgacgggctcgacgacaccaccggcgcccccggcgttccgcctcgagatgggcgtggtcggcctcgccgagaactaccacgcgtgcgtcggagggggcggctccgtgcttgaggtgtcgtaccacggcatggccgtcgccatgggccgcgtgccgcggttctgcgtccacgggaagcgggcgggcggcgagcgggccgacggcgtggccagcgcggaggcgacgtcggtgcgcgaggagctgcgcggcctgatccggagcgagcggcagatcgtgggggcggccgagttcagcgtggaaggggagatcaagggcttcggctatctccgctgcaaggcgctctgtgttgttggtcgccgtggcctcggccggcgcgagcggcaagtcggcgcggttcgagctgctccggccgacctgacgcgcatgcaccgggagcggatggcattcatctcgtcgcgcgggaggcgccgcgtggcggagaccgcgtccgccttcgtgatgctgctctcctccggcgtgtacaccgggacgggccagtcgcatcccgccacctccagccctactatgcctcgcccaaagcgccgccggtcgcccttgccgccgccggcgccgcctggcttccccacggagcggaaacaccatctgccggagctgcagcctccagcggtggccgcggcgtctcctggcgtcgctggagttcccgccgatcttggcgacgcgctcctgcgctgcggcaagctcctggacaagctcctggagcacgaggacgggtgggtcttcgccgagccggtggacgcgcgcgccctccgcctcgtcgactactacctgcgcatctccgaccccatggacctcggcaccgtccgccgccgcctcgagcgccgccgctacgcggacccgtgggcgttcgccgccgacgtccggctcaccttcaacaacgccatgtcctacaacagcgcgggcgaccccgtgtacgagagcgccgccgagctctccgaaatcttcgaggccgggtggccctccgttctcgcggcgccaccgcgcccgcccgacgccgagcgcaagcggaggctcagtggtttgctcccgcggctgccggtgggtgcacaggtgacggtggccgagatcatgaagaagcgggacgggtgcctgcgggaggtgaacgggatgatggaggtggacctggacagggcggactccgcgacgctggacgagctcgaccggatggtcgcggagcacggggccgccctcgccggcgtggttaaggtgaagcagggtgcgttggtgatcactgatcaggagcacaatgcaaatttcagtggatggactatcagtctattcacagttgggctcctaggatgagaactgctgatatatctttgtttcagaatgctgttggcttcaacaggacttcgtgagaccactgagtccataacaccgtagttatcatatcctagatatgtcaactttgcattttgtcagatgtcataccgttgtgtttgtaagttggaaccagcgggggttgtatgttgggatcacgggttttctgatactgaaacgtttggtgaactagaaggggaaatatgcaaaatatgcgtgcaactcttatgtagtgtaaaactgaaaactattatatgatacataatatatgtctgaaatgtctatgttattatgaaaaaaaaaaaaaaaaaaa

SEQ ID NO: 21103 - DNA, 729 bp, Oryza sativa
  Clone ID: TF_OsC346887_1
atggatggaacggacgtgacattcgacattggtcaggacatattctcagcgcacaagtgcatactcgctgctcgttcatctgtcttcaaggctgagttctttggcgccatgagtgccaaagcccataggaccatcaaaattgaagatatggaagctggtgtgtttagatcactactgcatttcatctacactgacgctctgcctgagacggctttagatgttgtgatggccatgaaggcaaacttcagctcttgcgtggcgcggcaagaatgatcggtacaatgtagagaggctgaagctgatttgcgaggagaagctgtcaaagcacattgactccaacatggtggctaccactttggctctagctgagcagcatagctgccacggattgaaggaagcatgcttcaagttccttagttctgatgccaatcttgagaggatgaaggccagtgaaggttatgagcatttgaaggttagttgcccatttgttctcaaggaacttattgcgagattcatctctccggaaatggaagctgcaagggaaataaccatggatcttcagtaaacttgaagatttgggttgaaacttttgatagtttgtgttataattttgagaattataagaagttctggagatccaataaagataccagaaaaggaaaggaaatggtgttctgcacccatggacggatctacagtagaaaggccggtgtcaggcgacaccgataa

SEQ ID NO: 21104 - DNA, 1482 bp, Oryza sativa
  Clone ID: TF_OsC60230_1
tgtactcgcacgccgcgacgcctctgctgaacatttcgctctcttccaagatattttttcctcccacgattccttcctcccatccctgtggggattcatcggctcatccgtactagcacaagatgtgcgagggtgtgcgggccgccggcgacgccgccgccgccgccgacgtcgacgtcatcacctcctccggccgccggaggatccccgcgcattccactgttcttgcgtcggcgtcgccggtgctggagagcatcctgcagcgccgcctgaagaaggagagggacgccgccgccggcggcggcaaggtccgcagggccgtcgtcctgatccgcggcgtcaccgacgacgccgcggccgccttcgtccgcctcctctacgccggcagcagtggtgatgaggaggagattgacgagaagagcgcggcgcagatgctggtgctggcgcacgcgtaccgggtgccgtggctgaagcggcggtgcgagggggcgatcgggtcgcggctcacggcggagtcggtggtggacacgatgcagctggcggcgctgtgcgacgcgccgcagctgcacctgcgctgcaccaggctgctcgccaaggagttcaaggccgtggagaagaccgaggcgtggcgattcctccaggagaacgacccctggctcgagctcgacatcctccagcgcctccacgacgccgacctgcggcggaggaagtggaggaggaagagggcggagcaaggggtctacgtggagctgagcgaggcgatggactgcctgagccacatctgcacggaggggtgcacggaggtcgggccggtggggcgtgcgccggcggcggcgccgtgcccggcgtacgcgacggcgtgccggggactgcagctgctgatccgccacttctcccggtgccaccgcaccagctgcccgcgctgccagcgcatgtggcagctgctccgcctccacgccgccctctgcgacctccccgacggccactgcaacacccctctctgcatgcagttcaggagaaaggaggaggagaaggcggcagcgaaggcgaaggcaaaggccggcgatgatgacgataagtgggggcttctggtgaagaaggtgagggttgccagggccatgtcttctctgggcaagaggaggcagatgagttgctcccagtgctgagcaagtgcaatcacagcatcagcctgagacagtcaagagaagagtattgtagtatagaagggtactactatgtagttaggcatagtgcatgagtgtattgaagtgagctattttttggtttgttcaagatggtttggtctctcaagtttgagttgctttactgtcttcaatttgtagagttcttttgtgaggtgagagaaatgggctgaaatctgttgtaaaattgcctatatcgtaaataaacttttaatagtgaggtatatgatcattacagtttcatacctggatgattacattgataaaaaaaaaaaaaaaa

SEQ ID NO: 21105 - DNA, 2157 bp, Oryza sativa
  Clone ID: TF_OsC6748_1
acgcgatcgcgcctgtcaaggcgacgggcgtgcgccatgaaggcgcagaggacgagcggcgcgcaggggcttaaggcagcctactacagctgccgagggaggtctacgccgtcgtacctggcaaggagagactcgttattcgccacgtggaagaagagcttcgggcacaaggcgacatgccccagcgtgaagaggtccgggtccatgtaagtgatcttgtgccgggcctgttctagtccgtcgccaccgcgacgtccggtttagtcggctatcatggtcgaggcgtcgaagcaaaagtatcttcgaatcgccctcttgatcggcattgcaccgttagcttgttgggtagaacacaatttagtgttgagagatgatcttgcgatgtcgaagcggatcagagccgacgggttcttcacgatactgggcaacatgtccctgatatacagctacacggcgtaagaggaccagccggtgttcgtctaaatacaccgtttcgagctgcggcacgacctctttgggctgatcaacaccgaaggcagcggcaacgtcgtatgccacgtctgcggcgaggtcttcaccgcccacaggggcctgctcgcggcgcggtcaccggtactcggagctgcactcaacggcccaaggatgggatctggtggcctttatggcggcgtaactataaagacaaacgccttggatcctctcgtggacaagccactgctcaggtacctcgacaccgactcgctgccgccgcagatgcagcagggcgagctcgaggaggagggacgcgccatggcgcagcatctcctcgccgcagccgatcggtacgggatggaacggctgaggctgctatgcgaagctcagctttgcaagcacatcgaggtggccagcgtggcgagtatcctgatcttggccgaccaacacggatgctccggcttgaagaacgcttgcttcgagttccttaagagccctgggaagtttgcagctgccatggcgacacaagagtacgattacctgaagacgaaccactgtgctctggcggatgaggtcgtcaagggaaaccaggcaaaatggatgctagctactgttgaaactttcatgaggcaccgactgaactctaagagcattttagagactgctacaagagaaattgcgctccacgcctccacatcaaatgagacaccccctgtgtttctcgacctggaggaatcccttcgggccaagggcgatatgacgctgcgcgaggaggccacattgaaggtcttgaaggtggtcgcgaccctgggcaaggccatctccaccggggcgatcgccgccgtggggtattatgttcccggcattgttggagctaaatttggtgaaccatctcttcctcggctaccaagattcgccatggctgctgtcacttcatggtttgctggaaaggtgatgtattatgcaatcttgcaaggaagtactgaattcattttgaaacatggagaagaacgcatgaagatggagctatctaacataatactcaataagcacagtgatgataaaacactggttgaagctgtaaaaacgcagttctttgctgagcatctgtttagtgatcagtatcaagataggacacttttcaggtggcatctacgccgtacttatgttgacagcgcctttatggaaagggtgaaggagatcgaagtgaagagctcaaatgatgggcctggattaatttctggacagagaattataagcactagaccatttggagacctcatggaggacccactggcgtgtatacttggttctccagacagcaacatggaaagcaacaagtctgctgagcacacgggtactatcgtgaagagaagggagattgcttgcccacctgcagttctggttgaaccaatcaggttgcaacctaatgtgcccatctgcagtttgttagcacgatcgcgaacagggtcaaatttggaggtgaacccggtgattcttgacctggaggaatctctactggccaaggggaacatgacgcttgaggaggaggtcacaatccgggtcagcaagatgaccgcgagcgtgttcaaggtcttcgccaccgcggcgtttggtgcgtcgagttattatgccctcggcctcggtgagctttctctgcatgcgcgcgcccgtctcgatctgtga

SEQ ID NO: 21106 - DNA, 1616 bp, Oryza sativa
  Clone ID: TF_OsC2144_1
ggtccaaacatcactatgtatagatcgcctttatatatacgtacatgtcctttgcatctttgaacagacaaaaaaaagtattttctttgatggaacacaaatacagtacttaatacacgagttccgcttgagttcattccagctacaacaagcttgaaacaccgacactacactgtctaatcgaatcgtgcaccaccttcaattcccctcctgacatcacaggcttatgtcacactcctacgagagcccaccaaccccacccatggcagcagcaggggcatatggcacgccattttccgcggtgttccctcccacgacgaaaaattgcacgcgaggaacacgcacgaaaaggtcccgcacgccatccacatggccctgtgtacgtaacacagttctcacggtcatctcaacctggcggcccctccgctgctgctgtacctcgcccacgacgcggccaccacctccggcaccacctcgcgctcgcgccccgccgccagccgcgacatcgccctcgccctcgtcaccttcttcaccagcagccgccacgtcttgtccgccttctccgcccgcatcttgcccttgaaatgactgcacagcggcacgcggcatgggcggtcgccgtcgtcgtgcggcgccgcccggtcgcagacggaggcgtggaggcggaacagctgcaccatgcgcttgcagcgcgtgcacccgccgcccggcgcggccttgcgggcgccgcacgtcgcgtagtgccgcatcagcaggcgcaggccgcggcacggcggcgcgtcggtgtcggcgtcggcgtcggcgtcggcgcaggagcagccgtcgtcggagaagatgtgctcgagggagtccatggcctcgccgagctggcggtacgcctcccgggacgccctctcccgcgcccaccgctccctccgctggtcggcgtcctcgaggagctggaggatctcgagctccagcgcggcgtcgtggcggcgcgcgaagcgccagccctcggaccgctcgacggcggcgaagtccttggccgcgaggcgcgcgcaccgcaggtacagccgcggcgcgtcgcagagcctggcgagcttcagcatgtccaccgcgtgctccggcgtgagccgcgccgtcacggacgcctccgccgcgcgcttcagccacccgatcctgtacgcgtgcgacagcgccagcagctgcggcccgtgcgcggtcaccacctcctcgtcctccggcgtcaccctggaagcgtagagcaactggaggaaggcgaagacggcgtcggaggagacgccgaggacgcggatggtgcactcggcgttccacccccgccgtgcccgctcgatcatccgctccagcaccggcgacgccgtgccaagaacgaacgaatgggcggcgatgctcttcccgtccgacgtgacgacctgcacgtcggcggccaccgccggccggagcgcgtccagatccgcccactgcgtcatcgatcagaaaatacccaaattctcgtgattaacaattcaacaggccggctaaccaagaaacgatctactacggaaaccaaacagagcaacgcaacaacaagatggatcgatcgatcggtctcgcaacgatgatctgagctgagaaaa

SEQ ID NO: 21107 - DNA, 2563 bp, Oryza sativa
  Clone ID: TF_OsC3651_1
aaaatggcacaggtgttggatgtagggctcttaaagacaaacgatttggttatcacaaagagtatattaactttgtttctttacagtaacccgcctcacaccagtattagacttcatgccaagcttcagcatggctttcttgctttttttctcactacgactctgcttagatcttccacttgcatcacctccgtcagcatcatcgtcatctttgtcatcaagaaatggagtgcctccgatccttgggcggcttcgtccgcaccctgccgccgccgagcacgtccgatcgcaagaacgggttgagcgccccgacctttttgtttttttttttggcgtaggaagattataataacaaagcttgttgtgatgatgacagcattttctgaaacagaacacatgcatatgatcactgctgtgaatgaagaaaacaggtaacaactaacaacacagttaaatcctgattatcaacacaagagttttgtcattcttatttctttgttgcaagaaaaataggtttcactgaaaacaagaatcactggaacaaccagagaatttttcttaagcattcactgggcttctgatggtgcgctgttcagtacttaatggtgcttgttctcaaataggccatcgggtccccatgggaactccttgttacggatgtgcagataggggtacgccggcggctcgtcgaagtgggggtggcccttggagaggttgtacgccgccagcagggtgcaggtgacgatcccggcgtaggtgatcttctcccacttggccgtctcatgggcgtcgtcgtgggcggaggaggacatgcggcgcctcgccgcgggggcggcggtcgccttggcgcgcgccgccagcgagcggaggccggatctcgccgccgccgatgccatgggggaaggtgggtggtggcgccgctggttttgggggaaacgggtggagagatcgagattagatgccggccggtgtagtccaggtcgaggtagccggccaggatcctctgcacggcgtcgatgtcgtaggccgttgtggcggcggcggcgtcgggcgaggaggacgggatgaggaggtcgtcgagcacggcctggccgagctgcgccgccattcgcttctcgaggtcgagccggcacgccagcgtcgtgtcgaggtggatcgcggcgcggagcagcatcgacaggaagctcaccgacagagtgttcctctccctcggcagcaggctcacgatcgtctcgagcaccacccgcttctcgtgctcctgcctcgcgcccatcttcttcctgtccctcccgtgcatgtccagccgtcgaagagatttctgggcgtagagcatgatgagtgtccccatggcgatgcccttgaagcccctcgccttcatcgcgatcatgacgcgctggaacgtgtcgatccgcagcgccgtcagctcgtcggcgcaccagtcgtcgacctccctcgacgccgcggcgcccacgccattgtagccgccgccgccgccgccgccgggggtgcccagcgacatgctgaactggccgtcgccgccgcagacgatggacgcgacggcgtcgatgcacctggcgacgagccgcgccttctcctccgacgccgggaggagctcctcggccttgcggagcacggcgaccgcgccctcgaggctcgccagcgccacctcctccaggtaggcctccgtcctgccgaccaggttgcccggcctgcactcctcggtcatctcgaggtgctcgccggcgcaacgcagcatggcgacgttgtccacggtgatctcgaagttgacgccgtagcagaacttgacgacgagctcgaacgacttggagccgccgggcatgccggcgatctccaggtgcgtcgccttgttgccgccgactcctgacacctgcttcttgatgtagccgcacctggatgccaatggaagcttgtgcaggttgaaggcggcatcgtcgactttgatggtaatatcgcttgggagttcttgcgaaagtatcgggtgcagtgagtgacgcaggtgcggcaccctccggattgagccgcggttgccattggacccgcgtggtggctggacgccacacaatggcaattcgtacggcggcttgtggatggaatcggtcccgaatggcttgtgcttgctgctgccccacttgccctttttccgctgttcttttctcaccgccgccaccccgccatgacgagcgcctccgagctcttcaccgcccgccgcgcccgcgccgcccgcctctccgaccccgatccggacccggatccgcctgcggacgcgctccatgacccgcacggcctcgccgatcgccgcggccggcgccggggctgccgcccgcgccgccagctcgacgccgccggggacgtccgccagcacatagacaatagcaacattggggactctgcaactaggaggaaccgactggataggctgatgttcagaacaaatgagcggcttcctggtgttcgggaacagggatgctccatatgaagcaaataggtccagctcatcattggcccatccaagtagcgagtcagatgaagaaaggtcacccat

SEQ ID NO: 21108 - DNA, 1767 bp, Oryza sativa; identical to SEQ ID NO: 11422
  Clone ID: TF_OsC359_6807

SEQ ID NO: 21109 - DNA, 1046 bp, Oryza sativa
  Clone ID: TF_OsC97452_1
gcacgtcgccaccaccgtctccgcttccctttccattcgcgccgccacctcgccgtcgcacccagcggcggcgccgccgtgccggaggagcggcgatgtggtgccagtcgtgcaaggaggagtacgaggaggaggacgccgggacgtgcaaggagtgctacgaggaggcgagcgagacggaggaggagctcaagcgcgagatcgacgacctccgctcccgcctccacttcctccgcctcccttccccttccctcgacgcctcctccctctcccactccgacctcctcctccacgccatccccgccgatgcgcccgcccgccccgacacccccgccgtccccgcccaccgcgtcatcctcgccagcagatctcctgttttcagagctatgcttgagaacgagatggaagagagccggagtggcatcatcaaaatatacgatgtgtcctacgacgtccttcgtgctttcgtccattacatgtacacagcagaagctctccttgacgagcagatggcatctgatctcctggtgttggctgagaagtacgaagtgaagaacctgaaggcctactgtgagaaattcttaacatccaaagtgagcaacgacaatgccatcacgcattatgcgtttgcgcatcgccacagcgcgaagcagctgctcgagacatccctggcagcgatcatggacaacatgtcaacgctggcagatcgggaggaatacaaggagcttgttgagaaggacccaaggcttgttgtggagatatatgaagcctatctgaacagacaagtgaacactgctgctgggaaggagacagattccagtagtaggaaggggtaattcaaaagaaaactgctatcagagatgtaattaatgttctaaccaagcttttgcatgttcatgctaggcaaagactggcacatcaaattgtcatcctgcggtgtaggcgcagaacagctatttctgtatatgcttgaattgatactgtgtgctcgctactgacaaaaaaaaaaaaaaaaaaaaactcgcttcaatataaaaacgaaaaaa

SEQ ID NO: 21110 - DNA, 1503 bp, Oryza sativa
  Clone ID: TF_OsC299619_2
atggccaccgccgcctgcggcgagagcccttcgcggttgggctccgcctccgccatcgtcgccgacacggagaccaggtaccacctcctcaagatcggctgctactcgcgcaccaaggcgacgacccccaccggctccttcctcagttccggccagttcaccgtcggcggccaccgctggcgcatcaattactaccccaatggggaaagcgccgactccgcggattacatatcgctttacctcttgctagacgacaaggccaccaatagcagtgtgaaggtgcaggcacagttcaagttccagattagttccaccgaccaggtgaagaacacaccttcattggcatccacgaatgtaaatacatatggtgaggattctagctggtcttggggtcacagaaagttcatcaaacgggaagatttcgagaagtccaatgatctcagggacgactccttcaccatccggtgcgacgtagcggttatcggagagatccgaactgagaagacgaccgagatcccatcagccacaacattcgtcactgtacccccgtctgacctgaaccagcagctcgtcgacctgctggagaccgagaagggcgccgacgtggtgtttgaggtcagcggtgagacgttcgcggcgcacagatgcttgctagcagcccggtcgccggtattcagcgcggagctctacggcttgatgaaggagggcgacaccgccggagtcgtgcgtatcgaagacatggaggcgcaggtgttcaagctgttgctccgcttcatgtacaccgactcgttaccaaagatggaggaggaagacgtcatgtggcaacatctgcttgtcgcggcagatcggcatgatctacagaggctcaagctgatctgcgaggacaggttgtgcaactacattggcgtcagcacggtgttgaacatcctggtgcttgctgatcagcatcactgcgacgggctgaagaaggcgtgttttagttttcttggctcactggagaacctgagtgctgttgtcaccggcgatggcttggagcatctgagcaggagctacccctctcttatgaaagaactatttgttgtgatggcacttccaccgaatcatgcttagaacctttctcatcaggtatactatgaaaaccaaaacttcaatgttttactgcttttgatcaagaatagtgacttgactggagttaatttgaagaaaacaggctggcagggcccgtcacttgtgtctgaatatgatgtatcatattcttcaggggatccaggaaaattgccaccaatcgagcgtgtgactgtggagaatgctcaaggggtggatcactgccccgtttcagcttccggcagagagtggtgctcagcttgtggactggtggctgatggcaaggagcgtaatgcccggatcttcgagcagagatcgcgcacagcaggtcagctatttagtggcatcagagagatcatgatctggaaggaggctggaatttttcggcaatgtgattag

SEQ ID NO: 21111 - DNA, 1566 bp, Oryza sativa
  Clone ID: TF_OsC243412_1
cgatcaaccaaacctgttgcgttgcacgcgatctccaactagaagaacatggcgtccaactctccggcgacctccgacgccgccaccggcgacgtgccggagccgagcaggtcgtccagcgtcgtcaaggcaatgtccgggtaccacgtgctcaagatggaggggtacgccgccggggtcaagggcctcggcgttggcaagttcatcgactccggcagcttcgacgtcggcggccatcgctggtgcataagatactaccccaaacgcagcccggcctcccccggcgacggcgactggatatccatctacctgaacctgtgtagcacggccgccgccatcggcgacgccaatgcaagtttcaccattagtctcctcgaccaggacgacgacgagcatcagccggtggcggcgcacagccggagctgctcctcaacggttaccttctcctccgccgccaccaaggcttggggtttcccccgattcgtggagaggaagacgttggaggagtcgccatacctgagggacgacagcttcgtcctccgctgcgacgtcaccgtcttcaaggagaccatcatcgagccagctgctccgacgccgctcgtcgccgtgcctccgccggacatgcaccggcatctcgggagcctcctctccggcgggcatggggcggacgtcacgctccaggtcggcgacgagacgttcgcggcgcaccggtgcgtgctcgccgcccggtcgccggtgttcatggcggagctcttcggcccgatggcgacgagccgtcacaacgacagggagacgatccgtgtccacgacatggagccgagggtgttcgaggccatgctccacttcatctacaacgactcgttgcccaaggtagacgacgacgaggtggtagccatggcgcagcatctgctcgtcgcggcggacaggtacggcatggagaggctgaagctgatgtgcgaggacacgctgtgcagccacgtcgacgccagcacggcggctacggcgttgacgttggctgagcagcatcactgtgaggggctcaaggatgcttgcttcaaattcatggcggatcctgataatctcaaggtcgtcatggagagtgacggctatctgcatctgacaaggagctgctcttatgttcttaagaagttggctacttgaattgggagctgttaattaatgaggttcagtggcataccttttttataattaataaagttgatcatactttattgtaattacgtcctgattactgtatacattttgtgtacaagcttcattatgatacgagtctccatatatggataatgcatctttgaaaaaagaaaagtcttcagagtccctccgttccatgttataagacgtttggtttataaaaatttacacatatatttctttagataaatagggtcttcctatttcgggggctttagtagggtttactattattcaggggttatgatctgcgcctgctagagatgcttttgtgtgtactatccataccatacatgtaaattttactcatataaagtggattcgaactaaaaaaaaaaaaaaaaaaaaaaa

SEQ ID NO: 21112 - DNA, 1035 bp, Oryza sativa; identical to SEQ ID NO: 11441
  Clone ID: TF_OsC389532_1

SEQ ID NO: 21113 - DNA, 1065 bp, Oryza sativa; identical to SEQ ID NO: 11434
  Clone ID: TF_OsC389533_1

SEQ ID NO: 21114 - DNA, 2582 bp, Oryza sativa
  Clone ID: TF_OsC100212_1
atgagcttgcttgaaaattcagtagattctaacctacaaatccatcgaacgactaataataggaaggcggcgctggcccgcgaggtccgcacgcaggtcgacgccctccaccggtgcttctcctggcgccacgccgaccgcgccgccgccaagcgcgccacccacgtcctcgccgagctcgccaaaaacgaggaggttgtgaacgtgatcgtagagggcggcgccgtgcccgccctggtgtgccacctgaaggagccgcccgcggtggcggtgttgcaggaggagcagcagcctcggccgttcgagcacgaggtcgagaagggggctgccttcgctctcggcctcctagcagtaaagcctgaacatcaacaacttatagttgacgccggtgccttaccactgctggtgaatcttctaaaaaggcacaaaaatgctacaaacttgcgggcagttaacagtgttatcaggagagcagctgatgcaatcaccaatctagctcatgaaaatagcaacatcaaaacttgtgtcagaattgaaggcggaattccacctcttgttgaattgctagaatcacaggatctcaaggtgcagagagcagctgcaggggccttgcggacgctggctttcaaaaacgatgaaaacaaaagtcagattgttgattgcaatgcgttgccaactttgatattaatgcttcgatcagaggatgctgcgattcactacgaagcagttggtgtcattggaaacttggttcattcatccccaaatatcaagaaagaggttctcaatgcaggggccctgcaacctgtaattgggttattaagttcctgttgtacggagagtcaaagagaggctgctttgttgctagggcagtttgcttcggctgattctgattgcaaggtccatattgtgcaaagaggtgcagtccgtccgctgattgaaatgctacagtcagctgatgtccaacttagagaaatgtctgcttttgcccttgggaggcttgcccagagaagttcatttgtttcccaggacacacataaccaagcaggcattgcatataatggtggtttggtgcctctactaaagcttctagactcaaaaaatggatctctgcaacataatgctgcatttgccctttacggagttgctgacaacgaggactatgtgtccgacttcattaaagttggaggtgtacaaaagttgcaagatggagaatttatcgtgcaggccacaaaggattgtgtagctaagacccttaagaggttagaggagaagataaatggacgagtgttaaaacacttgctttatatgatgagagtaggagaaaaatctgtgcagaggcgggttgctctggccctggcacacctctgtgcgcctgaagatcaaagaacaatttttattgataataatggccttgagttgcttcttgatcttctggtttcggtgagcctgaagcatcagctagatggttcagtagcactatacaaattggccaacaaagctgcagcactttctcccatggatgctgcacctccatctccaacaccacaggtttatcttggtgagcaatatgtgaacagttcgacactttcagatgttaccttcttggtggaaggaaagcgcttttatgcacatagaattgcattacttgcttcttcggatgcatttcgtgcaatgtttgatggcggatatagggaaaaggacgcgagagacatagaaattccaaatatcagatggaatgtgtttgaactcatgatgagatttatctatacaggttcagtggaagtaactagcgatatctctcaggatcttcttagagctgctgatcagtatctattagaaggcctcaaacgtctgtgtgaatatacaattgcgcaggatgtgaatgtagacaacgtttctgacatgtatgacctatctgaagcttttcatgcaatgtcactcagacatacatgtgtcctatttatcttggagcagtttgaaaagatttgcgtcaaatctgggtcaagccagctgatccagcgtgtcatcccagagctccgcaacttcttcgctaaggcgctaaggccaagccacaggaatgcgcagccatgagtccgtgccccttccacaatccttgacaccacccacacatctgacagtcgcttcgggagatcttgtacagctaaaagtttctttttctggcgttggacattggcattcgatggcaccaacaacattgtaacatccttttattcgactaaaacagagcccaaatcatggtaagagcatatggcttagccagccatgtctcggaccagcctaggctgggataggtttacttcgtttcgccttggcatagtcaccgagtttagggccactttcccagtccagagctccgtgtatgtccgtctctttgatgatgcagaggataagatcgatctgtgtattagtgctgtagttgcaatcagtttcgtctccttcgtgttgtttaacaatgcagaaatgctaatcagattggcgttttctcccaaaaaaaaaaaaaaaaaaaaaaaaaaaaaaaaaaaaaaaaaaaaaaaaaaaaaaaaaaaaaaaaaaaaaaaaaa

SEQ ID NO: 21115 - DNA, 1036 bp, Oryza sativa
  Clone ID: TF_OsC951_13
tataaatacttgttgtttatgtcatgaatcggataaaactttataattcttcctgcctattatctcccacaaatccaccatgaaagaagggcaagatagcttcatcttctcgtacccttggctttccatgacgccttccatcttcttggaggtggccaagaactcgatgcacgcctccttgagcttctggcaatggtgctgatccgccattgccagcgtcgccgcgacggtgtccacggcgatgctcttgcagagcatgagctcgcagatcagcttcagcctctcgacgtcgtaccggtcggcggcctcgagaaggtgcatgatcatctgcgccttgtcgtcgtcgtcgtcgtcgaggtcgtccatggcggcggtcgtgtcggtgtagatgaagtggaggagagcccggaacaccgccggctcgacgctgtcgatggcgacgcggccggcgttcgcgtccgtggactccttcattggcccgtagagcgccgccttgaacaccggcgaacgcatggcgagcaccgcccggtgcgcggcgaactcctcgccccgcacgacgagcgtcacgtcggcggtgcccttgtcgccgaggagcccggcgaggtggccgaggatgttcgacggcggatggtcgagctccggcgcgtcgccggcggtgacgacggggtccaggacgacgttgacgacgcactcgatggtgaggcggtcgtcgcggacgaaccccatctcctccagctcgcgccgccgcatgaacctcaggtgcccccacgccgggaacgcctgggacgatctagggtttctagggttttgggttgcggcggcggcggcggcgagagggcgagggcgaggtcgagatggcgtcggagagggtgaaggggacggtgaagtggttcgacgccaccaaggggttcggcttcatcacccccgacgacggcggcgaggatctcttcgtccaccaatcctcggcaggcttccctgagcccgcggcagccatggcggtcggccaatgccaatgtgctcgccaccgtctgcgccg

SEQ ID NO: 21116 - DNA, 4194 bp, Oryza sativa
  Clone ID: TF_OsC951_1
ctaaaccttgcgtggagttttgatttcgatgaggccaatccgagaacgaagttcgatgaatctgtcccccccgagtcccttcgtcaggatctccgccaactgcgcgacagtgccgatgaacccggcctccaggctgccctcctcgatgcattcgctgatgtaaaggtatcgtgtgtctgtatgtttgctgcaatcatggaagagagggttcttacggggcatgattgtgaagagtgggtcaaacttttacgtgactgcgtccgcctccacggccccgtgctcagcaaggaggggcgccagccacacgcgttggcaggccaccgttgtcgctgcgatgtactgagcttcgcgtggcgacggggccagagccttctgtttctgcgacagccgcgcgtgctgcaagtgcgggagggaggggcacatggccagggactgctcccaggggaggaggcggcggtggtggctacggtggtggtggcggcggctaccgcggcggtggtggtggcggcggcggcggcgggtgctacaactgcggcgagaccggccacatcgctcgcgagtgccccagcaagacctactaggcgctgctcgcggcgtcagatccagctccctcccatgatgcgttttgctccccctccctcactgaatcaccgagcagcgggtgatcagttctatcttattagtagtcgtagatctcgttaggaaagctatggatctatcggttcgtcgtcgtcgtcgttctatgtaatgggatgggagtcttggagtggtttaatctttttgtttcgttgggtcggtttgagagacaagccatggatttgcactgtctgatctatctatgaatctatctattatgaaccgagaagaaaatattcatcagctcgctcaagaccgacggctaccgcagcctcaacgacggcgacgtcgtcgagttctccgtcggatccggcaacgacggccgcaccaaggccgtggacgtcaccgcgccggggggcggtgcgctcagcggcggatcccgtcccagcggcggcggggaccgcggctacggcgggggcggaggcggcggccgctacggcggtgaccgcggctacggcggcggcggcggcggctacggcgggggcgaccgcggctacggaggcggcggcgggtacggcggcggcggcggaggcagccgcgcgtgctacaagtgcggcgaggagggccacatggccagggactgctcccagggaggaggcggcggcggtggctacggtggtggtggcgccggctaccgcggcggtggcggtcgcggcggcggcggccggcgccacaaccgcggcgagaccggccaccgcgctcgcgagcgccccagcaagacctactaggcgctgctcgcgccggcgcgactccaggtccctctcatggccccttgcgccccccccgtcgttgcactgccatcggccgagctactcgcgaccagtttctatcttctaaggagcgccagatcctcgtcacggaatgtatggagctggcgtgtcgccgtagtacacctaccgacgcaggcgcctgggctcttgcggcgatcaggtcgtcgagcagctcgcgaacggcctggccgggccgcttggggggccgaagcccgtcgtcaatgcgagggtgccgaagtggcgcggcatggtggtccgcgtcgagatcatcctccacgtcaggcggaggagagacgaactccaccggcggctcttcggccagaggcggagttggcggagtcgagcctgatgcaggcgagcgcggcgaggccggagctcccccgtgctccgtgccgatttgcgtcggggccgccgtcgctaggtggtacaccgtggtgtactcgatggtgaagccggagtcgacgttggcggccgcctcgccatcccaattccactgcgcctccttgtcgaacaccacgtctcgggagacgtggacgcgccgcgtcgccgggtcgtagacacggtacgccttggagccaggctcatagccgacgaaaatcatcggccggctgcggtcgtccagcttcttcatgttcggcgccgtgaccttcacatgtgccacacaccggaacgcgcaggtggtgcacggccagtgggactccattccaaagctcgtatggggtcttgccaccaatgctcttggacgagctcctaggagtcctttggccttaagcatgcttcgcgccgtgcccacaacggactggttccggcgttcgacgacgccgttttgttgcggcgagtagggagccgtcagctcgcgttgcaccccgagctccgcacaatactcggtgaagtggccgacggtgaactcgcccccgcgatcggtgcggagtgcccaaagcttgcggccgctcttgcgttcggccgccgcctgaacgcgcttgatggcagccggtgcaccgtctttggtggcgaggagcgtcagccacatgtagcggctgtagtcgtcgacgagcaggaggaagtagcggttgccgctgggtgtcgccggtgtgatcggaccacaaagatcgccatggatcagcgcgagcagctcagtggcgttgtggagtgcctcttgcgcgaagggggcacgccggtgcttgccggcgaggcacgcctcgcatacccgttcgacctgcgacaagacaggcaaaccacgtaccagggactcacggcccatcttgcgcaatgcagcgaagttgatgtggccgaaacgagcatgccaacgccacgcgtcctcccccgcgcgcgccatcaggcagaccggccgtgcaaggttgatgtcgagcaagtaaagccggcccgggctgcgagctatgcaagcgagcagacgacgccgctcatcccacacgcgcatgacgccatcctcgaccaccaccttgaagcccgtctcatccagctgccccacacttatgatgttggcggcgagacgcggaaggtagtatgtgttgtgcagcatgcggtgttcgctgttcttgcaggcaaacagtaccgtcccgcgtcctccgatgcggacgagtaagctgtccccgagccagacattgccagcgacattggtgtcgatgtcagagaacgccgccctcgagccggtcatgtggttcgacgcgccggtgtcgaggatccagcacttgttgtcgtggtcggtggcgtcgtccagcgcggtgaacaccttttgctcaaccagctcgatgacgtctgggcgaggctgcggcgcgagcggcgatggcgtcgcgcactgcgcgcccgtctcctccacctcatcaatgcagctgcctgtcatgagcatgagcgtgggctcatcctcgtcctggaccacgtgggcctgctcctgcttgggcttgctcctgcaatccttggcacagtggccaagtttgccacagttgcggcacttgtcggtcttgcgagctgggccaacgccagtgctgtccgcgttcccgacgccaccgccgccgccgctagtgtgcccttgtccgccgcggcgcttgccacggccgttccctccgccattcctcttcttggcctcctgctgcttcttcttgtgacgttcaagccactcctcctcagtgaggtagagcttggccccggcacctggtgaagacgaggacgacgactggccggagtcctcaaccgccttgaggcgtccagtgacttcctccagcgtcaaagtggagatgtcaagtagggtttcaatggagagaactagctgggagaacctgggacgcgcgacgcagagatatttctcgacgactttgtcatctggctcgggatcccccaatgtggacagctgcgtcacgacggtgttgaggcgcatggcgaaatcctcgaccgactccccgtcgcgaaacgcgagagcctcgtattccgagcgcagcttctgtgcactcgccttgcgaatgcggtcgttgacgacgcgcatggtcttgatgcagtcccacgccgccttcgccgtctccttggtcgccagcgtggagatcatctccgcggggaccacgctgcagatggcatcgagtgtcatccgatcttcatggagctcaacctctcctgggtcgattgctccccacaagcagcgagcttgcaacttgatcttcatcaacagtgaccatacgttgtaattcgtcttcatgagcaccgggttgtttgccggacctcccgcctccttgaccacgcggtgaatcaacagcccgcgatcattcccgccactgcccat

SEQ ID NO: 21117 - DNA, 1325 bp, Oryza sativa
  Clone ID: TF_OsC12993_1
ccacgcgtccggttcgtccgccctccacctccgacgcggcggcggcggcatgaagcggcaccagatggagtcggtgccgaggacggtctcgacggtggtgcccaacacggcggaggccacccacgtgttcgacatcgtggggtacagccagatgaaggggaggggccgcgaggagcacgtcacgtcggggaccttcgtcgtcggcggcctccactgggccatcctcctcttcccggacacccacgtcatcctcctcgacgacgaggaagacaacgtcaccgccttcctcgagctccagagccaggggggaagcaaggtgcgggcgtgctgcgacgtcaggctggtcgaccagaccaccggcctcgcctcctctgctgcgccggcgcagccggatgccaagacattcaaggtgttcaatgccgatgaatccaacagggtcagctgtctcaagatgaagaggaccgaattcgaggcgccgccgtatctcgtcgacgatcggattaccctggagtgtgtggtcactgtcaagaaggagccgagggtgtcgagagctagaccagtcccgaggatcaaggtgccgccgagcaacatgatgcagcaactcggcgatctgctggagtccaaggagggggcagatgtggtgttcgatgtcgcgggggagaccttcccggcgcacaagcttgtgctggcgatgcggtctcctgtcttcaaagcggagctatgcgggccgatgagggagagcgggacagagcctatcagcattgtggatatgcaaccggttgtgttcaaggccctgctccagttcatctatactgattggttgccgtcaattcgtgatcttgagggagacgataacagcgagatgatccggcacttgcttgtcgccgcggacagatatgctgtggacaggctgaagctgttgtgtcaaagcatcctttgcaagaatcttcgtgttggtaacgttgcaactacactggctctggctgatcaacatcattgtggcatgcttaaggatgcttgcattgaatttatgtcatgtccaaacatgttggatgatgtagtggcatcccaagggtttgtggatcttgaaaacacagctccttctctcgtcgcttaggcaaaggaaaaaatgggcaggttcaagaaaatgtcgaggatgacaaagagcaatgcaccggaagatgaacctaacagtaattcgtttagtttataagtaatatggatatctgtctacttttactggatcaggtccttgtggttactttactctctatataaatagaaataacttaaacactggtattgcttgcaaaaaaaaaaaaaaa

SEQ ID NO: 21118 - DNA, 924 bp, Oryza sativa; identical to SEQ ID NO: 11445
  Clone ID: TF_OsC356569_1

SEQ ID NO: 21119 - DNA, 1215 bp, Oryza sativa; identical to SEQ ID NO: 11477
  Clone ID: TF_OsC299619_1

SEQ ID NO: 21120 - DNA, 1188 bp, Oryza sativa
  Clone ID: TF_OsC299619_11
atgggtcaatgcgccatgtctcacacgcgctctaccaccgccggcgccgccggcggtaagccgccgatcgcgccgccgccgacgtcctccgcctccgccattgtcgccgacacggccagcgggtaccacctcttcaagatcaacgactactcgcgtaccagggacatcttccccaccggcagtgccctcaagtcccgcgcgttcaccattggcggccaccaatggcgcatccattactaccccaacggcaacacggaggagtgcggcgagtacatctccctgtttcttcatctcgacgagattgtcaccgacaagaacgtgtacgcgcagcacgggttccgtttattcgacgagtttgccggtgataatgatgacgatgatgaactgcagccttcctccatcgctgacctcgggcaggtcagtacctttggtggcaacaacattgggttgggacgactgaggtttatcaaaagggaagagttggagaaatcgaagtatctgaagaacgactccttcaccgtcagatgcgatgtcgtcgtcaccaagcggatccgctcggaggagacgccattggtggtgaggacctctccaaagccaaaggtggcgaggctcgtcaccgtgccgccgtccgatctgcaccggcatcttcaggacctcctctgcgccgagaagggcgccgacgtggtgttcgaggccggtggcgagacttttaccgctcaccggtgcgtgctcgcggcccggtcaccggtcttcagcgcggagctgtttggatcaatgaaggagagcgacaccacggtggtcatccgcatcgacgacatggaggcacaagtgtttagggccttgctccgcttcgcgtacaccgactcgttgccggagacgaaggaggaggacgagggcgccatgtgccagcacctgctcgtcgcggcggacaggtacgccatggagaggctcaagctggtgtgcgaggagaggctatgcggccgcatcggtgtgggctcggtggcgaccgtcctggcgctggccgagcagcaccattgtgatggcctaaagaaagcatgctttgattttctcagctctcaggagaatctgaaagctgtcacggccggtgagggattggagcatttgagcaggaactgcccttcccttgtgaatgagttgattggcacgctcggcaacttaattcagtga

SEQ ID NO: 21121 - DNA, 1935 bp, Oryza sativa
  Clone ID: TF_OsC5514_1
gcgaggcgcgagcgagcagggcgccgtcgttcgtcatgctgcttccgccgcatcctgatatttatactcattgacgcttgattgcccaagtttggtggtaaacctgaaatctgtttacgatgaaagtggaggagaaaaaaagatctataacagttgcccccttcgagtgtgcttgggatgaggagtttcggttcagggagactggtcgcgggtgcatcacctttgaggcatctgcacacaatgatgttaccctggtgttccgcgaacaacctgggagccagcattatcactacaaaatggataacagtcgtcactacattgtgatcttgggcagccataggaacaaaagattgaaaattgaagtagatggaaagactgttgttgatgttgctggcattggcctatgttgctcctcgtcttttcagagctactggatcagcatctatgatggactgataagcatcgggcaaggaagacatccaaataacaacatcctgttccaatggcttgaccctgatcccaaccgaaatgttcagtatgtgggactatccagctgggacaagcatgttggatacagaaatataagtcttatgccatcagctcctcaaaacagcatcctttggagccaaattgagtgtgcatatgttgagccggatggtgctggagggcatacaagaaaacaagaatcaaaagatggcttagaccaaagggcacttgcaaactttctagagaactgggatttctcagattctatatttgtggttggcagcgaaagaaaggttgtcccagctcacaaagttgtcttgggttcttgtggtgatttcccttttaacctgatgatgagtcgaccagctattgagcttccatctgtctcctacccagttctgcactcccttcttgagtacatctacacaggttctacgcagatttcggaatggcaactggtttcactgctggagttgagttcacaatttaaagttaaaccattggtaatgtattgtgaagaaattattggctgtttgaagatgagtgatgcagtttctgagtctagcaaaaaaatacagttatcaagtggtggttctcaagctcatcaattttattatttccctttcaaagctccattaaatacacagaaaattgaacagttccttgtaaatggtgagcacagtgatgtaaatatctatgtaaatggacatggtcttgttactcatgctcacaaactcatccttagcttgtggagcatgacatttgacaagatgttcacaaatggaatgaaagaaagcagtgcttcaaatgtatttttcgaagatgttcccgtcgaagcattctttctcctcatccaatttatgtacagtggggaacttaaggtggatatcgaggaaatcacaccagtgttggttgagttgctcctattgtcagaccagtttgggatcacggctcttcagtttgaatgctgtaaaagaattatggaattcctctcaaaggattcgtgtcctacaggaagaagctcatccaccagggctaatttctagtttttttatgggataatcggatatggcttctgcaaatttggtgaatttgctagctggttcagtgtagacttacccctgaaagtttcttgcaggacacagtatgttcagttctacgagcagtttcgtcaattccatcttgtaaactgcttgaagaaatgtgcaagaggaattttgcagaacactttgattattgcacaactgcttgcacagactttgtgttgttggatgaggcaacatttaaggatattcttcagcatgggcatatgactgtaacatcagaagagagggttctggatgccatattaacatggtgcatggaggcttgtgactgttttaactggacctctgtgcacgagctcttaagcacttcaagaccagagaaactctttggagggaggctcac

SEQ ID NO: 21122 - DNA, 2319 bp, Oryza sativa
  Clone ID: TF_OsC299619_6
atgggtcagtgcgccatgtctcccgcacgctctggcaccaccgccggcagcggcggcgggccgacgccgtcgtcgtcgtcgtcgcgatccgcctccaccatcgtcgccggcacggccagcgggtaccacctcctcaagatcgacgactactcgcgcacccgggatctcttccccaccagcactgccctcaagtcccgcgctttcaccatcggcggccatcgatggcgcatccaatactaccccaacggcaacacgcccaactgcggcgattacatatccctcttccttcatctcgacgaggaagtaaccagggaagtgtacgcgcagctccagtttcgtctgctcgacgacgagttgggtgacaaattaccgccgccgccgccgccgccgtcgctggatgcgaacaagttcttcagccatgccagttgggggcaaccaaagttcatcaagaaggaggaattggagaaatcgaggcatctcaagggcaattccttcaccgtccggtgcgacgtcgtcgtcatcaccgagttcgtcgcgaaggatatgcccgaggcggcgaccgcgacggcggcgagaagaagaacccctgcgaggggaactggaagcttcgtcagcgtgccgccgtccgatcttcaccggcatctcggtgagctcctcctcggcgagaagggcgccgacgtggtgttcaaggtcggcggcaagaccttcaccgctcaccggtgcgtgctcgcggcccggtcgccggtgttcggcgccgagctgctaggctcaatgaaggagagccgcaggaaggccgtcgtccgcgtcgtcgacatggaggcgcaggtgttcaaggcgctgctccgcttcgcgtacaccgactcgttgccggagatgaaggagaaagacgaaggcgccatgtgccagcacctgctcgtcgcggcggacaggtacgccatggagaggctcaagctggtgtgcgaggagaagctatgcgagcgcatcgatgtgagctcggtggcgaccgtcctggcgctagctgagcagcaccattgtgatggcctgagaaatgcgtgctttgatttccttagctctccagaaaatctgaaagctgccatggccggcgacggcttcgagcatctgagtaggagctgcccttctcttatgacggagttggttgccatgctcgcagcagcagcaacaagcgacgggcctactttgccgccggtgatgagccatggagcattgtctccgacaaccgccgccgccgtgtccgcgtccgccatcgtcgccaatacctccagagggtaccactacctcaagatcgacggctactcgcacaccaaggccacgcccaccggcgaggccctcttctcctgccagttcgccgtcggcggccaccgctggcgcatctgctactaccccaacggcaatgtcctggaggccgcggactacatctccatgttcctcgtgctcgacgagatcgtcgtcaggaacgtcaaggctcagttccagatttgcttcgccggccaggttgagaagcaggcgccgtccttggcatggaagaccgttcgagcgttcaataagcaaacttcttcgtcttcttcctggggttaccccaagttcatcaggagagaagatttggagaaatcggagtatctcagggacgattcgttcaccatccggtgcgacatcatcgtggtcgacaattaccgtgccgaggacgccagcagcggcgctgccggcttcgtctccgtgcccccgtccaacctccatagccacctcggcgacctcctcaagaacgagaagggcaccgacgtagtgttcgaggtcgccggccagaggttcacagcgcaccggtgcgtgctcgcggcacggtcaccggtcttcaacgcggagctctttggcatgatgatggagagcgacaccaccaccaacgatgccatccaaatcggtgacatggcggcgccggtgttcaaggcgttgctccacttcgtgtacaccgactcgttgccggagacgatggaggagagggaggacaccatgtgcgagcatctgctcgtcgcggcggatcggtacaacctggagaggctgaagctgatctgcgaggaaagattgtgcaagtacattggcataggcacggtgatggacatcctcgcgctggctgatcaacaccactgcaaggggctgaagaaggcgtgcttcgattttctcaggtcgccggcgaacctgagtgccgtcaccggcagcgaaagcttcgagcatctgagcaggagcttcccctctcttatgaaggagcttgttgacattctaggaacttcacataattatgcttggtga

SEQ ID NO: 21123 - DNA, 1062 bp, Oryza sativa; identical to SEQ ID NO: 11466
  Clone ID: TF_OsC356517_1

SEQ ID NO: 21124 - DNA, 1387 bp, Oryza sativa
  Clone ID: TF_OsC16921_1
gcatgtggggttacaagcgtttcttcaaacggtctgccttggaaacatcagattatcttaaagatgattgccttttggtgaattgtactgttggtgttgtccaatcacatactgaagggccaaagatatatacaataccagtgccaccatccaatatgtctcagcatattggccagctactgacggatggaaagagaactgatattacatttgaagttgatggagaggtgttccctgctcacaaggttgttcttgcagcccggtcaccagttttcagggcacagcttttcggtccaatgaaggataaaaacatgaagcgtataacgattgaggatatggaggcttcagtttttaaggccttactccattttatgtactgggatgagttgcctgatatcgaagagcttactggcctaaatacaacttgggtatccactttgatggctcagcatttacttgcagctgcggatcgttatgcattggagagactaaagttgctctgtgagctcaagctttgtgaagatgttgcaataaacacagttgcaaacactttggcactggctgaacagcaccactgttatcagctaaaaactgtttgcctgagatttgtggctttgcctgagaatttaaaagctgtcatgcaaaccgatgggtttgattatttgcagcaaagctgcccatccttgctgaccgagcttctggagtatgtggccaaggtaggggagcattcggtgagcccctgcttgtattcgaacgaagtccttgatggtggcgatgccaatggaagacgtgtgaaaccgcggatttaacggcagccctgataaaaacctagctggatttccttgtgttgtttccgtgtaaagtgttatagttctataacggcacttttctggtgccatattatatcatgcatgttgtagtgtcttgtgacttctatacctccccctatcgttgctactctggagctgagttgttgctaatatatgtgttctactgactagtgtactgcaaaattgcattgctgcgaagcacatggagcttcgcagcctgtgaccataaagtgcactcaggtggcacggcaaaggtggactgggcgcaaggttttgtcggtggaaataacggcgcagaatgtttctatggaagtttaactttgtgcttaggtcagctttgtcgatttgtagtcgtctgtatgactgtaattcaattggaatggtgaaatgcaatgaaatgtatcggttagatcgtgtcaaaaaaaaaaaaaaaaacccgcggcccttttgcttttgtgttcggtttttctattttttctattttctttcttttttttattgctgtggcagagttgtaaactattcgcgatgattttgttgcagatatattttttccc

SEQ ID NO: 21125 - DNA, 891 bp, Oryza sativa
  Clone ID: TF_OsC109153_1
atggcgtccatgtacaggcttccaaggaacgccatctgcgctgcgtgctatgaaggtgccaaggccatcatcgccttcttcaacgacgacgacgacgagcacgccgatgctgatcaaggctcggtgaagcccagcagattgacaaagctcaatagcacaaccaagggattgagagatgcgtgggaggaggtgaagcagatgcgatgcagagaggaggagaccaagcagagggcatcgtttctccagcaaggcttcgcggcggcgtggaaagacggcatccacaccgacatcgccgtcaggcctggaactgggcccccaatccaagcccataaggccatccttgcgaccaggtcggaggtgttccgccacatcctcgccggcgacgacgactgcaaggcccccgccggcgactctctgtcgctaccggagctgacccacgacgagctctcccacctcctcgccttcctctacacgggctccctggcgacgtgcacggaggagcggcacctgcacgcgctgctggtcgccggcgacaagtacgacgtgccgttcctccggcgagcgtgcgaggcgcggctggcggcgggggtggaggcgggcaacgtgctgcggacgctggaggtggcggagctgagctcgagcgcggcgctcaaggagcgcgccatgggggcggtggtggagcacgcggaggaggtggtgttctcgccggagtacgaggagttcgccgtcaggaacgccgccctttgcgtccagatcacccgcgctctgctcgccaataaagcatttcccgccaagacgccttaatattctttttttttccttcgttgatttagaatttagttagacgacgtgcgatgtatacgtgtaaatgatagtacatgcatctctttt

SEQ ID NO: 21126 - DNA, 1185 bp, Oryza sativa; identical to SEQ ID NO: 11415
  Clone ID: TF_OsC341870_1

SEQ ID NO: 21127 - DNA, 1146 bp, Oryza sativa
  Clone ID: TF_OsC341874_1
atggcagctgccagcaccaccgatcaaggtgtagccgttatcaacgacagcccactgtgcaagctcctctcttccggcgacggtcggcacgtcacgttccgggtcgactacgcggccgcgaggcgacccgccgtcgccggccgtacgctgcgcacgacgtgcgccatcggcgacagcggcgcgtacaggtgtgaggcgtccttcaggctgctgatcgggcggagaaagctggccgccttcgccgtgggtgtgtccggcccacgctaccgagacgtgcacaaggtggtggtcgatctcgtcctcgtcgacaatgccaggtcggtggccctgcagccgcctacgagatccatggctatccaggccgccgccgggagcaaccaaggagggtgcgggttgctcgtctccaaggattacctcgaggagaactgcgtgcaggatggcgtcctggtggcggtgtgctccgtgctctttctcccggagttgccaccttgcctatggctggactcgctaggccaccgtctcgccgccatgtcgaacaagaaggacagtactctcaccgacgtatgcttcgacgtcgatggcgagaggttcaacgcgcaccgcctggtgatggcggcgcagtcggaggtgttcaggagcttgctgttcggctccgatgacgccgagaccaagacggagaccgcagtcgtcaccatcgacggcatcagcgccaccaccttcaagcacatgctccactacatctactgcaaccagctaccgccaccggccaccggcgacggtgacgacgatgacggcgaggcagaccatgtcacgaggatcgccgagctgcagcggctgctcgtcgcggccgacgcgtacggggtggaggcgctgaggcaggcgtgcgaggacacgctgtgcgccgggatcaacatggacacggtcgcctcgacgctggcgctgacggagaaggggtcgtacccgaagctgagggggtcgtgcctcgagttcctgtccaacacgcagatttactcggtggcgaccaacgacgagtgctacgaggtggtgcagagctacccggacgtgctgacggagatacgggacagttgtctaatatattatcgttatgctactttcgtcgttgttactgagttagaggatttgtga

SEQ ID NO: 21128 - DNA, 2021 bp, Oryza sativa
  unsure (1)..(2021): unsure at all n locations
  Clone ID: TF_OsC404288_1
atggccgcttcctcaccaccgccatcactgtggaagatgacgacgggagggacagcagcaacaagaggaggcggtggcactgccgacacaagcaagtacaagatgatggcgcttggatctacagctacggctgcaggtcttcatcgtcggctgtcgagctccagccaggcctcttcctgtcagtgctgcctggacgctctgtgtggtgggggtttttctccgaggcgtcgatgcctcgttcatcttcaccggcggaaggagcagaaaggaggacgacgatttgaacagtcgacgcccgctatttccgttttttctatcttcgtcttcctctcctctccgctctcctgcttgcttcttctccgctgtctctccgatgggctcagcttcaggtgagcgagtacacctcgtctcttctgcgtcagctttgtgttccagtgtacgtgctgctgacatgtgcgatcaacgattgaattgaagagcatgatgtcagggagcacctcctggtcgtggacggcgtcggggaagaagggacgccggtggtggcggcggggggggcgggtgttgacngtccttaaatcataatatctgaccgtcaatacctggacgtgccgcgaggggtggtcgtcggtgtcatcgggcccagcggcagcggcaagtccacgctgctccgcgcgctcaaccgcctctgggagcctgcgccgggtgctgtgctcctcgacggcgtcgacatctgcggtatcgacgtcctcgcgctccgccgcaaggtcgcgccgccgccctcctctctcccgcctcgcctgccggcctctgcagtctgcacccgccgctttgccacatcgggcatttgaattttgccatggctgaatcctaatgtctaccttgttaattttgcctccctcattttccggagagaaaattgccttctccaactgagaagcaacaatgttagaaattatatcctccaaaatattaggatggctttgggttaaatactgaaattcatctgtttctatgatcttagccagtgctgttggggagctaaagaactcgatgcacgccttgttcagaccacgacaattgtgcttgtcggttagcaccaagagggttgctacagagtcagcatcgatgtggttactcaacctttcttcgcatttaacctttagcctttctaggccatatttgtccgcagcaacaagtagatgctgagccattgtcgcatcttcttcttgatccatctctagcaacgtatccgtgtagatgaagttaagtagagctttgaacacttgtgcatccatgtcatttatctctatcacgtcgtttacgtttacaccctccttcattggcccaaagtgctccgccacaaagacaggcgagcgcaccgcgagcaccaatctgtgcgcggcgaaggtctcgccgccaactaggaactctacatcggcgcaccgtttacttgagagaagatcgccgtaatgcaggtgcatgtccgacgacggtggcaccgcgatgatgggtggcggcgtttccttggtgattaccacatggaccccgatagcgaagcaatcgtcttggacatgtcccgatttttccaagtcgccctttgcaatgaaggtttcaaaccctaggttgttagccatgtcgtcttggttcgaagtgctcaacagtcgggtggcgtgggtgtgagacggcactggtttcccgtgctggtcgagcaggctgaaggtagcctgcaccatgacagcctcggcgatggcgtcatagagaacgaggtagatagagatgaagtccttgctaatgtcgttctttccgtgtgggtagtagcagatgtaccaagtgcggtctcccgcgttgaacgggaaggaactgagagatctgtaacagtggacttgtaaggtgcgggagtagccatcgatcttgagcacgtgataggcttgcgttgtgacgacggtggaggcggcggctgaccgagacggggtgggacagccgccgccggcgacattggacgcgatgctcgccgtcgccat

SEQ ID NO: 21129 - DNA, 1929 bp, Oryza sativa
  unsure (1)..(1929): unsure at all n locations
  Clone ID: TF_OsC26378_1
aaactcgaccaaacaaaaatatcaattagaaaacttttgacnaccggggaaagaggttaatttggattgacagagattacatatgagaaagaaaactcggccatgcattttctataataaacacaatgactcggtgagattactttgacactaacactaatgaccgggtttgcagaaactacgtggacttaatacccactaattaaaaatctagctaaactaattgtttcatgacgagttcagtcaaaactgaaggacatgttgccttcagatgctcgaagccatcggtagccatggccgccttgaggttgcccggagaagacaagaactcgacgcaagcctccttgagcgcgcggcaatggtgctgctccgccagcgccagcgtcacggcgacgttgcccatggcgacgcggcggcgcagcctgtcctcgcagatcagcctcagcctctccatcccgtacgcgtccgccgcggcgagcagccgccgcgccatggcgtcgtcatcgtcgtcgtcgtcgggcagcgtgtcggtgtagatgaagtggagcagcgccctgaacgcgtcggcgtccatggcggcgagccgcagcgtcgccggcgacgacggcgaggcggagagcttggccttgagtacgggtgacctcgccgcgagcacccaccggtgcgcgtggaacgtcgtcgtctcgccgtcgccgccgtctagctcgatgacgacgtcggcgccttccttgctccagaggagctcagcgaggtgccggtgcaggtcggacggcggcacgacgacgccagcgtcggcgccggcggcgagagcctccgacgaggcgtcgtcggtgcggcgcgccggcgagccggcgtggtcgagcacgctgaaccgggcatggccggcgatgccgctccggccgcagccgccgccgccggcgacgtcgacgaagagggagatggagtcggcgcagccgtcgtcgaggccgttggggtagtatcgcatgacgaagctgtggccgccgacggcgaacctcctcgacgtggcggactcgccggtggcgaggatgctcttcgtgttggtgtacccgtcgatcctgaggatgtgggacccggtcgccggccgcgacacgatggcggaggcggacggcggcgaggcacggcagccggcgacgccgcggcggatggcggcggagagcagcgaagcacacgacatgagacgagagtttggaacgtacatcttctcttcattttctctgaagaaatgtggtgtcggatggttgggaagataatctttcaccatattttcttcattttctctgaagaaatgtggtgtcggatggttgggaagtagagcggttgcatctgcaatggcagcttccaacaccttcacctcttgaaccctagctccctcgcaattaatccatacattgagatccataagagaggtgaggttgcgaatgccaagatcaggatgatcagcgaatgcagattttgccttgtgtgctctaacaacaaccgagatttctctgaccttctgcatggatccatcctcgaagatcaggccgacgaacgatccatacagacggaagatcttcaggcatcggaatatgcatttgctgataatgagaatttccatgggatcatctgattctgaacgcagctccaggtctagcaatgcaggcaagtctccaaggatctggaggatttgctttgtcacttgcttagacctgatgcatagcctgtagagattattcattgaagccatccaatctgggatcctttggaaacagcatttcggaatgtataattcctgacagttcctgtagagattgcatttttccgactccgtcaggtaacttaactgaaatagatccaccacgttgttaagatcagagttttgcaatttcacactgctctctagatccaacactcttaaagctttgaatt

SEQ ID NO: 21130 - DNA, 1116 bp, Oryza sativa; identical to SEQ ID NO: 11463
  Clone ID: TF_OsC174949_1

SEQ ID NO: 21131 - DNA, 465 bp, Oryza sativa; identical to SEQ ID NO: 11468
  Clone ID: TF_OsC340718_1

SEQ ID NO: 21132 - DNA, 1098 bp, Oryza sativa
  Clone ID: TF_OsC391235_1
atggcgggctcctccccgtcggctgcggcaagcggcggcggctgcgaagcggtgccgagcacgtcgaccatcgtggccgagatggcgacgggctcgcacgtgctcaccgtcgacggctactccggcaccaaggggctcgccgtcggcgtgcacgtcaagtccggcacgttcgtcgccggcggccacagctggcacatcaagtacttccccaacggcgccaccgacgagacctccgagtggacgaagggcgccgccgcgaccgtcaaggcgcggtgcaagctcaccctgctcctcgacggccgcgacgggagggcggcattgccgccgccgccgccgttcaccaagagctgcgagctccggaccttctcctccggcaagggcggctccgatcagtggggccacaagaagttcgtgcggcggaaggagctcgaggacccgtcgaagcgtctcctccgccatgaccgcttcagcgtccggtgtgacgtcaccgtcgccgtggggatccgcaccgacgacaccaccgcgaagctcccgccaccgtccgacctgcaccgccacctcggccgcctcctcaagacgaatgcgggcgccgacgtcacgttcgacgtcgccggccacaagttcgccgcgcaccggtgcgtcctcgccgcgcggtcgccggtgttcatggcggagctcctcggcccgatgaaggaggaggacaccgagagccacgtcgtggccatccgcgacatggacgcgagggcgttcaaggccatgctccacttcatctacaccgactcgctgcccaatgtcgacgacggcggcgaggcggcggccatggcgcagcatctgctcgcggcggcggacaggtacgacatcgagaggctaaagctgatctgcgaggacaagctaagcggcggcgtcgacgcgaccacggcggcgacgacgctggcgctggcggagcagcacggctgctgccggctgaaggaggcgtgcctcaggttcatggcgtctccggccaacctcaaggcggccatggcgagcgatggcttcgagcatctggctagaagctgcccttctctcctcaaagaattagttgctaatctcgctgtttaa

SEQ ID NO: 21133 - DNA, 1125 bp, Oryza sativa; identical to SEQ ID NO: 11471
  Clone ID: TF_OsC393414_1

SEQ ID NO: 21134 - DNA, 1548 bp, Oryza sativa
  Clone ID: TF_OsC45143_1
tcacgcacccaatccggttctatcctccgcgcatctatcacccggcgccggaatttccgcccgcattccgcgtcgcaagcggaggaccctatgcgccgattccccaccatcatcgatctcctccgccctctcatccacacggcgccagggaagcgacgccccaaccgaaccggactgccgggacaccgacgcccatcccgttcactcgactgcccctctgcgccgagcatgcggatcaacgtcagacgcctgtcgctccactagtcctacactgataatttaatttccaattgatgagtaacgatgttgtaaattaaatccttcaacatagttggacggccctggattaaacaccggaaattatctgctttcatggccaaagacaatgctctcgaagaggcaaggaaattgaagcacaccttcttgagaccatggcattggtacttgtctgctagcatcagcatggtaaccactgaacttgtatcaatatagctgcacaacctatcttcgcacattatcttcagtcttgataggctatacttattggctgcaacgagtagttgaaccatagtcgtctcgtcttgacctatctctggccaagtgtccgtgtagataaaaacaagcagagctttaaacacttgtgcatccatgttgtcaatttttatgacatccgtggtgcctccctccattggtctgaatagctccgccttgaacaccggcgaccgtgccgctagcaccaacctgtgtgcggcaaatgtctcgccgccaaccacaaactcgacatcggtgccctctttgcttgatagaagatcaccataatccaggtgcatgttcgatgggggcaccgtgaaggatggtggttcctccgtgatgaccagacgaaccgcgatagcgaagcagtcgtcattgagatattccgatcgttgcaactcgtcccttctaatgaagttttcgaacccaagcgcgctactattagccaccgagaagttatacaatgtggtggtgacagtgtgtgaccgcaccggattcctgtgtcggtcgagcaagctgaatgtaacctgcgccatgacatcgtcattgaccgtgtcatcgtcaagatggatgaagaaagagatgcagtgcttgttggtttctcgccctccgtttgggtagtagctgatataccaggtgcgacctcccgcactgaacggagaggtacggagggcctggccacgaccggctttcaaggtgctggagtacccctcgatcttgagtatgtggtaggttcgtcccgcggtgatggtggtggtggacctcgacggcggaggaccggcaccgacgctggacgtgagcgccgtcgccgccgccgtcgtcgtcgtcgtcatacctgcgtctagcccgacgtccgacggagatgtaggagctgaggcctccacctcgacggacgcctgcccgtacacatcgagtccaccgcagctcccctgtcgacggcgaactgctttactcctggctggtctcctctgcgcctccaccagccccgcggtggccttcatagtaaaaggttatccc

SEQ ID NO: 21135 - DNA, 2652 bp, Oryza sativa
  Clone ID: TF_OsC15_30
accagcacgggtccatagataaattcatagtgggctgaaactgtttatgagcttagctgttcattacatacgagataacgcaacatcagatgcaagcaaatactcctacctatacatagcattgctattagtaataccaaatgtttgagattgggactaatcacctcggtgattaattcagctcttccttccacgcacagccctgaggagatcattcatcaccagcggcgagctcgccatgagatgcttgtaaccctcggtcgccatgacggcgtcgaggttcgcggcgacgacctcgacgcacctcgccttgagccgcgggcacccatgctgctccgccagcgccagcgtcgtcgccgccgtctccacggtggcgccagcgatgagcttctcctcgcacatgatcttcagcccgtcgagcccgcacatgtccgccgccgccagcaggtgctgcgcgacgacgacgccgtcttgttgatcgagctccggcaccgagtcggtgtagatgaagccgagcattgctccgaacacctgtggctcgatgtccctgatctcgacgctccgggagctcttctccttcatgtcgccgaacaaggaggccatgaacaccggcgacctcgacgcgagtattgccctgtgcgccgggaagcacttgccggacaccaccagcgtgacgtccgcccccgtcccgcggcgcaggagctcgccgaggtgatggctcaaggacagaccacggccggagaacgggggcagaacattcgccggcgctgccggcgccgccgcagcgacattgtcaggtatctccgtgatcaccgtgatggtgcactcgacggtgaaggcgtcgtcgacgatggcccccgacgcctccagggcgctccggcgaaggatcaggacccacgcggagctctcgccggcgcgcttgaacgcgtgcgacacgtggccgtcgacggcggcagaggtggtggcactattgctgatgaggcggcatcggagcgcggccttgacgtcggcgcggcgaggaggacgagcttgagggcgacccagtggttggagtcggcgatgaggctggcggtgtagcggagctcccagtggtagccgccgacggggaggcgccgctctcggctcgccgccgctagtgcccaggaagccaaacgccgccgccaagctccccttcgtctcccgcgccgcctccggccccatcttgctcagctcttctccttcagctccggcgacgccttcttctccaactctggagaccccgccgaaggcattggaactagggtttagggtcccggcatcccgggtttggatagggtgtgaggcagagggaaggtagggggaagtataagaaggaggatcgccaggcttagagggattgccgtggaaggcgacggtgtttagatcctccggtgttttgaccccggttttgtctgaggtggtggccgagtcagcgtgagacccatgtgggccccacatgtcagaatgccaggtcatctcttcctcttcttctctcccttcctcgtctctccctctcacttctctcctctctgcagggcggctggcgggtggggaggaggtccggcagccggtggcggcgcgtgcgacctcggggtcggaccctcggagaggcccgggaggcggctgcggcggcggcgacgacgacgacgacacgagataagggaggcggcggcggcggcgacgcttgagaagggagaggcggccggtggcgccggcgcgggaagaagctgtcttcggcgtcgtgcccgctctgccctccaccgcctgctttgcccgccgctgccccgcgctcacacactcccgccggcgacgccgctgacggcgcgggcgtgagaactgcggccatggacgacgacggcgtcgacatcctcgctccccccgtccccctccccgtcggcgccatcttcctctcccgcagcgcgcctgcccgccgctcgtctgctccgtcggccggccgttccccgcgcagtcggcggtggcgaaggtgaccatgccggcgtcgaggtcgtagccgacgtggatgttctgctgcgccaggttcccgaggatggacaccgactgctgcttcgtcgtcgccaccattgccaggcacaacgtcccctcctgcaccgtcacggacgcgttctccggcttcagcgccaccgccgcacggccgccgccgccgccgaactccagcgtcaagtccggaatcgcttgttcggtttgcttcttgcaatttgcaggagtaacaaagcttatttttgcattgccggagtccacggtgatgcgggagctcgccgccaaagccaccgtcttgttgccgaccttgacgaagtcgaggaccacggtgtagtacgtgtccacgtccccggcgacgagcggcgtgctcgctgcgccgagctcggtgacgttggcgagggtgccgaagttgagcgccgacgatgtgttgacggagtgcgggacgaggcagtaggagaatctccggtcgagcgacgcctcgccgccgagctgcgtcacgtgggagaccgcgtcgccgctgagcccgaccagcccgtcggccgggaacgagccggccgtcgtggtggagcagccgaacttgacgcaccaccgcagccgcgtcgcccgtcgccgccaccaccgcagccgcgtcgccat

SEQ ID NO: 21136 - DNA, 903 bp, Oryza sativa; identical to SEQ ID NO: 11453
  Clone ID: TF_OsC389531_1

SEQ ID NO: 21137 - DNA, 1116 bp, Oryza sativa
  Clone ID: TF_OsC346893_1
atggcaaaccattgcaacaacacctcctctgtcacggttgctgaagttgcaagagggtcgcatgtaatcaagattgatggatacttaaggaccaaggagctgatggagaatggcaagtatgtttcatctatcccattcagtgttggaggtcatagctggttcatcacatacttccccaatggagttaacacagagagtaaggattacctgtcggtttttctgaccattgattttgcttgcgccgggggcgtgaaggcaaccttcagctttgcattgctagacaagaatggtagatcagtgcaattatacagcaaattgtaccctttacacaccttcacggaaaaaggttcagattggggccactctaagttcatgaagaaaactgatttggaacgctcagtacatttgagcaacgattcattctccatcatgtgcgatttgactgtcatgaaggatatctgtagcaaagaaaccacacaaaagcagtttgtggtggttcctcctagtgacctgcaccagcatctgggagacctcctcttgaagaacatggatagtacggacgtgacgttcaacgttggtcaggatatattctcagcgcacaagtgcatactcgctgctcgttcatctgtcttcagagctgagttctttggcgccatgagtgctaaagcccgtaggaccatcaaaattgaagatatagaagctggggtgttcagagcattgttgcatttcatctacactgactcactgcctgagactgctcaaaatattgtgatggctcagcacctagttgtggcagcagatcggtacaatgtcgggaggctgaagctaatatgcgaggagaagctatcaaagcacattgactccaacatggtggctaccactttggccctagctgagcagcacagttgctatggactcaaggaagcttgctttgagttccttgcttctcgctccaatcttgagaggatgatggccagtgatgattatgagcatctgaaaatcagttgcccgtctgttctcatggagcttgttgcgagccgccccccgccgccgctctggtcatcgtcgtcgctcgggaaggccgccgtcgggttcgccaagtcatcgccgtcctag

SEQ ID NO: 21138 - DNA, 1047 bp, Oryza sativa
  Clone ID: TF_OsC951_10
ttagtggattttgagtaagctgccgatctggtagaagaagtatttgaagagcgagatacagctgagctggtcaggatgccggcttatcaccacctcatcgttcatacccatggcgatgacgaactcgacgcaggcttccctgagcccgcggcagccatggcggtcggccaatgccaatgtgctcgccaccgtctgcgccgtcaggctcctcgcgagcatgtccgcgcagatgagcttcagcctgcccatgtcgtaccggtcggcggcgacgagcaggtggcgggcgagctctcgcctgtcgtcctcgtcggcgtcgaggtcgtccatggcggcgagcgtgtcggtgtagatgaagccgagaaggaccttgaacacggcgggctgcatgtcgccgaccttgatggcgccgccggcgttgttgcgcatcgggccgaacagctcggcggcgaagacggcggagcgcatggcgagcaccacccggtgcgcggcgaactgcactccccgcacgtcgaacgtgacgtcggcgtgggacttgaggtcgaggagccggccgaggtgcgccgcgaggtccggcggcgggacgtcggccgccgtcagcggcgcggcggcggacacccgcggcttcccgacgacgcgcacggcgcagtcgatggtgaggcggtcgcggcggacgtagttggcctggagcgcctgtatcgcctccaccttgacgccgtacatggcggcggaggaggagcggagtacggtgctgaacgtcctcggcgcggcgagcggcgggtgcacggacagcgcccggccggagtcggcgcggacgaagcggaggtcgaaggtggcggcggcggcggcgcggtcggtcaggagctggacgtagacggcggcgtggtcgcggtcggcgtgcgtggcgccgcgcgggtagaagacgacggcccagtcgtagccgccgacggtgaaggcggccgaccggacgtactcgccggcggcgaggagcgccctcaggcggctgtacccgcggatcgcgaaccggtggtggccctccaccgtccccat

SEQ ID NO: 21139 - DNA, 1355 bp, Oryza sativa
  Clone ID: TF_OsC50081_1
tcctcctcctcctcctcctctctcccctcgtcgccgccgtagccggggggcgccgcggcgaagccgccgatgcggccgggtccagccgcggacgccgccttcgtcgatccacgccgcgccgttggtaggaagaacatgctatgtgtttgagcaaagattttctgaattagtcgtctcctgcagcaggctattaggttattagtgcaagacaacttcctagttcattttgtaaattgtaactcttcgcacaaacagtcaaatagtctccactctccagtggctattgaccaatcaccatggagaccccgacaaatctcaccaacacaatatctgcagttcacctgttaaaaatcaatggatattcagtaaccagagcacttggttgttcagagtatatctcgtcgaggagattggctgcaggtggatatgattgggaagttctttactatccacgctattatgagcatggtgtgtactggatagcacttcgacttatgtttatgagcaaggaatgtaagcatgaggtgaaggcagctcttaaatgtcagttagtacatgaggcacaaatttatctgccatccggaagtaaaagtgtatcctctaaatatacagggcaacgagattgcgggccagcgctcctgcttgtaaaacaagatgatttgccaggatccaattatttcatcggggattcctttgttgtggagtgcaccatcactgtgttaagagagccacaggaagctgtgactaatgtttctccaaatgtttccaatccatgctgtgacttgcaaatgcaccttggtgaactcttgctgagtgaaaagggggcagatgtcacgtttgttgttgcaggtgaatctttcttggcacacaagatcatcctcgctgctagatcccctgtcttcatggctgagttctttggacccatgaaggagagtagctcacagtgtgtggagatcaaggacatagaggcatcagtcttcaaggccatgcttcatttcatttacactggtacatcaccggagcttgatcagcagcatgtcgtcagtgactcggagcaggacatcacaacaatgacacagcatttgcttgttgctgcagacaggtatggattggacaggctcaaactgatctgccaagataggctccacgatgacatcaatgtggagactgttgcgacaactttggctttcgcagagcagcatagctgtacacagctgaaggacaggtgcatcgagttcatcatctcttctcgtgcaaatcttgatgctgttatggcaacagagggttataagcttgtgatagcaagctgcccgtcggttctaagtacccttctgagggcagcggttgggagatag

SEQ ID NO: 21140 - DNA, 1845 bp, Oryza sativa; identical to SEQ ID NO: 11482
  Clone ID: TF_OsC299399_1

SEQ ID NO: 21141 - DNA, 951 bp, Oryza sativa; identical to SEQ ID NO: 11483
  Clone ID: TF_OsC340717_1

SEQ ID NO: 21142 - DNA, 2343 bp, Oryza sativa
  unsure (1)..(2343): unsure at all n locations
  Clone ID: TF_OsC1713_5345
atgggtcaaaccacttccaagtctgccggcgacggtaagcccaaacccaaaaccacctcggcggcggcagcggcggcggccgtcgtgagcgagacagcaaccgggtcgatgaccatgaggatcgccggctactctcaaaccaaggggatcggcgtcggcaacagcatcaactccagcaagttccacgccggaggccacacctggtacatagcctactaccccgacggcgaccgcgaggagtactccgactgggtctccgtctacctctgcctcgcccggccagctgccggcgccgcggccgacgacgtcgtcgaagcgaaattcacgctcagtctactcagcgggacgtacggtgcggtggtcgaagagaagatctgcacggccaagaaattctccttcgccaatggctactggccaagttgggggcatacaagattcatcaagaggaagaagatggacagtcgattgtggtcgtgtctacatctagacggtcaaagtttctatatcagatgtaatatcaccatggatattatccgctgtgaggcggccaccacggcggtggcggtgccaccgccggacctgcaccggcacctcgccgccctcctcggcagcggggtgggggccgacgtgcgcatcagggtcggcggcaagctgttcgcggcgcacaagaacgtgctcgcggcacggtcgccggtgttcatggcggagctcttcggcaataatggcgggaaagatcagaaggaggcgaaggctgctgctgcggcaactggcaatggcgttattcggattgatgatatggatttgagggtgtttcgggccatgcttcagttcatctacaccgataccctgcctaagatcgacaagggagacacggcgttcatggctcagaatctgctcgtcgcggctcataggtatgggattgagaggctcaagtcgatcagcgtcgacatgatacgcaaagcggctagaacgatgaacctgatagccatgatcattagaaataatgatgaaggaatcgccacccagctgcgcacgcgcgggcggctgggcctccatctccccgatgctccagaaaagcctcatcgatgccggcgtctgttcgagctgacgctgtgctacttgtccctggactcgacgctgctaattcaagctgctggtgatgcatctacccgaagctgcgacctcgccgagatgccggacgtccttgatttgcaagcttcaccgcactggagcgggctaaccatggaggaggtcatcgggaagccgccctgccggagcgcgccgaggatcgccggagctgccaccgactgccaagatttctatccattcccatgccggaggtcaagtatcacgcatggcgtcgaaaccagcacgatgacgatggaggcaagtatagctgcagcacaggaggaaggacgacggggaggacgacgagnctaggactgttgaacaccaccggcaacaagctagcagatgcatgctaattaagctaattattgcggcaacgtggccgaccaaccggagggtgacacatcatcaccatgctacagtgctatgcacaagaagttgtccctgcgatggctaaacaaantcctgttatttcaagtttttttaattagatgcagagctgtgattaaatggccggctgccatctacatcaaccactagtgctgtcaaaaaaaaaagctcgaggctcgcgagctaggctcgattcaagctcggctcgagctccaattgagccgaccccgagcttgggcaaaagctcgcaagctttaccgagccgagctcgagcttctaccgagcttaactgtgtacaatttatattgtgtaaaatcaaaggtgtttttgattattattctgtgatgaataattggcatctaagattattggttttgatatttggaatttatttacgaagtggttttcgagatgattggaatttgcaggtgaataggaactgctggtcgtgatgtggtccggtcagaccgggcatgtgctgtcggctagagttcaatgcacgtggttggtgaagattccatattgcatacgatggaggtattgtgtgtgtatgggatgcagactcgaatttggaaggagtccaaatttggtatgattggttatgtaaagtttgtttcttgtacgatgaggtttcctatgcggattaggacttctagtatgagtttggttcgtggctttaggctgcctacctcatgtataaatagagagggagcgtccaaccagacgatcaacaccggtcagaccggcggcacaggcgcagtcagaccgatctacatcggtcttccccgccgagactctcgccattttccccattccttgctacag

SEQ ID NO: 21143 - DNA, 855 bp, Oryza sativa; identical to SEQ ID NO: 11495
  Clone ID: TF_OsC299619_8

SEQ ID NO: 21144 - DNA, 774 bp, Oryza sativa
  Clone ID: TF_OsC346729_1
aaattcgatgataagctgtcaaacatgagaattggtcgacggcccgggcggccgcaaggggttcgcgttggccgattcattaatgcagctggcacgacaggtttcccgactggaaagatggatcgtgtggacacagccttgccatgtttctcaagtcagtgtatgaatatatccttgcgcacactgtttccccctatttttacttttcttaaatatatattatatgccggtgatgacgacggcactatacccatcccgcggtcgaacctcaacggccagctcgacgacatcgcggaccgtgccgacggctcggacgtgttgttctccgtcggcagcgagacgtttcatgcacaccgcgccgtgctcgccgcgcgctcgccggtgttcaagatggagctcctcgggtccatggcggagtccaccatgccgtgcgtcaccctgcacaacatcgacccggccacgttcaaagctctactacacttcgtgtacatggacgccttgccgtcgccgaccgaggcggtacgcattggagaggttgaagctgatgtgtgcacagaagctgtgggagagtgtgtcggtggagacggtggcgatgactctaggctacgcgcctacgccgagaggtaccattgcccggagctaaagagcaagtggctcagcttcttgatggcggagatcaacttcaagaaggtggccgtcactgatggctactttcatcttaggcgggatttcccgttaattatcgaagagataaaaaagcggattgagagttaa

SEQ ID NO: 21145 - DNA, 2552 bp, Oryza sativa
  Clone ID: TF_OsC8342_1
cttcgatcgatcggctcgtctctccccttccccacctccatgccaccgacacgcgcctcaagctagaaccctagccccgatccccgatggccgcgccgcccgtctcgggggatggggcggcggcggcggcccccgtggtggccctgggcgccgcgggggcggtgggggggccgaggccgtacgaggtggccgtcgcggcggcggagctccggcccgtggactgcaacctcgcggcgctgtgcgaccacgtgcaggcggaggggttcgggtccggggcgttctccgacgtcgtcgtcgaggccatgggcgccacctaccgcctccatcgcctcatcatctcccgcagcgcctacttcaggaatatgctacatggtccttggagggaggctggagctcccacagtggtgttgcatatagatgatccaaacattgactcagaagcaattgcaatcgcgttagcatatctttacgggcaacccccaaagcttaatgataacaatgcgttccgagtacttgcagctgcatcatttttggatcttcaggatttatgtacaatatgtaccgactttattatttctgagctttggacatcaaactttttgcaatatcagctgtttgcggagagtcaagactatggtagtcatggggaacgtgtcagaaatgcctgctggggttatctttgccaaagtgccacattggaactacgagaggtgctcccaaaactttcttcacaaactttgcatgcgctccttacatctgacgaattatgggtacctaatgaggagaaacggtttgaactagcattatatgcgttgcttgcaaaggtcactctgtctgatgtagaagttagtggaaatgaaaatttgaaccttacgtcaagctctgcgaattctgatcattccatgaggaagggaaagagtccaatgaatgaagctggtgaggagcagcttatggggtctgaattgcagaacttaaaattacatgacaacacagagactataagtgcccataacactagtgatattccagatatggtaatcccgcaggatagcacagcatactccattgagcaaaatgctgaggcttccaggaggaagatgcttctgtgtcacagagtacaagcaatagttgctgatacttgcacaaattgttgccttactggtaattcatgtgcttgtaaacaagcacatgtgagttcacatcatcactacaggcaagagcatgatcggagcagtgcttccggtactgtaggtaatatctacctcacagatgcccatggtgaaggaaatgctgtttttgggcctgtccgtgtcaatgtcagaggagcagttgatggacttgctggtattgggagaggaaattctaatgttcctggtgcagcttgggctcccacacgttacgtcttctctcgtgttccttatggacttggttcaagaaatggtcaacaaccattcgcaaatgatgaatcagaacctagagtcgactacaatggtgatatttcaggagatggtctgactgcattggttaatcttagccaagaaagcagtgcttctcatcatcagacagaaagtatatttgagacaggcattcaagttagatattctggtgctgcttctgtttcaaccccaggtggttccccacgcgtccggcaagagtcaaaagagcatgaacttggatccaacttggaaactacagagaacacaactatctcgttggacatgaaaacaccacttagtcacttcccacctttccgctttggagttgagtttgaagatgtgcacaggctcgcagatagtcaggtgaagcattcgactgaagtattttatgcaggctctctttggaaggtaagtgtccaggcattcaacgacgaggatcctcatggacgtcgcacccttggactctttctgcaccgacgcaaggctgagcctttagacccattgaggaaggccaacatgtatgtagaccaccgggaaaaggtcactgctcggtatcagcttatctgtccatcgaagagagaggtcatgattttcggaagcctaaagcaggctggcacactcctacccaaagctccaaaagggtggggttggcgcactgccatattgttcgacgaacttggcgatcttctccagggtggatccctgagaattgctgcagtagtccagcttgtctaagccaaattgcccttgtatatctagaaacaatagtagtgttagcttattgcaaatggaaaaaagaaggcactaaatggcacttgcaaagtatggtaatgtcactgtaatgcaatggttctattgtatttattcccaaacgtgacgccgtcatgcttgtgtgtgtaataggaactaatatatagccaagtcatgcattcgatatcataggaccctagatgggttcttgtggttagtttttttttttaattatttttttacgctcccgctacattatatgtgttgtagcaacgcatacatgttgaaaacaaatatattgctggtaatttgcattataaatagacataaatgcagagttactttcaaaaaaaaaaaaaaaaaaaa

SEQ ID NO: 21146 - DNA, 4488 bp, Oryza sativa
  Clone ID: TF_OsC31069_1
acataagatttctactgttcatacatattaggcggttggaaggatcacacaacttaaaaagatcaaagtcgcatatagagatgtagataactgatcatgactttcataactactaagatgtactactacaaaagtgatagcttaataaacttctcagcaagacttgtcaatccaaatatgtgaaaccttactaaagctgttgccgcggtttttgctttgctatttgttaatctttctatttatagtaataatcatagtctacgtaaacatacagattggaacacaggagttgttcataaacaacataactctatttaggaaccccgatatggcagtagcaattatcaataatcataatacaatccaaatattaaaacctgaattgaaatcttgagtctgaagaacctgtctcccaagagagactaacattaagctaaccaatcaaggacctttgtagcactgctagtccttgcacagcagagagcctgttaacaaaatgaccatcaccacatctgtgcccaatactaatctaaacatggatgacttctccataaggagcgaacacaggtttcatgacaactccagtgacgttggggtcgagacccccaacgaatatggtggtattgttagtgtcattctcagactgagctccttgagcatttggtactctctcctgaacccctgttgttttcttatttgccgctggaccaatacgcatcggtctggaagagcaaagcattccattcatttcagtcattgcacgagcttgctctgtaggatcaccaaatttcacaaacccataaccctttgaacgcattgtcattttgtcagttacaacttttgcacccttaaccgaagggtaatggaccctgaatgtctcttgtagtaggtagtctgtaacatctgcagccaaatccccgacaaaaatggtgtagtcaggggtatcatcacgcttctcgccagcactggcccaattcaatcggaagaccatctcaacattcggcatcatctgtccattataagtctgaagaattcgatcagcagctgcacgacttgtaaactcaacaaagccataaccctgaagctgtccactttgtttgtcccggataagcttcacagattgaacctccccggtggccgcgaagcagttgtagatgtagctctcgtccatccagggctgcaggtcgccgatccagagcgtcttcacctcgtccgcggccgcgggggcgggcatcgcctgcggcggtggcgcggcgtagtacggctggggcgggggcacctgcccttcgtgcggcagacgatgtggacagccggcatcatccggcggctgttggtgtggaggcttcgatcagcagctgcacgacttgtaaactcaacaaagccataaccctgaagctgtccactttgtttgtcccggcataagcttcacagattgaacctccccggtggccgcgaagcagttgtagatgtagctctcgtccatccagggctgcaggtcgccgatccagagcgtcttcacctcgtccgcggccgcgagggcgggcctcgcctgcggcggcggggcggcgtagtaggcgtggggctgggggacctgcgcgtagtgcggctgcggcgggtgggtggcgacatctcggccgtggtcgctgtcgaggccctccgccatcctggtgtggcggcatcggcggcgggaccgcgccccactccggcggctgccccggcgcgggctgcggcggcggaggcgggccgcgcatgccgggctgcggctgcgacggcggctgctgcatcatggcgacgagatggcgtaggtagcacggacgaggaggaggatgacccgagtgcttctcgcgaatggcggagccggacgcccacgagcctccccacggaaggccgccgcgattgggggacgggccacaaagagaaccgtgacgctcccgcggaacgccacgtcccagccccgcccgtcgcgcagtatccgcgccaggtgctcgtggaggctcggcggcggcaccgtgacgcgggggcccctctccttggccggcgcgacgctcaccacgcgcgggccggtgaccacggtgaccacgcaccgtatggtcagggtgtcgtcgtcgaggcacgagtacgacgacgacgacggcgacgacgacaggttggatttctcgacgaacttgaggacgtcggcgctgcggctcgtcggcgtgaagtagtgcgaccgcagcgtgtcgccggcgagcggcgacgccctgccgtccctggccaccaagctcaggctgtacttggctctcacgagcctctccttgccgcggtaggcgaggcaggccgacgcgtagccggcggaatcctggtcgaggccatcggggtagaacgcgacataccagtcatggccggcgacgctgaagtcgccggagcagacgtgccttccggcgccgaagccgtccatcaacgagtagccgaccacctcgaagtcgtgcgtcccggtgatgccctcccacacgctccgtgaggacgtacgggcagccgatgaagtcaacatgtctgccacaacatcccaataatccaggttcccatatccgtatatgtcgttactcatttgcagggaaccattttttcttcccaatcgcggtcgtcgctgcctcgcgcgcgtagggggaaaattgttcccgcgctccttttctcgccctcctcgccagtcgccagcaacaaaattcctcttcctcccaggcgtcggcagcggctttccaggcggcgaagcaacggccaaccccttcctcgcaggcgtcgtcgactgagttccacgcggagatgcagcggtcgtccccttcctctcggtcgcaggggtcggcgtcggtgttgctccaggcagcgatgcagcggccatgcccttcctctcaggcgcaggcgccggcgttgctccaagcggcgatgcagccgccgtcctcttcctcgcaggcgtcggcggcggcgctgttccagggggcgcccgcacgtcgaccaccgcctcctcgatttggggccgacggccctctgcgccccgcaccgccgcctcgccgtcgtctcggtctgcctcatcctcaacctccacgaagctcctggcgtcgatttctccacagcttattctgtgagtgatgaagaattcctccataggagcaatttcggtaaggctgtccccaatgcaagcctgtctcagctgcgagcagtgatgttgttctgctaaaacaagagtggttgccactgtttccacatcaatggtttcgctgagccgcctctcacaaatcagcctcagcctgtccactccgtaccgatccgcggcaactagcaagtgctgcattgctgcagccttgccatctctgcagctatctggcagcctatcgggggtgtgtaaatgaagtgaagaagagcctcaaaaacctcaggctccatgtcgtcgatcttgatacattgcgtgccattttctttcatcggaccgaaaagctcggccttgaacaccggggaccggaaggcaagaacacatttatgagcacggaactcttggccacccacggtgaatgtcacatctgaaccttcaccatcctggagcatgttctcaaaatcggtatgcaggttggacggtgggacaacaacagaattgacctcaacatccttggtgtgggattccctgacgacggtcagcaagcacctgatggtcaggcagtcgttgtggaggaacggcgagctctgcagcttcgatttctcggcgaatttgatgaatccccaattgtcactcgccggggagaaggtgtgcttcatgtaggaattggtcacctgcgacaatttgccgtccttgccgagcagattcagggtgaacctggtcctgacctccttctccctgccgcagtagtagaggaacgccgacgcgttcccgaggcaggtgacggtggagccgtcggggtagaacctgacggcccagtcgacgccgccgacggtgaaggtggatgagctgacgtacctgccgatgcccagcccctcgatcagcgagtaacccgtcaccttgaaatcgtgcaccgcggtgacggactccgtgacgctcaccgacgacgtcttgggcagccggcagccgcccgccgccgcggggaaagccgggtcgcggtgatcacccatggcggcagcggaggcggcgtgatagagggacggcggcgcgatcagctggatgctatgcggcccgatatccatgacctcatcacaatccaaggcctcagaaatcgatcgattccgacaagcgggatagcccacccgccgcggcggcggaggggggatcagcgaagccgagcggaatcgggggagatcatccagattcggggaggatcggaggggagcgcggctctggtagggagagggatcacctgaattcctctcgcgaatggcggaggcggacgccgacgaggctccccactgacggccgccgcggttggaggaggcgcaagaaacggaaacgaaaccctccctgagacaaac

SEQ ID NO: 21147 - DNA, 824 bp, Oryza sativa
  Clone ID: TF_OsC128453_1
cccgggctgcaggcacgcggcgcgagggagagggagactcgggcggggtccctcccccggcccgcccccccgcgcctcggcgacctccgccccgccccctaccgccgctccgtccccctcttcgtccccatcccgtgctggtacctatcggtggagaaggctcgatatgtatacgtgaggctgttcccggagcccgggcgggtggccaaggaacggcccccgctcgcccgcttccttctccgagcttgctggtccggcccgccacgccgctcctgcgtctcccctgtgcatgagcatctcctccgaagcagcgaagactttttctggcaacttgatacgatgtacgctgggcgtttcactattgatgttgagtttttggacctgaagatagcctctaacaatgctgcagaatcatctacctcgatttggccaaatgaaagcatagcggtgcagaacattgctagtaagagcagtctcggatgcctttcgcgcatgctcacggagtcgatacatgcagacgtcaccataaatacgactgatggtgtcctcaaggcccataaggccatccttgcatcatgttctcctgtgtttgaaagcatgttcctccatgatctcaaggaaaaggagtcctccacaatcaacataaatgacatgtgccttgagtcttgctctgctctgattggcttcatctacgggaccataaagctagaccagttctggaagcaccgcctctcgctgctcgccgcagcgaacaagtacagcatttctgatatcaaggactgctgcgaggagagcctcctggaggatataaactctagcaatgt

SEQ ID NO: 21148 - DNA, 786 bp, Oryza sativa; identical to SEQ ID NO: 11503
  Clone ID: TF_OsC346888_1

SEQ ID NO: 21149 - DNA, 1176 bp, Oryza sativa; identical to SEQ ID NO: 11396
  Clone ID: TF_OsC386240_1

SEQ ID NO: 21150 - DNA, 634 bp, Oryza sativa
  Clone ID: TF_OsC306844_1
ggagagagagaactagtctcgagttttttttttttttttttttttcacacatctaaactagcctagatgacagataataattatacacgggattagcaccagatcgaaccagatgacgataattatacataggtctagctatttgacactccagagtagaatcacacactagctctgaattgacaccatcctacttaatatgcttctgctgaatattcagggttcagtgaacaacaagcttggacatgagctccttgagaatggcagggcagcttgtggtgagatgctcgaagccgtcggtcgccatggtcgagctcaggtggtcggtgtatatgaagtgcagcatcgccctgaacaccggcgcctcgatgtcgttgatgcgcgttggcgtggcggcggcggtgctccgcggctgcgccatcgggccgaggagctccgccttgagcacggacgagcgggcggcgagcacggacctgtgcgccttgtacgtctcgccgccggcctcgagagtgacgtccgtgccgtccccactggtgagcagcttgccgaggtggcggtgcaggtcggacggcggcacggagacgtaggacggaaattcggcggcggcgaccatggacgacagtagctgggcaga

SEQ ID NO: 21151 - DNA, 1626 bp, Oryza sativa
  Clone ID: TF_OsC31069_3
ctaaccaacatcccaataatccaggttcccatatccgtatatgtcgttactcatttgcagggaaccattttttcttcccaatcgcggtcgtcgctgcctcgcgcgcgtagggggaaaattgttcccgcgctccttttctcgccctcctcgccagtcgccagcaacaaaattcctcttcctcccaggcgtcggcagcggctttccaggcggcgaagcaacggccaaccccttcctcgcaggcgtcgtcgactgagttccacgcggagatgcagcggtcgtccccttcctctcggtcgcaggggtcggcgtcggtgttgctccaggcagcgatgcagcggccatgcccttcctctcaggcgcaggcgccggcgttgctccaagcggcgatgcagccgccgtcctcttcctcgcaggcgtcggcggcggcgttgttccagggggcgcccgcacgtcgaccaccgcctcctcgatttggggccgacggccctctgcgccccgcaccgccgcctcgccgtcgtctcggtctgcctcatcctcaacctccctactccggtgtgcaggcgacagagtccatggagggacatgctccatgggagacactgaatcccctctcacacgaagctcctggcgtcgatttctccacagcttattctgtgagtgatgaagaattcctccataggagcaatttcggtaaggctgtccctgattcgttcgatgtttaggatccgcggcaactagcaagtgctgcattgctgcagccttgccatctctgcagctatctggcagcctatctgtgtaaatgaagtgaagaagagcctcaaaaacctcaggctccatgtcgtcgatcttgatacattgcgtgccattttctttcatcggaccgaaaagctcggccttgaacaccggggaccggaaggcaagaacacatttatgagcacggaactcttggccacccacggtgaatgtcacatctgaaccttcaccatcctggagcatgttctcaaaatcggtatgcaggttggacggtgggacaacaacagaattgacctcaacatccttggtgtgggattccctgacgacggtcagcaagcacctgatggtcaggcagtcgttgtggaggaacggcgagctctgcagcttcgatttctcggcgaatttgatgaatccccaattgtcactcgccggggagaaggtgtgcttcatgtaggaattggtcacctgcgacaatttgccgtccttgccgagcagattcagggtgaacctggtcctgacctccttctccctgccgcagtagtagaggaacgccgacgcgttcccgaggcaggtgacggtggagccgtcggggtagaacctgacggcccagtcgacgccgccgacggtgaaggtggatgagctgacgtacctgccgatgcccagcccctcgatcagcgagtaacccgtcaccttgaaatcgtgcaccgcggtgacggactccgtgacgctcaccgacgacgtcttgggcagccggcagccgcccgccgccgcggggaaagccgggtcgcggtgatcacccatggcggcagcggaggcggcgtgatagagggacggcggcgcgatcagctggatgctatgcggcccgatatccat

SEQ ID NO: 21152 - DNA, 1458 bp, Oryza sativa
  Clone ID: TF_OsC56854_1
ctcttctcgccggcgtcccctccacctccatcgcgctcgctcgccgcccgatcccatcacctccgccccgctgccccgcacctagagatgccgtcgtcgtcgtcggcggcggcggcggcgtgcgggcccccggagttcacgccggggtggaagacggtgtcgacgtgcgccccggacgtcgtcggcgagggcgtccacgtgttcgacatcttcgggtacagcgaccacaaggggatgggcgcccacgagcccatcaggtcgggggccttctccgtcgccggcctcgactgggtcgcctgcctctacgccgacggctacggcgtcgccggcatcgacgacgtctccgcctacctcaggctcctcggcgacgcgcccaccccgcgcgtgtgggtctcctgcgaggtcaagctcgtcgaccagcgcaccggggtggcctccacgccgcagcccttcctcaggtacgccctggcgttcggcgacaagtgcaaggccctccactgtatgatgatccccaggggccagatcgaggtggagccctacctcgtggatgatcgcctcaccatggagttccatgtcgtcgtcaggagagacccccgggtgtcgaggaccgcccggttcccgcgcatcttggtgccgccgcccgacatcaagcggcagtttgccaacctgctgcagagcaaggagggcgcagatgtcaccttcgatgtcgcgggggagccgttctccgtgcacaagctcgtgctcgcgatgcggtcgccagtgttcaaggcggagctctgcgggctgctgagggagccgggaacacagcctattaccatcgttgatatgcagcccgccgtcttcagggccctgctgcaattcatctataccgatcagttccccgtgacgcgcggtttcgagagacgcgacaattgtgaaatgatccggcacctgctcgttgctgcggacagatacgccgtggataggctaaagctgctatgccaaggtatcctttgcaagaatcttaatgttcacaatgtcgcgactacgctggcactggctgatcagcatcaatgcgacaagctgaaggatgcttgcatcgaatttatgtcatgttcaaagaagatgaagggtgtagtggcgagcaaagggtatgaggatctccaaagaatggcaccttctgtcttggcggatgccgtggcgcagatgtcgaagctcaacaaaatgtcaaggggtagtgttccacaagatgagtctaagagctgttagtttaatttataagggatatggatattctttcttctcttcctaaatcaggtatcgtagtcagtttactctacattttgggagcacctttctggtggttatctgtttatatgatatagttaggtttattttatctctttgcaagctttgtttccattaactgacatataacctgttgtccttccacaaaatttattttgtgtgctcttgatc

SEQ ID NO: 21153 - DNA, 1345 bp, Oryza sativa
  Clone ID: TF_OsC191632_1
atggcgtcgaggagcatatcaagctgcacaactgagacggcaaaaggcatccacaggttcgagatcttcagttacagcatgatgaacaccgaagccgaagacgactccatccggtccggcgtcttcaacgtaggaggattcgattgggcgttgctttactaccctgacggcatcgacgacgacagcaagggctacatcggcgtctacctcgagctgatcagcaagaacggcgagccatgggcactcgtcgacgtgaatctgatcaaccagctgcaacccgggcaacctcgtcagctgttcaccaagaccgatgtgcctaccccgttcagatcttcaagctttcaggagtctaccttggggtctctcaagtgcatgaagaggagcgatattgagagcactccagggttcatcgtcaatgactgcatcgtgatcgaatgcaatgttactgtcatctatgagccaaaagtgtctaaaaccagggcattgtgtgacgctgaaactagttcggcattgcgcgagatcgaggtgcctcctatggagatatcgtcggatttcgccaagatgttgaaggacggtgtaggagcagatgtgacattcagagttggagaagacacattccgtgcccacagggcggtgctagctgcgaggtctccagtatttcatgctcagctctgtggaccgatgaaggagaagaaggagacacaaatgcaggagataaccatccaagacatgcagccatctgtcttcgaggctttcctctatttcatctacaccgattgtgttccaagaatggatgatcttggcaatggtgagaagatgcatttgatgatgcatttgcttaaggccggtgaccggtatggattggagaggctcaggatcatgtgcgagagatttctagctacgaacctcgacacggagcatgtatctgcgatactgggtctagctgacttgctagatctcaagaagctcaaggaagcttgcatggagttcatggtcccatctgagagaatggatgccgtggctgcaagtcaagggtaccagcagctgaagagagcatttccctctctggcgtttgaagtgtgggagaggaggagccgtgttcgcaggaattaattaacatcttcttgattcagaagatatatgtgcgcgatgtctggagatttcctttttggttatgtttgttttggtacatttgatgatctgacgaatgttctctcaacaatgtgatgactgatacggtgcacgcgctggttgcaccttaatgtaatgtggctatctggatcatgccaatggttttacctttagaatcgagttgttttttacaaaaaaaaaaaaaaaacggtcc

SEQ ID NO: 21154 - DNA, 2232 bp, Oryza sativa
  Clone ID: TF_OsC3707_1
cacgtggctggacgtgtcgcgtgtcctgtttctgtttttctttgggttgcctgccgcgccgctcattcttccttgcctctgctgggatgctaaccttttcacaatcgactggttcagtttttttttttttttttttgccagtaaaagagaccggttttagtcctttttttttccacttgtcatttgcaaagtttctatcaacaaaagggtttaagcatagaagaaggggaaaaaaaacaatacgatatctgcagcatgtgatgtttcgcactatcacccactcgagcgcaaagccaacttgagtttggcagcagtacattagacagtgggttgctttatcgtcaattcagctctcagatgcaacacgccgtcgaggaagaagaggctgtcgtcagccatgaacgtcgaccatggtatcgcaaagagattcctgtaaccaaccgccttcccaccggtgaacgtgtagttacccttgtacttgctcacaaactctcctgacggtcttgtccttgcagcaaactcataatctactgtcacgctcattgagcccttctcttgcatccctaagaagagaccgaagcagtagaacgtactctgctgttccatgttacagtgtgctgagaggaagaagccctgccctgcaagatggaaggcttgagagtacatccgacctgacgggaagagccgggagcactcttcgcgctttagatccaagtatgctatacactgtgggtagggtcggtcaaactcaacaactttcaaaggtctgtacttgtaagcccgctctgcaaatttctgacaggttgttacgtctgctgcgagagcacgttgcctgtgtggagcatcagctttatatagaagtgcctcagtgacacacttggttgcttgctcatggtccagatcggtgcatattaggaccttccgcagcttcctacaggtcatgtgactgaatcgcacgagcggaagcaaacgagaactcaagatctcacgcctttcctctgatttagggtattgtgcgcgagcccacctgatcaagaaatcgtagatagcatcttcagatgccacctggaggtcattacttgacaagatggcttcgattccagcaagagggatgttcatcacttcatcttggaacttagtcaaatccttgtatttgttggaaagatattccttggctgcatctgtcagaggttgaactgcagcagccatcgaaatggagcatggaagatctaggtagagtagtgcagattctgtagtcatagtcaagcttgtgagcaactgactgcagtacctcatgcacgaaataacctcaaacttgtcggcagccatcagaatatccagtagaagagtagggtcagttgatgtcaactttccactgtacataaagcttaaaagctccataagggcattttcctctgaatcagtaattctaagggttgcctgcctctcatcagattctttcatgccatttgagaaaagcttgaaaaagaaaggactttttgctgcaagaatcgctgaactgatataaatgttctttactcttagaactggtgtgctcaccccaccactccaaggtgagtccatacttggtccatcatcaccatcagggccaacactgggtggagagtcgtccatcattgctacaggttcttcttgattttcttcatatgcatcacattcttctggttctactttgcaatttatctggtctggcatgactgcttcagactctttctccttgaggagctcctcgcggcggcgcttgcggtggcgcgcccaatccgaaagcgagccggccccgccgtcccggctggagccgggcgcgtggtcgtcgtcgtcgtcgtcgtcccccgcgacgacctcgatccggagcacccggtcggagaagttgaccgagttgaaggcgaactcgaagctggggcccccaccgcccccgcccgagaagtccgggtccatctccgcctcctgcgccgccgccgcctcgctcccggggcggcgcccgcggtacgacgaggaggaggaggaggaggcggcgccgccgtcccggctcgagccgggcgcgtggtcgtcgtcgtcgtcgtcgtcccccgcgacgacctcgatccggagcacccggtcggagaagttgaccgagttgaaggcgaactcgaagctggggcccccaccgcccccgcccgagaagtccgggtccatctccgcctcctgcgccgccgccgcctcgctcccggccat

SEQ ID NO: 21155 - DNA, 2369 bp, Oryza sativa
  Clone ID: TF_OsC43419_1
acccgtgcctcccccggctgccgggttccgtcattgacgatgtggaccattcagcataactttgattagaagaatcacttttcacagttcgataacaatgcgttacatgtcatgatcctcttttgatgtaaaaacaaaagggattttacttgccgtttccaaactgtctatttaggttgctcaagtagaaaacaacagtaagtccgaatcacacaacatttttcacactaatttggacacagcaagaacagagacgctgttagttaaacgccgtccactatctagggttgttttatggttaattcagctctcaagtgtagtaccccctcgatgaagaagaggctgtcatcagccatgaacgatgaccatggaattgcaaatagattccggtatccaaccgcctttccaccggtgaaggtatagtagcccttgtacttgctgacaaactcgcctgatggccttgttcttgcggcaaactcgtaatctacagtaacactagtcgagcctttctcttgcatccctaggaacagaccaaagcaatggaatgcactttgctgatccatgttacagtgtgctgagagaaagaagccctgccctgcgagatggaacgcttgtgagtatatccgtccagatgggaaaagccgactgcactcctcacgcttcagatccaagtatgctatacactgtggatatggtcgatcaaattccaccaccttaagtggacgatatttgtaagctcgctcagcatatttcctacaagtcaaaacatctgcagcaagggtacgctgtcgatgtggtgcatcagctttgtatagaagtgcctcggtgacacatttagttgcctgttcatgatccagatcattgcatgcaaggaccttccgcagctttctgcaggtcatatgacaaaaccgaaccagtggcaacaaacgagtacccaagatctctcgcctctcctccagttttgggtattgagaacgtgcccacttgatcacaaaatcatagatggcgtcctctgatgccacctgcagatcattactccataggatggcttcaataccagccagaggaatattcatcgcttcatcttgaagcttggtcaaatctttgtacttgttggcaaggaatgccttggcagtgtcagtcagtggctgaactgcagcagccattgaaatgctcgaaggaaggtctagatagagcagtgcagattctgtagtcataggcaagcttcttagtaattgactgcaatgcctcatgcaagaaacaacctcgaatttatcagcaatcatcaagatatccagcagaagggttggctgatttgttgtcaactttccactatacataaagctcaaaagctccatgagggcattttcctctgtttcagatagacatacaatgatcagataaaagctatctgaagcagttattctaagagtagcatgcctctgatcagattctttcatgccatttgagaaaagcttataaaagaaagggctttccgcagctagaattgcagaactgatgtaaatagactttactctcaagacttgggtacactccatactccaggatgaatcgcagctgtctccatcctcaccatcttgtccaatatctggtggagattcttctatcatagctacaggttcctcattattttcctcataggtatcacattcttctgcttcaactttacaggtttccagatccgtgtattttcctgattcacattcccgagatctcgctctccggaagtaccgcaccgcgcttgctcccaatcggcagtgcgggcgaccaagagctatcccgcggagggggaagcaactgtctctgttggtggcccattttttttttgaatcaaaattaggatcacgaccaaagtattttccgacagctttctcgcggcggagctcctcccggcgtcgcttccgctggtgcgcccagtcggcgagcgaggagcacccttcccccgcggcgcccttggcccccgccgcgtcgtccccggcgacgatctcgatccgcagcacccggtcggagaagttgacggagttgaaggcgaacgcgaagctcgggcctcggctcgcccgcgagaagtccgggtccatcccccctctcctccccttccaatcaaccaaaccgcactcgtgcgcccgcgacctcctctcctcacctctccacctccaccgccaccgccgcctccatcgccgaaaccctaaccctagcgagagcagcagcagcagcttccagaaggagaaggagcccgcggaggcgaggaagaagaggcggaggggggcgtggtcgtaaatacgcgcgaacccgaggggccaatctgcaaaagcggacgaatcgcaaagcctcgtgccgaattcctgcag

SEQ ID NO: 21156 - DNA, 1757 bp, Oryza sativa
  Clone ID: TF_OsC157448_1
tggatcccccgggctgcagggctgagcgaccgtcccccgacgccgacgccgacccccgtctcgtgagggagggagggtcatcgccatcgaatcccaaaaaatcacccgccgccgccgccgccgcatcctcgaatccaatcattcaatcaaggaggaggaggaggatttggatttggatttggatttggatttggaattagggttagtgctcccccatttttttgagggcagtcgatcgagcttagctagggttggatgcgatgacggcggcggcgtcgtggtcccggtcggtgacggagacggtgcgggggtctcaccagtacacggtgaaggggttctcgatggcgaagggcgtaggggccgggcggtacgtgagcagcgacaccttcgcggtgggcggctaccactgggctgtctacctctaccccgacggcaagaaccccgaggacaacgccaactacgtctccgtcttcgtcgccctcgcctccgacggcgccgacgtccgcgccctcttcgagctcaccctcctcgaccagtccggccgcggccgccacaaggtccactcccacttcgaccgatccctccaggccggaccctacaccctcaagtaccgaggctccatgtggggctacaagcgcttctaccgaagatcactcttagaatcatccgactttctcaaggacgactgcctcgttatgaactgcactgtaggcgtcgtcaagaaccgtctcgaaacaccaaagaacatccacatcaatattcctccatccgacatgggccgttgcttcaacaacctcctcaatctccgcatcggctgtgacgtatcttttgaggtgggtgatgaaagagtccaggcgcacaagtggattcttgctgcccgctcccctgtattcaaagcccaattctttggtcctattgggaatcctgacctacacacagtcattgtcgaggatgtagaacctcttgtcttcaaggcaatggtgaatttcatatactctgatgaacttcctagtattcatgaactagctggatctgtctcaacttggacatcgacagtagtagtacagcatttgttggcggctgctgacagatatggactagatcggctacgtctgctatgcgaggaaaagttatgtgatgaactcactgctgaaacagttgcaacaaccttagccctagctgaacaacatcattgtactcagctgaaatctgcttgtctgaagttcactgctgttcgggaaaatctgggagctgtgatggagacagaaggatttaattacttggaggagacatgcccgtccctgctatctgacttgttagctactgtcgcagtagtggatgatgatgctgcgtcattcaaccggaagaggggagtcggtggtaacgaaggagcgaatcctgtggagagcgtggaggctagtgataggcgcatccgcaggagggtttagccgggttagaactaatgtaggctttcttcttggttcctcctctctatgcttgccatcaactgtacactatgatcgtagtttgtgtgatgtgctgtcatgttattagtggtgaaagtttaatttggacaccgttaaccaacctcttgccgtgtgaataatttcctattttgactacgccgtttcgcagcagagattttaaaaaaaacagtggattggatgttatgattggtatctgctgattataagatccggctagcatttccaaaaaaaaaaaaaaaaaaactcgagactagttctctctctctctcc

SEQ ID NO: 21157 - DNA, 1677 bp, Oryza sativa
  Clone ID: TF_OsC20177_1
gcacgtggccgtcccccccccaaaccctagacggacgacgacgctctctcggcgcgcctcgccgccgccggccgccgcggggggtggcggcaccggccgcccagtcgcgggacatggcggcgccgccgccccgctcccgcgcccgggcggggacggcgcgccgtcgccgacgagctcgcggtcggtgacgcagacggtgaacgggtcgcaccggttcgtgatccagggctactcgctcgcgaaggggatggggtgtgcgggaagcacatcgcgagcgagacgttcacggtgggcgggtaccagtgggcgatctacttctaccccgacgggaagaaccccgaggacaactccgcctacgtctccgtcttcatcgcgctcgcctccgagggcaccgacgtccgcgccctcttcgagctcaccctgctcgaccagagcggcaagggcaagcacaaggtccactcccacttcgaccgctccctcgagtccggcccatacaccctcaagtaccgcggctccatgtggggttacaaaaggttctttcggcggactgctcttgagacatcggattttcttaaagacgattgcttaaagataaattgcactgtgggtgttgtggtgtctactatggattactcaaagccacattcgatacatgttccagaatctgacataggctaccattttgggacactgttggacaatcaggagggtgtggatgttatatgtaatgtggcaggagaaaagtttcatgcccatcagttggtcttggctgcccgatcttctgttttcagatctgaactttttgagcatgaatcagatgaagagaagaatgaagttgatactagcaatgaaatcaaagagattgtcattgatgacatggagccaaaagtgttcaaggctgtgcttcattttatgtacagggacaatcttgttggtgatgatgagttgtctgcatcaagctcggactgctctatctttgatactttagctgggaaattattggctgctgctgacagatatgagttgccaagactacggttattgtgtgaatcttacttgtgcaagcatatttctgtaaactctgtggcaactaccctagcattggctgaccgacatcatgctatggagcttaaatctgtttgcctaaaatttgctgctgaaaatctttcagctgtaatccggaccgacgggtttgattacctcaaagacaactgccccgcgctgcaatcggagatactgaggacggtcgccgggtgtgaggaggaatgcagcagcggagggaagagccagagcgtgtgggggcagctctcggatggcggcgataccagcgggcgcagggtgaggccaagggtctgaacacccagccactgctatgccaaaagcggcttgttttaaagtgtaactgtgtaagcgaattgctgctgtacaaatgggacggctaattggtttgtggcgacatttaaaataatagcatcagtctgttatactacccctacattcgttcaaatttcaatagctggtttgggcagtagctccgcagatggaagggattatgtttagtgatctgagacagtgatgtgtagtcagtagtcagctattctagtttcgatttgcaatttataaacttcagtttttagcctgctcgtgtcttggcccccccttaaaaaaaaaaaaaaa

SEQ ID NO: 21158 - DNA, 1469 bp, Oryza sativa
  Clone ID: TF_OsC42903_1
tttttgtatttttaaaactattttcccgatcgaatacacatacaaccttattttgatcgttaagatggtgcatatgctctctctagctatatatctactcctcgtctccctcttacatgtcgctatatagccttagctactttttgcatgtgtgcgtgtgtggctaataacctaagctaagccgattcaattgatttctagccggcggccgggtgcggccgggtggtggtccagaacaaggcgagcgcgcggaggcggccgaagtagtcgtcgacggcgacgaagcagcgcgccgcctgcctcaccgtcagcatccgccgcagcgcgtgcagcgtccgcatcctctcctcatccgcctgtcgtaggaagatggcgaggttggcgagcttgtccatggcgagctgcaggttgctgtagctgccgtactgccccatgaagctcgccgcagccatggcggcggcggcggaggggtggtacatcaccggcggcgtctgctgcgacgacgacggcgcgtccgaggaggagacgacgtcggagagcgaccggagcagcgcctgcaggccgccgtcgagcgcgtcctcctcctgcctcgccgcctgctgcgcgctgtagacggcggcgagctgctgctccgtcaggggctccacatgccggaccacaaccttgataagctccgaggggcggaagccgcctatccagaggaagcattgctctacggcgcccttccacaggccggagaggaggtggagggggtcagcaccaaccagcctagccttgtgagccatcagcaccccatagtgtgacatggcttcatcgacatggggctgcagctcgccatccggtcggtgctcctccacagcggcccggagccggctgatcacttggtggtgtgcctcctgccaccgctcatactccaagttgaacaatgcagcgtctgggcttagaattccagcaccgcagaatgcaccctgagctcttgtgaattgtatctcctgttcaagatgcgccagcctgatcctgcctgtctctagctgctgaatgtaagccttcttccttagcctgctctttcttgcggcctctctattctgcgccagccttctcagcgttttggggtccggcgtcttgggccccttgagctctgaacttgctgacgctgccatggcgccgccgctgccactgccaccttctttctttggtgttggagttggctctccatccattggctgggaggggaagatgttgagagtctcttttacaaaattaagtggtttgtggggttcttcttgagtagatggcttatcttgttcctggccatcaaagtagaggaggagagcttgatccaaatcagatggcatgtcatatccttcagggttccttcttctgtggagtttcagccacattgtatcatcaaccgtgtgaagcactgaagctttcaggctgaccaacctttctgaacatttcagctgcat

SEQ ID NO: 21159 - DNA, 300 bp, Oryza sativa
  Clone ID: TF_13447549
agaggattttggcaaacaggcagtcggcgcagcggtcaagggtgagaaagttgcagtacatctctgagcttgagcgcagcgtcaccactctccagatggaggtgtcagcactgtcacctcgtgtggccttccttgatcatcagcggtcgctgctcaccgtcggcaacagccatctcaagcaaagaatcgccgccctcgcacaagacaagatcttcaaagatgctcaccaggaggctctgaagaaggagattgagcggctacgccaagtgtaccaccagcagcagatcaaggccaccggag

SEQ ID NO: 21160 - DNA, 1349 bp, Oryza sativa
  Clone ID: TF_OsC728_1
tgcaggaattcggcacgaggattttcgccatctcctccgcctcgtggtcggcgctccacactctaccctcgccgaagccttctagaagatccgccgccatggacgaccccggtgcggccgatccgggggcgcgcccccaccacgtgtcgccggggcagccgccggtggtgccgcgctccccgaccccgctcgacctgtcgagcgccgcggcggcggcggccgcggcgtcgtacaggaggctctcgccgtcgctccgaccgcccgcgcacccgcaggcgcgtctcccttcgccgtacccccagatcccctcctcgtcgtcgtcggcggcggcgggctcgtcggggcaccacgcgcggtcgctctcgcagccgctcttcttctcgctcgactcgctcccgccgctgccgtacgccgatctggccgcgccgcccgccatcccgccctccccgccttcctcgagctccgacccgccgccgccagggctgccgccgcggaagggcgggcaccggcggtcgcagagcgatatccccttcgggttctcgcacctgagcccgcccctgccgcctcccgcgcccgtgaagcgggaggccgccacggcggcggaggggtgcagatcggacggcgatgacttcgccttgtacgacctcgtcaactcctacatggacctcgacgggatggaggctctcaactcctccgaggagcggcacgaggaccgcgacagccgcgccagcggcacgcgcaccgggagcgtggccgacagcagcgagaacgaggccgagagccactcgactccagtggagaggaaggacggaggaggcaaatcccggcattgccgcagcttatcggtggacagcttcatcgagaagctcaacttcgacgagtcaccgaagctgccactgccgtctcccagcggtggcctatccagaagcgggagcgggtccttggatggcggcgctgcatctctgtttggtgctgagtttgccaatggggagttcactgaagctgagaagaagaagatcatggcaaatgagcgccttgccgagatcgctttgactgatcctaagagggttaaaagaattttggcaaatcggcagtctgcggcaaggtcaaaggagcgtaagatgaggtacattcaaaagcttgagcacaaggttcaggtgttgcaaacagaggcttccacactctcacacagtttgaaatgctgcagaaggactccctggactagccctcaaaacaatgagttaaaattaggttgcagcatggaccacagcccagtttaaaaatgccctgatgaagcattactgccgaggtccagcgtctgatactcgccgctggcgagataactgacg

SEQ ID NO: 21161 - DNA, 1818 bp, Oryza sativa
  Clone ID: TF_OsC593_1
tcgagcggccgcccgggcaggtcgcctcgcctctctctcttccttctgaccaacccgacctcggcgcctccccccatttctctctctctctcttcgcgttgccgtctcgaccccgcctccaccgccgaagccgcccgaggcggcggccgccggcagctgggctcctccgaatccgaacacggcgggggctctcccctcgctccccacggcggttggcacctgctggctctcgatccaacgtgtacagctaatttgatctgttggcgccttagctagaaaggtggcgactctggcatctcagtgatcatagggcatttgaaggtggcctgcatccctgttacaagtaagggacaacaaagcaatttgttgtctctttatttggagctgggaagaacccggcatggcagatgctagttcgaggactgacacatcaacagtcctggataccgacgataagaatcagatggtagacgggcaaagtggagctattgtgccttctaattcatctgatcggtctgacagatctgacaagcccatggaccaaaaggtgttacgccggcttgctcaaaatcgtgaggctgcaagaaaaagtcggctgagaaaaaaggcatatgtacaacaattagagagcagtaagctgaaacttgcaagcttggagcaagagatcaataaagctcgccaacaaggaatttacatttcgagctcaggagaccaaactcatgctatgagtggaaatggagctatgacttttgatttagaatatgcccgttggttggaggaacaaaacaagcagataaatgagctgaggactgcagtaaatgctcatgcaagtgacagcgacctccgtctcattgtagatgggataatggcgcattacgatgagatattcaggctgaagggtgttgccgcaaaggctgatgtgtttcatatactttcaggcatgtggaaaacacctgctgaaaggtgcttcttgtggcttgggggttttcgttcctctgagcttctaaagcttcttgtgaatcagctcgagccattaactgagcagcagttgttgggactatcgaacctccaacagtcctctcagcaggctgaagatgctctatcacagggaatggaagcgttgcaacaatccttggcaggtacgttggccgggtcccttggtccatcaggatcttcagggaacgtggcaaactacatgggtcaaatggctatggccatgggcaaacttgggacccttgagaatttcctccgtcaggctgacaatttgcggcagcagactttacatcaaatgcagcgaattctgacaatccgacaagctgcccgtgctctacttgcaatacatgattacttctcacgtttgcgtgccctgagttctctctggcttgctaggccacgggagtaacaacacatagggtgcatcaccgttaatgcttcatgaactgatctgggaggaacggcggagcgggactgattgcggatgcatttgcagaagattggtggctcagttccctcggcacaagttgtattgacaccttttggtttcatgttgtacctgatgttgtacaagtagggtaaagcttgtaacttgtaagttatggtgaatttatgattggcagattgtacaattgtattagcaataaaataaaaggtagataaaggctggaagaatacccagcgatcttacagtggtcggaaacgaaaagcaaaggggacatctcgcacgggatggtcgattgttctaactgaatagataagcacttaagcagggcctttcttttatgacaaccgaaatataggtgaaatggaaactatgggtag

SEQ ID NO: 21162 - DNA, 1549 bp, Oryza sativa
  Clone ID: TF_17025921
actcactatagggctcgagcggccgcccgggcaggtgtcgctcgtcgacccctctccgccgccgaggctcgctgtcccaagctaatccgtccgcttcgttgaggattccattgaatgcttggctgtggtggagtgctacactgctagtagcagcttgcatctcagcaatttgggtgaaccccccacattcttgaggcagtaacaattggatctacatcttgccactacaaaaggatcaacgatctgtactagccttcatttgtgggttcctcattgggaattgggattctttacaatggcagatatgagccctaggacagatacatcaacagatgataccgatgataaccacatgcttgaaccaggtcagcttgctcttgctgctgcttctgactctgacagatccaaggacaaacatgaagatcaaaagacattgcgtcggctcgcccaaaatcgcgaggctgcaaggaagagtcgtttgaggaaaaaggcatatgttcaacaattggagaatagcaggctaaagcttacacaactagaacaagaattgcaacgagctcgtcagcagggcatttttatatccagctcagtggaccagactcattccatgagtggaaatggggcattggcttttgatatggagtatgcacgttggttggaagaacacaataggcaaattaatgagctaaggtctgcagtcaatgctcatgcaggtgataatgagctccgtggtgttgttgacaagatcatgtcacactatgaggagattttcaagcagaaaggaaatgcggccaaagcagatgtctttcatgtgttatcaggcatgtggaagacaccagctgagaggtgtttcttgtggctaggaggattccgaccatccgagcttttaaagcttctttcgacacagcttgaacctctcactgagcagcagctgtcagggatagccaaccttcagcagtcttcacaacaagctgaagatgctctttcacaaggaatggaggcccttcagcagtccttggcagaaacattggctgggtctcttggttcttctggatcaacgggaaacgtggcaaactacatgggccaaatggcaatggccatggggaagcttgggacccttgagaatttccttcgccaggctgacaacctgcggcagcagactcttcaacagatgcaaaggatactgaccactaggcagtctgcccgtgcgcttcttgtgataagcgattactcttcgcggcttcgtgcccttagttccctctggcttgctcggccgaaagaatagcaagcgcaagtaacttgactgcaaccacatttttcgggtttgggaggtgatggtgatcttacctggaagagttgacaatcctgcaaaggacttgattcggagatatttgcacatactataatccaaaagagatccttgtgttcaggtagcttagtcttatggttaagtgcattaggccctggcccatgttgtactgttagccgctgtaaaatactgttccattattacttatgtatctgtaatatcctaattttcagagaatgc

SEQ ID NO: 21163 - DNA, 460 bp, Oryza sativa
  unsure (1)..(460): unsure at all n locations
  Clone ID: TF_LIB3431-020-P1-K1-E3
cccacgcgtccgcccacgcgtccggagcaagaagaagaggaggcagatgagaaatagggattctgccatgaaatcgagggagaggaagaagatgtatgttaaggacctagagactaagagcaagtatctagaggccgagtgtcgtcgcctcagctacgcgcttcagtgctgcgcagctgagaacatggcgctgcgccagagcttgttgaaggataggcctgtcggtgccgccacagccatgcaggagtctgccgtactcacggaaaccctgccgctggtttccctgctttggctcgtgagcatcgtgtgcctactcccggtgcccggtctacccaaccgaaacccggtggctcgaagcagcgccggaagagatctcgcgacggtaaccggaaagaagacaagcagtgaacaacagctagaagaaacattactactccatgggaggcgtngcaagggctcg

SEQ ID NO: 21164 - DNA, 2073 bp, Oryza sativa
  Clone ID: TF_OsC192_1
tccttctccatctccctctacacatctctctctttctctgtctctccctctcttcatctaggctgtgaagaaaggaggacaaggctcgtaggacgtgttcaaaaggacaagatcttctttgcagtacacagtggatgaaactccaaggctgattcaatttgccagtgtgtgagaaacgagaaacaaccaagaggctcatcaggatcaagtggctgatcatcatcatctctctctaggatgtagagctagtggtgatcatggtgcaaggtgaggagagttcttggaggatggcagcaagcacccaccatgagagagcaatacctctcaaccaagcacttgcttatggagtccaagcccatgcttctccttctgttgctgctgcaccacctgccagcttcttggacttccagcctgctgccgcggcagctgcctacttcggcgagctggaggaggccctcatccatggcgccaacgccggcggcgtcgtcgatcccggcatgatcagagccgacgtgcacagcaagtcggcggcagcggcagcgacggcaggatatctcgcggccaggccccccacgctggagatcttcccttcatggccaatgaggcagcaacagcagctacacagtgggaattcgcagtcagtcgggagcaccactgactcgagctcagcccagaacacaatgccgcagatggagttggtgtccccagcgagtatcagggcctcctccgagcaccagcaccagcagcagcagccggggcaggaggtcatgatggtgaccactgatgattacagctacaagccaggcctcgctgctgcctccccaagctttcagcagcagcatcagctccagcaccaccagcagcagcagctgcacggaggaggagaccatgacaagaggaagcatggatccacaagaaaagatggcaagtcagtggatgccaagacagaacggagattagcgcaaaacagagaggctgcgaggaagagcaggctgagaaaaaaggcttatgtgcaaaacctagagaccagcagggtcaggcttcagcagatcgagcaagaactccaaagagcacggtcacagggcctgtttcttggggggtgcagagcagcaggcgacatgagttctgtaaaatcgtttgcaggcgcggccatgttcgacatggagtacgcgcgctggctggacgacgacagcaagcggctgaccgacctccgtggcggcctgcaggcgcacctgctggacaccaaccttggcctcatcgtggaggagtgcatgcagcactacgacgagctgttccagctcaaggcggcgctcgcgcgctccgacgtcttccacctcctcaccggcacgtgggctacccccgccgagcgctgcttcctctggatgggcggcttccgcccctccgaccttctcaagatactgatacagcagctggacccgctgacggagcagcagatgctggggatctacagcctgcagcagtcgtcggagcaggcggaggaggcgctcgcgcaggggctgcagcagctgcaccagtcgctcgccgacaccgtcgccgccggcacgctcaacgacggccccggcgtgcccaactacatgagcctcatggccatcgccctggacaagctcgccagcctcgaaagcttctaccagcaggctgacaatctgaggcaacaaacgttgcatcagctgcggcggattctaacaacccggcaggcggctcggtgtttcctctccattggggagtattaccgccgcctccgtgctctcagcaacctctggtcttcacgtcctcgcgagaacttcattggcaccgagagcgtcagtcccacaggaaccgagctgcaaccgatgcataatcagcctcagcagaatcagtactcaggattttgagagcttctcctggaggatgtaaactccggccaaaagtgatgttagaaagagagggtgggagagggagaggggttgtaatgttctattattaaagtattgagaaagcaacatcactaggaaaaggaagaggcaaaaatttgttgaggtgcaatgcaatgctggtcactggctcacttgttcc

SEQ ID NO: 21165 - DNA, 1865 bp, Oryza sativa
  Clone ID: TF_OsC596_1
atggagggtggtaggctaggaggagcggcggcttcagcatcggcggcggcggcggcggacgcgcgcggcgggatgtcgggcttcgcggctcctcagcacgccatagtgaagcatggaccagggagtgtgacacattgtggtggaaaatggacttttgctgaactatgccagtctgaacaaatttgggttcttgactgctactgcatgcaatgggcatgcaagtttgcgaccaatgcaactgaatgccatacaaatttgaacaacgtgcaacctactcaagttactgattttggggcacttgcgcagtctgctggattccgaatagaagatctcgctaatctcagtacaaatggtttgttcaatctgaagtcaaatgctcataccattatcaatgaccccctccaatttgagaattatgtaaagtctatttctccgtctaatattactacacccccggccgggtcagtagttgaccctcagacactggtcccacaaaagggagcacaactgaattgggtaactataaggactggtaacgttgagaattggggggagtcgactatggctgatacaagtccaaggactgatacatcaacagatccagacactgatgagaggaatcagatgtttgaacaaggacagttagctgctcccactgcttctgattctagtgacaggtcaaaggacaaactagatcataagacacttcgccgccttgcccaaaatcgtgaagctgctaggaaaagccgtttaagaaagaaggcatatatccaaaaccttgagagtagcagattgaaacttactcagatagagcaagagcttcagcgggctcgtcaacagggcatttttatatcaacatcgagtgatcagtcccactcagcgagtggaaatggagctttggcatttgacatggagtatgcacggtggttggaggagcataacaaacatataaatgagttgagggctgcagttaatgcacacgctggtgataatgatctcaaaagtacagttgatagtattatggcacactacaatgaaattttcaagctcaagggtgtggcagccaaagcagacgtttttcatgtgctgtcgggaatgtggaaaacccctgctgagaggtgcttcatgtggctaggtggcttccgatcatctgagcttcttaagttactggcagggcaattagagcctcttacagagcagcagcttgctggcatagccaacctgcaacaatcctcccaacaggctgaagatgctctttctcaagggatggaagcactacaacagtcgcttgcagagaccctggcatcaggatctctcggccctgcaggatcttctggtaatgttgcaaactacatgggacaaatggcaatggctatggggaaacttggtaccctagaaaacttcctacggcaggctgataatctgcggcttcagactcttcagcaaatgcagcgcatattaaccactcgccagtcagcacgagctctacttgcaataagtgactacttctcccggcttcgtgccctgagttctctttggctcgcccgtccaagggaataaataaattgaattgattcgtaagtaggatattgttaggtaatgtatctctagtgttatatcagataggaattgaggtattccctacttcctagattcttcacaatgttcatgtattggtgacagactcggatcactatctttccatgtatgtcttcaagtgaatgttcaatgcatattgtagtctgtatatgacatcatatgatgagttgttgggcaaatttgtaacatttttgagaaaagtgggggatgtaaatacttgcagaataataaaaaagcataaaaaaaaattatattggagcctgcag

SEQ ID NO: 21166 - DNA, 1595 bp, Oryza sativa
  Clone ID: TF_OsC100050_1
atggcgaacgcgaagctgcccaagcaggcgctgctgccgccgcgcagcccgttcccgacggcggcggcggcggcggggccgtacgccggcgaccacggcccgatcgcgcggccgcagggtgcgccgcaccacaggcacgggcacggccacgggcaccaccagcgcacgtcgtcggagagcttcatcgaggagcagccgtcgtggctcgacgacctgctcaacgagcccgagacgccggtgcggcagcacggccgggccggccaccgccggtcgtcgagtgactcgtttgcgatgttcgacggaggcgccgccgccggcgcttacgccaatggctttgaagggatgggaggaggaggaggaggagggcaggccgcgccgtggggtggtgtgcaggagtactatgcgaagccaagctcgtttggtaggcaccagggccggccatgggagcagggcatgaacaatttggtgaattacaggcaaagcggcggtccaccgatgccggcgaaggagaaggttggtgggcaccatgggtcgccgagcgtgttgagggatcatgatcatggtatggacaggagatcctcggacgaatcggggcatgatcagaaggttgggcctgagaggaaggagggcgtgccgccgaagcatgcacaatccgaggcggacaccaagcgcgctaaacagcaatatgctcaaaggtcccgcgttcggaagcttcaatatattgcagagcttgagagaaaagttcaggcattacagtcagaagggatagatgtgtctgctgaaatggagtttcttagccaacagaatattatgcttgacttggaaaacaaagccttaaagcaaaggctggaaagtctagctcaagagcaactaattaaacgctttcaacaggagatgtttgagcgggaaattggtcgtctcagatcattgtaccagcagcagcagcagcaacagaagcagccgcaacctactactaccctcagtcgaagtaacagcagagacctggattcacagtttgctaatctgtctctgaaacacaaagaccccaactctgggcctcttcgtactcagtcctcgtcaatcttgtgagttccacacaaagttgccacaactcctagataactctttgtggctgtcatctgcatcaagaaaggagcaggcgcacctggaatcgtgtacccccatctatggtgaataataacactggaaaggctaataactgtggatctgatctttattcttttggaatatgcacctggcggtcatcctcagctcacttccattgttgatgctcgaccagtcggaggtgtttagggtttttctttgtagtttgatgcttttattatcgcatcgttgtaccattttcgaaatgctagggttctaatttgttaccgtcctgttccctgtgatcatgcattatgttagcgatatttggattagtcttgcctttatcaatggaatgtggagcactagtcagcatctggtacatacagatgttttgaaattgtgccacatccttgagaaaccgtatgtgttgtaacattgttattcaataagctagtgcaaatgaagtattagcgttgttcagtgttccc

SEQ ID NO: 21167 - DNA, 1178 bp, Oryza sativa
  unsure (1)..(1178): unsure at all n locations
  Clone ID: TF_OsC239382_1
atggcgcagctcccgcccaagatcccggtggcggcgccggggcaccaccagcactgggcctcggccgggggcgccggcgacgcggcgtgggcggatgagttcgccgagttcgcggcgtcgcggcggggcgcgcaccgccggtcgctgagcgactccgtggcgttcgtcgaggtggcgccggcggggtgcggggcgggcggcgagttcgacaggctcgacgacgaccagctcatgtctatgttccccgacgagggcgggtcgtcggccccggggtccgacaacggcggcagcgacagcgacggcggcggcgacaagcacgccgcggcgcagagcgacgacgggcagcacgccgccggggagccgacgcaggagcaggcggcggccacctcgccgacggagctgatccgggaccccaagagggtcaagaggatactggctaatcggcagtcggcccagaggtcgcgagtgaggaagcttcagtacatctccgagctcgagcgcagcgtcacaaccctgcagaagtggcgccagtttgagaccgaccgatggacacagccacactggttggctggcaatagcacacaatgtggcgaggagatgagcgagagcaacgaggtatccgtgctgtcccctcgggtggcgtttctggatcagcagcggacgatcctgaccgtcggcaacagccacctcaagcagcggatcgcggctctagcacaggacaagattttcaaggatgctcatcaggaggcgttgaggaaggagatcgagaggctgaggcaggctgtcctagcctgttacaggctgacggcacctgacctcttgtgcatgatttggttcccgcttctcggtgaaagaaaccaccggaggcgaaaaacctgcgcagcatatcgttatcgtggaacaccgttactgctccagtttcaaggacaagtcgcacagcgtgcaatacaacatctgcattattcagaatttgcagtatatggatctggatcagcgatgattaaccatgctacatgtggtgttcttgtctcaagatactgattgattggagttctggtttacaatgggaattgtgggagatgtcaataagaaaatgtgaactgcaataagattaactgtgatttttgaaagccnnaattaataataataaaaatatttaaatttaattatataataaa

SEQ ID NO: 21168 - DNA, 1021 bp, Oryza sativa
  Clone ID: TF_OsC17917_2
cccagcgtccgctttggaaagtgagttcaagtagactttcggaatacaaagtagaggatcttgcggcagctctattgaattctttcacctacaacattgggcaggtatttccagatatctgagttactaggtgtcattcaccaataatgtgctgacctcattttgtttctcttttagatagcctactttgtagctaatctttctggtctgaagagaattttcttccgaggtgcttatatctgtggccatgagaagactatggacaagatttcccattccctcagtcttatgaacgactcgggtaggccccaaatttgttgagagatgaggtgcgtgagcaacatggaaacggatgcggcaaacagtttgttactgaggtgtgtaaggttgttctacaccgtaacagtttggcagtagttttaagtcaatcatgatttttacggaggaagtgtgcacacaaggtgttacccagttagcagtgctcatgcctgttgagctcaggttgtatagttacttatttttctgtacttattggtgttggtgttcccttatctctcttgttctgtatcttgtatatatggcagcagccgggataatgaacatatccggtgtcgttgtattatttgcaaaaatcaaaacatcccttatcaggttgagtattggtccaaaagccaagttcaaacaacatttctgtgccatgaggggttcttgggaacactaggtgcattttggagctatgagaacatgggtattgacggcttggcagcacatgaagtcataagggaggtcttgcttggcgctccttacactgggcagcttccatctctgcctctgactcaccaacaggacaatggagaagatacgaccattgaaggagaagtagaacggcttcgacatgacaatgctgtgctgaaggctgagcttgaacggttacaaagggagaacacagagctcaaagcgaagctggtaaaatctggcaaaccaaataccttttatcattaaacataggatgcagtagtga

SEQ ID NO: 21169 - DNA, 1866 bp, Oryza sativa
  Clone ID: TF_OsC55794_1
ggtcgggcgggcttgcctgctctcccgcctgcccgtcttttttgggcggccgcaagctgaagccagattgctagaaggtagttcttgaggactgaagcaaggtagaagaacttgagcttctggttcgtgtggagctactgggataagttggctgctgattgctgaagatgggagaagctagcagtagttcaggacatccaaggcagaatcctcatgttcttggctatggcttccatggagctatgcccaactccttgccttctgcaaacttgttcgagcagcaaggaggtgctaactattttggagaactagaagaggctctgatgcaacaggtggccacactcaggaggactcaacaaactgcaaccaccacctccacccttcatcatggagacaccacccccttctccaccactgctactgctgcggctacagctaggcctcctcctacactggacatcttcccatcctggcctatgaggtctctccacacacccaaggagggttcaaatgtgacagcagacacaacagactcggagagcagcagcaagaacaacagcaaccaaaatgcctcatcagaccagcatgtgctagtaggagacatggcaggccagttcgaccaaattccacagcaggaacaacacaagaagatggcaactaacagtcccactcatagcagcaagactggcaaggcgcttgatccaaagacgatgagaaggctcgcccagaaccgagaagcagcacggaaaagccgactgcgaaagaaggcttacatccagcagcttgaaagcagcaagctgaagcttgctcagatggaacaggatatccacagagctcgttcccagggcttactgcttggagctccaggtggaaacaccagctcaggtgccgcaatgttcgacgtcgactacgcccggtggctggaggaagacagccagcgcatggctgaactgcacggagggctgcacgcacatctgccggacagcgacctcagagccatcgtcgacgacacgctaacccactacgaccacctcttcaacctcaagggcatggcggccaaggccgacgtgttccacctcatcaccgggatgtgggcgaccccagctgagcggtgcttcctctggatgggcggattccggccctccgagctgctcaagacattgacaccccagctggatcccctgactgagcagcaagtggttggtatctgcaatcttcaacagtcatcgcaacaggcagaggaagctctctcccagggcttggatcagctgcatcagtcattagcagaaaccgtggctggagggtccccgttggatgaccccaacgtcgggagtttcatgggtcacatggctattgccctcggccagctatcaaatcttgaaggttttgtcatacagatcaagataggagttgcactctctctttgtgtgactcaacttcataaatgagtcaggcaggcagctcgatgtttcttggccattggagagtaccataatcgcctccgtgccctgagctcactttgggcttctcgccctcgagagtaaaccccatgcctgatactggtggcagatgaaggcaattgtggggaactaagcattgcagcacatccatctgagagccaatattcagccttctgaaatcctgtttcaaatgtattttgcaactaaccttcaaagtagggagcaaaagcttgttttttaaatgaaatctagcactctagcagatatgtgagaaactcagaagagagttgggaaacaatggaaggctccagctgcactagcaaaattttcagatggaatgaatgggattgcatgattttcagttactgatcataaagcaagtagttcacgtcctttcctggatgat

SEQ ID NO: 21170 - DNA, 2243 bp, Oryza sativa
  Clone ID: TF_OsC594_1
cgccacctccgcctcgcgcccgccaccccgagaccttctcgaagcttcctcccccccaaaccgaaaccgctcctcctcctcctcccaaatccaccacggcgacgccgccgccgcagagcccctagctcccggaggtccctcgcccccgccagctccgacggcctcacggaaggaggagtaacgtgggcgttgattggatttttttgttttccccccaccttgagtgagtctgtgccgtttccccggcggcgagggagggcagagggctgatcatggtcgtgcgccgccggtgccttgccgagatttcccccaaccgccaccgacgatcgttcacttggcacaaaggggagtagcactgtccaagctgttgtggtccgtcagggagattggccaacctgtggggtttcagatcgacataagtacgtcagtatttcagccatcgatcaatctggcggttcatagggctgtgcttgcaacctttctggcagaaaggagagagcaaagtgatttgctgtctcctgttgattgtggcctgttgaggcccagtaatggcagatgctagttcaaggactgacacatcgattgttgtagacaacgacgacaaaaaccaccagttagaaaacggacatagtggtgcagtcatggcttctaactcttcagatagatctgacagatctgacaaacttatggaccaaaagacaattcggcggcttgctcaaaatcgtgaggcagcaagaaaaagtcggctgaggaaaaaggcatatgtgcaacaactagagagcagtaagctgaagcttgcacagctagagcaggaacttcagaaagctcgtcagcagggaatcttcatctctagctctggagaccagacccatgccatgagtggaaatggggcattgacttttgacttagaatacactagatggctcgaggagcaaaataagcagataaatgagttgaggacagcagtgaatgctcatgcaagtgacagtgaccttcgtcttattgttgatggcataatggcgcattatgacgaggtattcaaggttaagggtgtagctgcaaaggccgatgtgtttcatatactttcaggcatgtggaagacacccgcagaaagatgcttcctgtggcttggtggtttccgtccatctgagcttctaaagctcctagcaaatcacctcgaacctttaaccgagcagcagttgctgggattaaacaacctccaggaatcttctcagcaggcggaggatgcactttcacaaggtatggaagcactgcagcaatctctggcagatactttggctggatctctcggttcatcagggtcttctgggaatgtggcgaactacatgggtcagatggcaatggccatgggtaaactaggaacgctcgagaatttcctttgccaggcggacaacctgcgacagcagacattgcatcaaatgcaacgaattctgacgatccggcaagcctcgcgtgctcttcttgccatacacgattacttttcacgcttgcgtgctttgagttcgctgtggcttgctaggccacgggagtaacaaaatggtcatgtgtgcctgtgacgaggttagacgctcattttgatggactgcagataattgggtttttccctgtacaattgtgtttggcagctgtggactaaagttaaaaactgtacctaaagtggtgtatgcaaataggtgaagcctctaagtaagttataacgattgcattattgtgttagcaataaaagttgggtaattcaggatgtgtcctgagttgttttgttgtagtagaagaactgcatgtagtggctggaaatgcagtgttgaatgtaactaaagctctgctgctcacgttgcataatgttgtgtagtaatagttagctagtgatgcccattttacctgcactcctctgggaagctgaaactgcaacctgaagcaaccacggtgcagaagaccgcatgcatggtaaatgattaaaaggatatatatgggctcaacatcgctgccaaatcctgagataatgaacaggcatgctaaactgctacttccacatgaaacctcccagttgacatgaagaatgagctgttcagttttatggtttctgtgttgcactgtacataattcctgtacgggtctgaatttatcctgaaatcatgctaaactgcagaagcatatgaaatctccagaccggttgacatgaaaaaaaaaaaaaaaaaagcgggggatccactagtttagacgca

SEQ ID NO: 21171 - DNA, 1443 bp, Oryza sativa; identical to SEQ ID NO: 11515
  Clone ID: TF_OsC65434_1

SEQ ID NO: 21172 - DNA, 495 bp, Oryza sativa
  unsure (1)..(495): unsure at all n locations
  Clone ID: TF_LIB3433-057-P1-K1-E1
cggacgcgtgggggaaaactgttagatgccaagactgaaaggcgattggctcagaacagagaagctgcaagaaagagcaggctgaggaaaaaggcttatgtgcagcaacttgagactagccgcataaggcttcagcaaatcgagcaagagcttcagagagcacgctcacagggcttgtttcctggaggatgcagtgcacctggagatatgagctcgggtgctgtaatgtttgacatggattacacccgatggatagacgacgacagcaaatgcatggcagagctccagggcgcgctacaggcccagctccccgacggaaaccttggtgccattgtggaagaatgcatgcgccactacgacgagctcttccaccttagggccgtgctcgccagcttccgcgtgttccacctgatgactggcatgtgggcggcgccggcccgacggtgcttcctnncttttggggcgttcggccatcagaaattctcaaaatgctga

SEQ ID NO: 21173 - DNA, 594 bp, Oryza sativa
  unsure (1)..(594): unsure at all n locations
  Clone ID: TF_LIB4371-001-Q1-K1-H2
ccctagcaacccattgcagtacctgatgattgatgccacaagtggtgtgaactgtaatgttggtgcagccaatggaactggagacacaggtgatgctgtatgccacgctgatcaagagaagtcacttaaaaggcgctcaggccaaagatcaagggtcagaaaacttcaatacattgctgatcttgagagaactgttgactcacttcagaacataggggctgatttggctgtgagggtggcatctcttttccagcttcgtaatgctctatcaatggaaaacaagcaactgaggaggcagatcactagtcttcagcaggcaaaactaattaaggatggccaaacgcagatgctgaagaaggaaaccgagaggctgaagcagctctcagtgcgccaccgcaggagcaggagcgtcacctcttgctttgaggccaactcatttggaggaggagacccatctgcgatcaactggcagatgctcgacatgtcaaagctcagcttgaacggggncgctttgttgttcctcctagaggcggctacggcatgtgaaaatttgacagcaacaaccaacattgcctgcactgatcttcacctgtg

SEQ ID NO: 21174 - DNA, 1582 bp, Oryza sativa
  Clone ID: TF_OsC739_1
ttgtcggcgaacgcgcagcgcgcgaccaccgttgcttggagctagctcgcggggatctgcagatctcgcccatggcgtcctcgtcggacgagcagccgaagccgccggagccgcccgcggcggcggcggtggcggggacggccgtggccaccgccgccgcggcggtgccgacgcacgccgagtgggcggcttcgctgcaggcgtactacgccgccgcggggcacccctacgcgtggcccgcgcagcatctgatggcggcggcggctgcgggggcgccgtacggcgcgccggtgccgttcccgatgtaccacccgggcgccgccgcggcgtactacgcgcacgcgtccatggccgcgggtgttccttacccgacagctgaagccatggcggcggcggcggcggcggcggcgggggcggtgccggaagggaaggggaaggggaagggcgccgccgcgtcgcctgagaagggaagctccgcggcgccctctggggatgatgcatcccggagtggtgacagtggcagcgaggagtcgtctgatactagagatgatgacactgaccacaaggattcgtctgcacctaagaaaaggaaatctggtaatacatcggcagaaggtgagccgtctcaagctacgcttgtgccctatgctgctgtcgagtcaccgtatccgttgaaggggaggtctgcgtcgaagcttccagtttctgcaccagggcgggcggcacttcctaatgccacacctaatttgaacatagggatagatctttggagtactcccccagccttagctgtgcccgcagggcagggggaagcaagtcctgggttggcacttgctcgacgtgatggtgttgctcacctggatgagcgtgaattgaagagggagaggcgcaaacaatctaacagagagtctgccaggagatcaaggttgcgcaagcaggttggatacctctatgggtctggcagtagatggcagacctggaaagaaacacttattctgcttggtgctgccatatttctggcaggaggaatagagtgcaggatagatgcatacacgactgatgggtatgatgtcagcacttcaccagatgttggcttgtctgcacacgggcaatatgcacaacaagccatgctccaagaaactgacaaacagcatgctcctcacaagaacactaataataacagcaacgggaactatgtaggtggcagccacaaaccagaggctaactctaggtgagagagaatcatgaggaagtaacgacaaagatgagatgaggtgttcttcttatctaaccacaacacccatcatcaaaccagtgtgtgttcttttttagcaaaaagctgttgttttagttcttctcacaactcaccggggccctgtagagctgcccccaaatcgcagccatatgtattatttatggctcgttgccgagaagaaatgagtttgtgttttgtgtttgtgtggtgtgtgttttgtaaaccgattgatgtagctattgtaacaaacctagcgcttagaatttttatgtttgctaacatttgatgagggaatgtaaccggccaattcggtggcctgatcggttt

SEQ ID NO: 21175 - DNA, 583 bp, Oryza sativa
  Clone ID: TF_OsC207527_1
atgtcatatgcatttaacaaattgctcccaactacccatttcaggcagtatgctcagaggtctcgtgttagaaagctccagtacattgcagagctcgagagaagagttcaagctttacagacagagggtgtagaagtttctgctgagatggattttcttggtcaacaaaatatcatgttagatttggagaataaagccttgaaacaacggcttgagagtctatctcaggaacacctaattaaacgctttcaacaggagatgtttgaacgggaaattggccgtctcagatcattgtttcagcaacagcaacagcagcagcacataccacagcagcagggtcctacccacagtcgtagtaacagcagagacctcgattcgcaatttgcaaacatgtctctaaaacacggcgatcccaactcagggcgtgatgctgttccaggccttcgcatttagggattcttttcccccagcttatgattctgtgagtttcacatagcttcgctatccctgtcataccactatttgtggtcattagttgcatcaggaggggagcagcgacgatgaacctggaatcacatccaat

SEQ ID NO: 21176 - DNA, 904 bp, Oryza sativa
  Clone ID: TF_OsC2449_5
ttatgccgccctgctgctgccacctgccgccgccaggttgccgctgccctggtcctcgaacgcgccgatgatgccgatgacgaaggccgtggagaaggactgcatcgccgtgctgttgggcgccctgtggaactgaagcggcaccgggaagaaggcgtggcccttgagctggttcgtgccgttggtcaacatgagcagcccgttcggggtcaccgtcgccatgtcatcgaagctgagattcgcggcggtgaacccgttgaggacaaactgctcgtcgccttccgcctcccgcaaacctccgcagcccgtcggcgctgcctcccgcagacctgacgatttggggatttttggaagaactagtaggttttgggtgaagaaagggggagggaaatcgaatcgattcccgatggcggcggcgccgattgtggttgtcgacggccgcgcggcgcggcgtgctcgcagaggcagccagcgacggcggtcgcccatcctcaagatcattcgagtatgccttctttctctcccttgcctgttgcgctgatacccggttcctcagcaaccttttgaggcgcttgtgctccttatccgcggggctgcgcccgcggcggcgcgcgctggcctgcgccgtcgacgactgcgcgcgctccgccccgccgccgccgccgccggccgccctccccgacgtcgaagcgccgcccggctccagccccagctccggcactctccctatctcctcgtcgctctccattccttccttgatctccatgtggtggccgccggagctggacgacctctcggagctggacggccgcgagctcgtcgcctgctcctgcattctcgccggcgaggagggattcgcgtgcactcctccgcttgcttcagcttcagcttccccactctgtcc

SEQ ID NO: 21177 - DNA, 1578 bp, Oryza sativa
  Clone ID: TF_OsC2527_1
aaacacagcaatttaagcaatgcaaagattgcttcatctcatatgtgttcgatggaagtcattgcaaaattctacaaaaaagataaaacttgcatgataacctcagcaaatcttccgcgataacgactgatgttctctcaactctctccctctcttaatctccctctcctaaaagatggacccataataataaacctatggttggtcaggttagtgaactgttaaccacaaactaatgatattgcaagcaattctgtcacaggtgaagatcagtgcaggcaatgttggttgttgctgtcaaattttcacatgccgtagccgcctctaggaggaacaacagcgccgccgttcaagctgagctttgacatgtcgagcatctgccagttgatcgcagatgggtctcctcctccaaatgagttggcctcaaagcaagaggtgacgctcctgctcctgcggtggcgcactgagagctgcttcagcctctcggtttccttcttcagcatctgcgtttggccatccttaattagttttgcctgctgaagactagtgatctgcctcctcagttgcttgttttccattgatagagcattacgaagctggaaaagagatgccaccctcacagccaaatcagcccctatgttctgaagtgagtcaacagttctctcaagatcagcaatgtattgaagttttctgacccttgatctttggcctgagcgcctccaccccatgctccttccagtaacagcccaccatccagcctcactcacgacttcaggtataggtgtcaagctctcatccccatttctttgcttcacctcctgcagtacagcaccaccctcaccatcctcccactgcctcttagccccacccaacctaactccatgagattcccttcgtgccactttcttccttttaagtgacttctcttgatcagcgtggcatacagcatcacctgtgtctccagttccattggctgcaccaacattacagttcacaccacttgtggcatcaatcatcaggtactgcaatgggttgctagggacattctccaagacagcgttaaccatggaactctctgaactggtcagcctagtcttctgtctcggcgaatttggtccataaacacagctaccttcgatgccagcaccacttccacccccttcagccgcagcattgaacgactccccagcttcgccaaccggctgcggatccccttcatcgatagggtagattgggctctggaacgacgtcagcacatccaagatagcatcagaatcgctgcaggctctcctgagaggaggaagggtgtggctcttcccggagtccgcgaggagatcatcgagccagcacggcggctcaccgacgaatggatcctccgacggaaacctgcagctctgcgtgaacaagctgtcgtccctccttgtgatctgaggacccagcggcgggcagcggggagggaggtgcggcgaccgagacatggccgagagaacacgctcccgacgtccgctcgcctcgcgtgtgccggcaccggggggggggcgtgggggggacgcggcggcggaggagggagaggagggg

SEQ ID NO: 21178 - DNA, 2100 bp, Oryza sativa
  Clone ID: TF_OsC595_1
atgagccagttgaagatgctcatggatgtgacattacatgggatgatgtggatgaagctgttggtacgacacactatcttcgaggtcacaatgttccaaggagagctcacaatcgtgttgggcatcaacaagcttgaaccaggtcagcttgctcttgctgctgcttctgactctgacagatccaaggacaaacatgaagatcaaaagacattgcgtcggctcgcccaaaatcgcgaggctgcaaggaagagtcgtttgaggaaaaagtctcgcacagtgccctccaattctgggcagttgcagggcatttttatatccagctcagtggaccagactcattccatgagtggaaatggggcattggcttttgatatggagtatgcacgttggttggaagaacacaataggcaaattaatgagctaaggtctgcagtcaatgctcatgcaggtgataatgagctccgtggtgttgttgacaagatcatgtcacactatgaggagattttcaagcagaaaggaaatgcggccaaagcagatgtctttcatgtgttatcaggcatgtggaagacaccagctgagaggtgtttcttgtggctaggaggattccgaccatccgagcttttaaagcttctttcgacacagcttgaacctctcactgagcagcagctgtcagggatagccaaccttcagcagtcttcacaacaagctgaagatgctctttcacaaggaatggaggcccttcagcagtccttggcagaaacattggctgggtctcttggttcttctggatcaacgggaaacgtggcaaactacatgggccaaatggcaatggccatggggaagcttgggacccttgagaatttccttcgccaggtaactttgatctggctcagcacgccgcagtggcagtacatcggcttcttcactgtgatgccggcgtatgggttaacctgcacaggagatcccatcacttccattggcttatggtgtgattggttgggatacggagagtgcgcaggggacgactggcacgttattgactgcggggcagattgccacacaagcgagttggtgatcgaaaacttgaagccccggtgcatcagcaatgcaaggaggcgagcggtgttgcgagcatcatcgagcccacagtgggcacggccctcccatgagaaggagcagcagaggacggactgcattgaatcccaaaaatcgcacgaatatagtaccaagctagcagacttcaatgagatcgggaggtagatgtcgcaacgctacgggagtctcttaaatctgcattcaagttccaacattacgcggccatgccatcttgcccatgtcacaacagcgaagttcttgtgctaaatgcctatttcctccaaccacttggcatccatgggccatgcctcacttccttccccacctcgatctaccgcagtttgtggattgccagtaaatgccttggacatgtatgactactgttgctggctgaacgtacagtgggagcaacgttctagtagcaccccttcagcggctacacttcttgtcgggatcactgaggaattaatagcaactgtggtagattgaatggccacgttgtagcaggttaatgcatcgaaagtgatcgaacctgggcgaattaagcagacggtggcagccgtagacctagcagtcatggcgccagttgctatgccattaactcagatgtccccgccggcggactccttggtggagcaagagatggcaacacagcagaagaccgtggagggcacgacgaggacctggccagcagtggcgccatcatctcagttatctccatcagaggctggtttctcgaactcaaaggagcaagaggcagcgccagcgtggtcctcggaggcgggcggaatggcatggcacgaaggtgggtcggcgttttgcgtgaaggtggagcacagtgatggcgcgtgttgcgcgcagccaggctttgcttcctcccatgtgttggctgttgggctggccgggtcgactattgctgaagacaacggggacctccaaatggtcctggtttaaatggagatcgccgcccaggccctcacctgttcagccgcgacgcgactcgtc

SEQ ID NO: 21179 - DNA, 1500 bp, Oryza sativa
  Clone ID: TF_OsC1713_5044
ctacgtcatcaacgacgccacgccgccgttcgacaactgggccggggcggcgccgccgtgggcgccgttcgccgtcgagcgtaggaggcgggacagccctatcagcacggcggcgttgcgctgcgcctcgccgaggcggcgccggagcacgcccgcctcggcgtggtgccgcgcgttcgcgccgcgcacggcgagcgcccgccgcgccgtggcgtccagcctcgacgccagcgcgcgccgctcggcgcggagctcgtccgcggcgcgctccagctcctccacccgctgccgcctccgcgcccgcgaccgccgcgccgactcccggttcgagatcttcctcctcagccgccgccgcctctcctcctcgccgtcctcgccgccgccgccgccgccgcctccgccgtcacagtacaacaacacatcaccaccaccaccactcccatcgccggcacctaccaccggcgacaagccggcggccgcatccgaggcaacaccatcgtatccgaacgccgccgcgtcgacgccgaacaagccgaagccgacgtccatgtccgggaggccgaagtcgagcggcatggcgtcgtggagggacagcattgcggcgatcagggaccgccagaactcctgctcaagatcgtcgctcgctcggacgccaccacactcgtctgctcccagacggacgatgcgactgaggaagcagacaaggcggcaaaggcggggaatacggatggcgacggagggggcggacaaggcggcgaggccgggggaggaatagcgagctttcgacttgctgtaatcttcccaccaaacgtatctcagagcttaagcagcttagatagatatggccatggaaattcagatatgaagctgcagaaggaaggagacaggaggctggtgctaggtctctttctcgaggcttttggcattgatctctgcatctgcatgttgacacatgtcttcttgagtgtcttctctttagtgaaacgggaaaccgagcagcatgcatatatgggtgtgatgttgaggaatgaggacgatggttcagatatgcaggttgaaaatggcatcaaagtgaacaggtccttagctattagattggctatagatgaattggagctagtagtgggctatactattaaacttgctcttattgaaatgggacagtgcagaatggacaatgcaccaactgctgcagcaaacagaagagtgcatgaaattgcatacagattcagagatgcagacaaagcagatggagaggagatagatagtagtatgctttgtgggctggaatttctttttagcaataattggaggcccattcgattcacagaaactgttgcatatgcccccaactatgcatgctctttcagtcacctcttgcaacagctgctcaggatgtcgattgcttttttttattgggaaaaaatcttttcgctggcggttctcttaagggtccgcctgcgaaaagcgaaaatagattttcacaagcggttctcttaa

SEQ ID NO: 21180 - DNA, 1640 bp, Oryza sativa
  Clone ID: TF_OsC2757_1
tttttttttttgagagtaatagtagtagtaattatatattgcacttccttgatttgttttgacagagaaacagaaagcttactgcctcattaatccttacatagttggagtacatgatgatgatgatgcatgcagaaggcttaacttaaccatcacttgatttaccaattacacaagataattaggccattaattagccctagcagctagcttagcttcgttaggtgcagtgcttagttgcttacccccagtggcaagtactgtaattttcttcatcttcttcttggtctctgccatggcagcttcagcttcagtgtttgagctagcaaagctggaacagctcgggggaggatctgaagaggtcgtcgaaggcggcggagtcgaaggcgaggagcgggtcggtggcggcggcgacggtgagggcggcggcggcggcggcggcggcgccgttggtgttgatgcaggagaggatgtcgttgagggaggcgaggcgcgcggcgagctcggcggcctgggtgcggaggacggcgttctcggcgtcgacggcgaggaggccctgggtggtgaggccgagcgcggtggcgacgtgcgcgttctcgcggcggaggtgcgccacctgcgcggtgaggtcgtcgaggtggcgctgcttccgcatccgcgaccgccgcgccgactccctgttcgacagcatcctcttcgcccgccgctgctccataagcgccctcagctcctcctccgccgccgacgacgacccccccgccgccgccgtcgccgccgacaccgcgctccccccgctcccgcttgacgatgccatcaatcaatcgatcgcaaagatttcgggagaagaagaacaacaagcaccactagattgctacaagcttagcagcagcagcagcagtgaagaacaagaagtgcatatactaaactgaaaccaaaatccaaaacgaacacgacgacgacgaagaacacacacagagatcgacaagaacgacgacgacgaacacgagatcgattattgtagaaggaagctagagagagaggaggagagggaaatggatggcgagtagcttatgagaagacatagaaccagtagaggaagacgacggagaaagactggacgagatgggtgcggcgccggagtgtggagttgatcataaaccccgagaggaggatctcactgatcacaggcgacatcgatcaggaactccagcacgaacggtataagcatgtgcctccctcctttcttccttccccctctctcactcgatcaacaagaacagcatgcaagaacaagaacaaagctctagctccctccctccctctccaatggcggctggggttataaagagcgaggaggctggctagcctagcaccggattcgatcggagcggtcggtggcaaaaggctagagctgagctagctactgccactgatcgatgcagcagcactgggcaagctgagccactggtgctagctacaactcgaggcgtctggatgtgtctcttgatgccaagtgccaagaagaggatggtggtggttgttggtagggaggaggagatgatcgaggagggggggtgtgggagcagcaacacgaggtggatttatagagaggacgcacccatctctctctctctttccag

SEQ ID NO: 21181 - DNA, 5561 bp, Oryza sativa
  Clone ID: TF_OsC799_1
ttgcgtctccccccaccaactagctctccggcaccaggtagctctctctctctctctctctctctcgcgccgccgctacctcgccgcgccgccgcgggtggggagatttgaccggcgttgactccgggatggacgggcggttcccgctgccgccggcgagcggaggggggcgggggcaccaccggcgggcgcactcggagacgttcctgcggctgcccgacgcggacctcctcctcgacccggagggggacttctccttctccgacctcgacttcccctccctctccgacgactccccggccatctccgacccgaccccgccgccgccgccgccgatggctgcgacccccgcgccggcgccgcggccaccgggtggggcgcacatgaggagcctctccctcgacaccgccttcttcgagggtttctcgttgcagggtgggggaggaggaggaggaggaggagggagtgggggaagtggtgggcataagaggagcgggtcgatggatggggtcaactcgccgttcgagggtgagtcggcgctctccggtgggctaccggactacgcgaagaaggccatgcccgcggagaggatcgccgagctcgcgctcatcgaccccaagcgcgcaaagagaattctggcgaacaggcagtcggctgcaaggtccaaggaaaggaagatcaagtacactagcgagctggagaggaaggtgcagacactgcagaccgaggccaccacgctgtctgcacagctcacgcttctccagagggatacatctggtttaactgccgagaatagagagctcaagctacggttgcagtccatggaagagcaagctaaactacgtgatgctctgaatgaagctctgcgagaagaagttcagcgacttaagatagcagcagggcaagctccaaacatgaacgggaatcccttcaatggtggactccaacagcagattccgccctattacacgcaacagcagcagcagcagcagcaacagatgccttatttaggcggccaccatgctcagcaacgccatccaagccatcagcagagctcatcaaatggcggccagtcgctgagtggtcagtccctaaacgactccatggatttcatgtgaggagaagaaactcggggcccctattaaaccatataccaactgcagctcagcattgtaaagatagctgatgtacaatgtaatgcatatgaatcattgaatagggtagctagccgttctttgtaccagtaaacgcggtgtaagggcggtcagaccggcgtcagcgacaagcgacaggagctgatctcggcggtcagaccggagatacaatctcggtcagaccgacggcaaccaggcgatcagaccggcgcaacaccttcggtcagactgcgatccgtcgaatttgagggaacaaataacataaaagagcttcgtcgagatcttttcaaaaaggagtacattaaatttgagatgaaacctggagaagctttggatgactatctttctaggtttaacaaaattttgagtgatcttagatctgttgattcttcttatgatgttaattatacacaatatgagatttctcaccactttttgaatggtcttgatatgtctatttggaagatgaaagttacatctattcaggagtccgttgatatgtctactttgactttggattcgctttacacaaaattgaaaacacatgagatgaatattctttctcgtaaagttgattctaactcgagtgttttggtttcttcctcaacttctttggatgttgattcttcttcatcgaagtcttccgcatttgctttgtttaatgccatgtccgatgatcaactcgaacagttcgtggaggaggacttggttttgttatctaacagactttctcgagctgtgactaatcttgggagagcgaggggggaagataatggtgatgagaagaccaatgacaacaagccgaagggtacattcaaagggaggaagatcaaggagaatctcaagaaggcttttgatcaagtctacaccgcgtttgagccactaagcgatgtagatggtgagagtggagatgaagataagggaaataacatctccggtgtttgcttcatggcgcgtggtgaattagattcagagtgtgaagacaatgaggtaagtgctcttgaggaagccattaatattttgagtgcaaaaaatatgaagtgtgagaagttgtatagaaaacaggagtttatcattgaatctcttaattctgaaattgctagattaaaatatcttattcctaatgatgatgattgcacaaattgtgaggttttaatgaatgaaatttctaaaattagagatgttaatgctgcacatgatttgaaaaatagatcttctctagctcttagttttgctttgcacacacgcactttggatgagttgtgtttaactaaaaagttattgcaaaaatatcaaattgcttttcatgctagtttgatgtttaacatgatttgtgctaaaaagttaaaacaacctcatgatgttttggattgctcaacatgtactttgaataagttgaaattaaaagatgctttaggtcgtgttgggtacatggaagatgttgtgaaaaccaatgaagtgctttcttgtcccaagtgtggtaaaagcaaaggtgtcatggtagattctgaaaattgtgctaatttggaaaaagaggtttcttatttgaaaaattctttgcaaagattttctgatggtgttggtgctagaagtggtgagattttggttaaacctgatactaataaaactgtgtttaaatctgctggttttgttaaggtaaatgagaaatttgaattgaagaatgtagctttggttgaggacttaaagtataatttgctttcggtttcacaaattgttgatgaagattttgaggttcactttaagaaaactggaagtaaagtttttgattcttgtggtgattctgtgttgaatatttctcgctatggaagagtgtttaaagctgattttgataatcctgtttcacctgtgataacatgtttggttgctaagtttgataaagatgtgatgttttggcatcgtagacttggacatgttggttttgattatcttactaggttaagtagtttggatcttgttcgtggtttgcctaaacttaagaaagatcttgatttggtttgtacaccgtgtcgtcatgctaagatggttgcttcttcacatgctcctattgtttctgtgatgacggatgcaccgggacatctattacacacggacactgttggtccagctagagtgcaatctgttggaggaaagtggtatgtgttggttattgttgacgatttttctcgatattcttgggttttctttatggcaactaaggacaaagcttttcaacactttcgtggtttgtttcttcgattgaatcttgaatttcctggttctttgaaaagaattcgaagtgataatggtggtgaatttaaaaattcttcatttgaacaattttgcaacgaaagaggtcttgaacatgaattttcttctcctcgtgttcctcaacaagacggtgttgttgaaaggaaaaatcgtgttttggttgagatgactagaacgatgttggatgagtatcacactcctagaaaattttgggctgaggcggttcaaggggaggatggtcatatttttgaatacgagagcgacaacgatgacgacgaagtcggctcggccggtcagaccgggcgccaggccgatcggaccgccggcacacctccggtcaggccagcgcatgacgtgcggtcagaccggccagggtcatcgggttcgggtactattgatgctgatcaagatggacctccagagattacaacttcgaccagtactgatacagaacgtgaatcaacttcagaagtcgctgctcctttgcacattcaacgacgacatctgccggaacaaatcattggtaatataggtgagcggactacaaggtctaaggtaatgactcatgatgtttgtgcaaattctgcatttgttgcttcttttgaacccaaagatgtgtcacttgcattaactgatgaatcgtggattaatgccatgcatgaagaacttgaaaattttgagataaacaaagtttggactttagttgaaccaccttctcgacataatattattggaaccaagtggattttcaaaaataaacaaaatgaggatggtttgattgtgagaaataaagctagacttgttgctcaaggttttaccaaggtggagggtatggattttgatgaaacttttgctcctgttgctagaattgaggcaattagacttttgttggcttttgctgcttcaaaaggttttaaattgcatcaaatggatgtgaaaagtgcttttctaaatggttttatacaggaggaagtttatgtcaaacaaccaccaggttttgaaaattctgattttcccaaccatgtttttaaattgtctaaagctttgtatggtttgaaacaagcacctagagcatggtatgatagacttaagaactttttgcttacgaaaggttttacaatgggaaaggttgacaaaatgctttttgttcttaagcatggtgataatcaactttttgttcagatttatgtgtatgatatcatctttggttgttcaactcacactttggttgtgaagtttgctgagactatgcgcagggaatttgagatgaccatgatgggtgagttatcgtacttcttgggattgcaaattaagcaaacacctcaaggtacttttgtgcatcaaacgaagtacatgaaggatcttttgagacggttcaagatggagaattgcaagccaatttcaacaccaattggttctacaactgtgttggatcctgatgaagatggtgaagctgttgatcaaaaggagtatagaagtatgattagatctttgttgtatctaactgcttctaggcctgacatacaatttgctgtgtgtttgtgtgcgcgctttcaagcttctcctcgtgcttcacatcgtcaagcggtcaagcgaataatgaggtatttgaatcatacacttgagtttgaaatttggtattctacttcatcttctatatgcttaagtggatattccgatgctgattttggcggttgtagaattgataggaaaagtactaatggaacatgtcattttcttggtatatcattgattgcatggtcttctaggaaacaatctagtgttgctcaatcaactgctgaatctgaatatgttgttgctgctagttgttgttcacagattctttggcttttatctactttgaaagattatggtcttacttttgggaaagtatctctcttttgtgataatattagtgctattaacattgctaagaatcctgttcaacactcacgcacaaagcacattgatattcgttttcatgttttgagggatcatgttgagaagggagatgtgatattgcagtttttggacacaaagttgcaacttgctgatatttttactaaacctttggattctaatcgttttgcttttcttcgtggtgaattgggaataattcatccttttggcatgatttga

SEQ ID NO: 21182 - DNA, 1567 bp, Oryza sativa
  Clone ID: TF_OsC411_1
agcgcgcctcagcctcagtacccaccacctccacgctcgcgccgtcggcttcgtgctcctgcgccgccgcaccgatctgcaccgtacgcgggcgtcgatccatccaaggaactcataaaaagtcatgggaaatgacgaagctgtagttactcagaagatggggaaagcaccatcgccccctaaggatcatccagcccttagtccataccttgattggtcaaatatgcaggcatattacggcccagggatcttgccaccaacattttttagccctggaatagccgctggtcatacccctcctccatttatcttgggtcctcagcctctggtgccatccgcttttgggaagccatatgccgcaatttatcctcctggtggagctttttcacatccgttcatgcccctaatggtgagcccattgagcatggagccagcaaagtctgtcaacagcaaggatagctgttcaaataagaaaatgaaggaaattgatggtgcgactgtgtcaactggcagtggcaacagtgaaaaaacaagtggagattgcagcttagaaggatccagtgatggaaacaaccagaaggcaagtggaactcccaagaaaaggagcatagatgataggcctaaatcaggcgtggaaactggtggagctttaacacctaatgatagacctagcgaacaagcagctttgccaaatctatgcattccggttacagcaatcaaaccagacgtgagcactgctagtgacttcagagttattgccaccccagtaactgaagtgccaactaaggatgataaggaatcgaagcgcgagagaaggaagcaatcaaacagggagtctgctcggaggtcaaggttgaggaagcaggccgagactgaggaactggctagaaaagttgagctattgactgcggagaacacatcccttagacgtgaaataagcaggctaacggaaagctccaagaaacttagattagagaattctgctctaatggagaaactaacggaaaccgggcctgatgaagcacaagaagtgcctccagtcaaaacaaaagcacagcaagctcgaggcgtcgaaaatttcctgtcaatgatagacaagactggcacgccgagaagcagcgggcacatggatcatgccattgccacgcccaagcttcgtcaactcctgggctctggtctggcgactgatgctgtagccgcaaggtaatcttaacgacttgaccctcccgccgttcgtgctcaaacgcagcatgtggcctggtgaattttataagctcaacctgcccgcacgattaacatcgaagtattaggtacgattttgtcactgtattcgcccttgtaaattactagtagctgccttttagacgagcattccaaccgctccaccgggatatgaatgcccccctggccgtcagttcttccctgagtttttactctactctcgtagatctgtaacatcagtgctggctcgcgttgttcatatcaaactgatctctgtaaatactgtaacactgacagaaagccttctaactttgatcttttacctttacctgcttttggatgatcc

SEQ ID NO: 21183 - DNA, 2341 bp, Oryza sativa
  Clone ID: TF_OsC79483_1
ggcggctcggctccgccccagctccgcccgcgggccgcccgccctccctccgcttcccaatcgggctcgatggttttgttgaatactaatgccaaggacagataatgctgcttctgccaattcagttgaaccagacaaatcagaagaatgtttggagtttgatgatgaggaggaggaggtagaagaggaggaaattgaatatgaagaaatagaggaggagatagaagaggaggaggctgtagaggaggatgaagatgtcgtggaggaagttgaggaggtagatgaggaggaagatgaggaggaagatgaggaatctgatagaaactgaaggtgtaagtaaaactgaattggtgttcaccagaaggatagttacgtgaaaaggggaagcgatgctgagcttcttgcatcttcctcatggtcatgctccatggattgctcacttgacgaaacctcctgctgctgataagaaggatgatagagtaccactacctagttcaaatggagctccattgctcccgagttatcctccacttggatatggtatcatgtcagtaccaggtgcctatggtgctgctcctgctagtactgcacagcctatgctgtatgctccaagagctcctccaggcgcagcaatggttccaatgatgttaccggatggtcgtctcgtattggaaatgtaccccatagttggacaggatgatgatttcagaaaggcgtgtggaggaacgttggtccaggagtattaaaaggtgctctcatgaaggtctcaagtgcaaatcgcaatcggggttatggtttccggcagtagcacgcccggggcagtgcagagtatgcaaggcaggagatgtcttccccaacattcaaactagattcaaatgctcctacagtcagctgggcagatcctaagaataacgactcgggctctacttctcaggttaaatctgtatatgtgaaaaatctgcccaagaatgttactcaagcacagctgaaaagactgtttgagcaccatggagaaattgaaaaggttgttcttcctccttcaagaggaggtcatgataataggtatggttttgttcactttaaggacagatccatggccatgagggctctgcagaacacagagagatatgagcttgatggtcaggtcctggattgctcacttgcgaaacctcctgctgctgataagaaggatgatagagtaccactacctagttcaaatggagctccattgctcccgagttatcctccacttggatatggtatcatgtcagtaccaggtgcctatggtgctgctcctgctagtactgcacagcctatgctgtatgctccaagagctcctccaggtgcagcaatggttccaatgatgttaccggatggtcgtctcgtatatgttgtacaacagcctggtggacagttgccgctggcttcgccgccgccgcagcaagctggacatcgtagcggcactggaggacgtcatggcggcagtggcggccgctatggcggtggtggtggcagctccggcagtagcaggccagaggaatgcgtttctgaaacaagactgtacttgcgtattttacctgtatcgcagagtgctgaatctgatggtgcactgtaccgtcaattcacccctgtaagccacatggactatgagatttctgggccagaatctgaggtagacagtgaggtgtggcttggctgggtggcacagccacagattccaaccagccttgatgacttcctgccaagcatcaggacaacatgcacacacactcatacttgcaacccgcctggtccatcggcaacagagcacacgcatacatgctaccacacccacacccatgtcttcagctcagatgatgatagttgtggaggtgacaaagccaagccaaagaagagccgcaagccattgggcaaccgcgaggctgtccgcaaataccggcagaagaagaaggctcatacagcacacttggaagaggaagtgaagaggctccgtgtcattaaccagcagctggtgaagaggctgcaagggcaggctgcacttgaggtggaggtggtacggttgaggtcgttactggtggatgtgcgatcgaggatcaatggtgcattgggtagttgcccgatccaagcacaatgtggagttgataatgttttgggttgtgatggaatggctcagtgctttgctggaaagccggagttgggtgtgagacagagttgtgcaccttctacagtgaattgccatatcagctcggattcagggcagaacctggtggtgccccatgctttaagccctagcgatgttattggaagcttcatggtctcatctacctcaaaggatgagtag

SEQ ID NO: 21184 - DNA, 1964 bp, Oryza sativa
  Clone ID: TF_OsC59278_2
atggagttcgggaacggcgggtcctcctcgtcggagcgcagggcggcggcggagggggcgacgctggcgagacagggttcggtgtattcgctgacgttcgacgagttccagagcgcgctcgctggtggcggcggcggcggcggtggtggaagcgggttcgggaaggactccggctccatgaacatggacgagctgctccggagcatctggaccgcggaggagagccaggccatggcctccgcctctggctccgccgcgggggtgggcgtggccgtgggggcgccgccgacgtcgctgcagcgccagggctcgctcaccctgccccgcacgctcagcgccaagacggtggacgaggtatggcgcaaccttgtgcgcgacgagccaccgccggtgggggcggcggatggcggcgatatgccaccccagcggcagtcgaccctcggggagatgaccctggaggagttcttggtcagagccggcgtggtccgagaaaatccacccgctgcgccgccccccgttcccccgccaatgccgccgcggccagtcccggtggtccccaagaccactgccttcttgggaaacttccccggtgccaacgatgccggcgcggcggcgctgggctttgcgccgctcggcatgggggatccagccttgggcaatggcctgatgcccagggcagtgccagtgggcttgcctggcgccgccgtcgctatgcaaacagcggtgaaccagtttgattctggcgataaggggaacagcgacctgtcatcgccgacggagccaatgccttattccttcgaagggttggtgagggggagaaggaacggtggcggagtagagaaagtggtggagaggaggcagaggaggatgatcaagaacagggagtccgcggcgagatcccgcgcgcgcaagcaggcttacacattggaattggaagctgaagttcagaaactcaaggagatgaacaaggaattggagaggaaacaggcagatatcatggaaatgcagaaaaatgaggtagaagaaatgataaaggatccatttggaagaaggaagagactttgcttgcgaagaacactgactggtccctggcctttcacagtgctccaccctggactggtgctatgggacggcacattggatttttgctgccgtggcgctcgaacccgcgtctcaagtaggaacctcgtctccatgttgagcgacgcaggacttcgtcaaaacgatgtcgcgagcagaggagaagactggaggcacgcgcgctgtgggcgtcgtggcttcgcccacgcgtgccctcgcagcgaaatccaagggcgaaatccccgatacgccctccaaatccactcccaccacagcaaaatccagggcggcctcgccatctcatcggacggcaccgcagctgccaccagggtgcccgacgagcagggaggcgcctagatggcatgcaaattcccaccttcatcagcgactgtgcataatttaatctgttgtaaaccaatggtggacgaacttgtgcttgattaatcttctagtttcatttttcctgctagctgattctgagaaggcttccaaaactgacatgtagattatgtgtagacgaatgaagctgtcagaacaacttcctgtaatccttgagaaaacttgtatagtgttgtctaggtttgtatcatgctagtctttctatctagtgtcccaccctagagaccagacatcttggatgagttcagaggtcgatttaagcaagtcatggggaccaagaatcatactgcaacctgcctgatgactagctaagctaggtagtatgtagcaatatctgatatctgtacctgcttcctgaagtatgtattgttatctagtgtatctgatatctagcgtgtaaactgtaaaggagtataagcagacctagttctcaagaaaaaaaagtataagcagacctactaattgcttataagcctgttacttgt

SEQ ID NO: 21185 - DNA, 733 bp, Oryza sativa
  Clone ID: TF_OsC59278_5
ggaacggtggcggagtatagaaagtggtggagaggaggcagaggaggatgatcaagaacagggagtccgcggcgagatcccgcgcgcgcaagcaggcttacacattggaattggaagctgaagttcagaaactcaaggagatgaacaaggaattggagaggaaacaggcagatatcatggaaatgcagaaaaatgaggtagaagaaatgataaaggatccatttggaagaaggaagagactttgcttgcgaagaacactgactggtccctggtgatgacgagtggtcgatggcatgcaaattcccaccttcatcagcgactgtgcataatttaatctgttgtaaaccaatggtggacgaacttgtgcttgattaatcttctagtttcatttttcctgctagctgattctgagaaggcttccaaaactgacatgtagattatgtgtagacgaatgaagctgtcagaacaacttcctgtaatccttgagaaaacttgtatagtgttgtctaggtttgtatcatgctagtctttctatctagtgtcccaccctagagaccagacatcttggatgagttcagaggtcgatttaagcaagtcatggggaccaagaatcatactgcaacctgcctgatgactagctaaactaggtagtatgtaacaatatctgatatctgtacctgcttcctgaaatatgtattgttatctagtgtatctgatatctagcgtgtaaact

SEQ ID NO: 21186 - DNA, 1425 bp, Oryza sativa
  Clone ID: TF_OsC78129_1
acaaggatcaatgagaattactcgaaccttgcaaaagagaatcattcgcaccacatcgatcaacacaagaatcacgcccatcagagtgaatctttcgttgaaagtttaaccacagagtgaaatttgcaagaggaagagacgtgcagatcgatagttaagaaaagagttcgtcgtttcagctcttgttcacaacagccagcatccccaagtacaaacccccattgattttcctacagagatcgagtttaaatcatttcgctatgaacattgtggttggttgattagaaagaggccgaagtagttcgtcgcagctgctgcttcggctccggctggggcacaatctgcattactggttccagcttctgcgtcaagaatgctttcaggaaatcgacgcagctagggaatgttgagaaatcagcaacagccttgtgctccctgaggcgctggttctcctcctccaaccgcgagatcttgttctcgagctcgttcgtgtatgcctgcttccgtgctcgggaccgcgccgccgactcgcggttcttgatcatgcgcttctgcctccgctccaccgtcttctccaccacgccgtccacgccgccgccgcgcttccgccccgccacgcccacctgcgagaggaaccccgcgacgccgtgcccgtccacgcggttatacacgccgtccaccaccgccccggagccgcccacgtactgcagcgtcgtcgtcgtcggcggcggcggcggcgggtagtgcccacgcagccaatgcgcgccggcggcggaggcggcaccgtcgacggcgacgccggcgcgcgagaggaagtcctcgagcgtcatctcgcccatgggcgtcgcgtggtgccggccggtgctggcgccctggatgtcgcgccacacctcgtccaccgtcttcctccccgccgtctccgccgccgccgccgcggcggggagcaccgtgcgcaggaggtcgtccaggttcatgctccgcagcggctcgcccaggtggctctccacctcgttcagcgtcaggctgtacaccgacccctgccgcgacagtgccccttcgccgccaccgccgccgccgccgtggcacgacatgcacgacattgcgtggactcccatccacacacgcacacacactcaccctacccacgtgcgatcagctagctgagcaagcaaagcaggggaaggaagggaccagatgagaagagaatctggagagagaagcaggggaggaagaagaggaggagatggtgatgatgaggaggaggacattaataatctagggttgccacccacaaagagggtttgggcagtgaaagctactgatgtggggggaggagtcctgaaagggaaggggaggaggaagaaagaagaagaggagcaagcaacttgagctgagaaaatgcttcctcgtgccgaattcctgcag

SEQ ID NO: 21187 - DNA, 516 bp, Oryza sativa
  Clone ID: TF_LIB3434-035-P1-K1-D6
ctgcagtaagcagaatcaaagcagattaaccctcatctacttctggccctctaagagttctccactaagcaagcgaaaacagccatgctgcaccaccattaccatggcgaggtggccagcctgcactgcctctcacctgcaagcctaccattcagttcccactaccacagcaacatgatcaccatggcaccctcgcccttccacttcccagcagctacctgtgaacctatccaggaattgctccctgtggtagcgggcaatcgtccagccggctctggcagcacagatgacgcctaccagatggcagcggaggaggagcggaggcggcggaggatgatctccaaccgggagtcggcacggcggtcgcgcatgcgcaagcagcggcagctcatcgagctgagggggcaggttgtccacctccgtgacgccaaccggcgccttcttgatgagctcaaccaagcaatgaggggctgcagtgatgtccactgcgagaacactctgctcatgaaggagagg

SEQ ID NO: 21188 - DNA, 1225 bp, Oryza sativa
  Clone ID: TF_OsC11304_1
gtttcgggagaggattttagtgagggatttgaaggattttgaggtgggagaggagatggagttgccggcggatgggagcgcgctggcgaggcaggggtcgatctactcgctgacgttcgacgagttccagagcgcgctgggaagcgccgagaaggatttcgggtcgatgaacatggatgagctgctgcgcaacatctggacggcggaggagtcgcaggccatagcgccggcggcggcggctgcttcggcggcggcggtggttggggacgcgcagcagcagcagcagccgatccagaggcaggggtcgctgacgctgccacgcacgctgagccagaagacggtggacgaggtgtggcgcgacatcatgggcttgggcggcagcgacgacgaagaccccgcggcggcggcggctgcggcggcgcccgcgcagcggcagccgacgctgggggagatgacgctggaggagttcctggtgcgggccggcgtcgtgcgggaggacatggggcagaccatcgtgctgccgccgcaggcgcaggcgttgttccccgggagcaatgtggtcgccccggccatgcagctcgccaacgggatgctgcctggtgtcgtcggcgtcgcccccggcgccgccgccgcgatgacggtggcggcgccggccacgccggtggtgctgaacgggctggggaaggtggagggcggggatctctcgtcgctctcgccggtgccttacccattcgacaccgcgctcagggtgaggaagggccctaccgtcgagaaggtggtggagaggcggcagaggcggatgatcaagaacagggagtccgctgctaggtctcgcgcgcggaagcaggcttatataatggagttggaagctgaggtggcaaaactgaaggaacagaaggctgaattgcagaaaaagcaggtggaaatgatacagaagcaaaatgatgaggtcatggagagaatcactcagcaacttggaccaaaggcaaagagattttgcctccgacgaacactgactggtccatgctgttgcatctgctctgtatgttgctgttgcgttgacatgtcatcccgtttacagttcagtgattctgttctgtacccaagtttaagaggattcagtttcagtgatctgcattttaaggacaaagaagaaagactgatatctcagatgggtgaaaagcgtggcaatggcctggctaagaacattttcggaagattgtaa

SEQ ID NO: 21189 - DNA, 1242 bp, Oryza sativa
  Clone ID: TF_OsC7199_1
caaaccctttatcgccagagcaaagaagggggaacatcgccaggaaaagatcggtggcgagagaaggcggaaagcgaaggaaagcgaggggagcaaaaggagagagagagagagtcttttcaattttcttttgtttttcttttctccctgcaagaggcagctcggcgttgctgcgaattccatccatgtcgctcgccgtcctcaggatgaggttttgatgcccgaatccggccttttctctgtctatttcagcacctcatcgattttttttggctcttgtgatgccctctgtcgtagagctccccaatcagggcttcctcacttgtgccatgtttgttgctcactcctttcttgattattagttggtagctcaccagtttttgcaggggttttggcagatcatgtagtctgcctgctcaatccctggtcagttaatctagaaacctcattgaataaacaagttcagaggttcttgattccttttgttgcaattgcaattgcaactttgttgtgcaaattgtccattgacccatacaaaggagattgttcttggcgcattctgcggcaatggacgatgtcccaagtcaattgctcttctcccatccggaggtgcctgatagcttcgatgatttcttgaacaacatcacaacctgcacccacacccacacctgcaatcctcctggtccgtcggcaaccatgcacacccacacatgcttgcacacgcacacccaggtcttcgcctccggcagtggcgaagatgacatcaaggaggacctgacgaagacccggaggccgctggggaacagggaagccgtgcgcaagtatcgggagaagaagaaggcgcatgcggctttcttggaggaggaggtcaagaagctccgcgccgccaatcagcagctgctgaagcgattgcagggccatgctgcgctcgaggctgaggtgatcaggttaaggagcatcctactcgatgtccggggcaagattgatatggagatcggcacattcccttaccagaagccgtgcagtgttggctctgtggcatgcactgatccaggtatgtgcttcaatggcaattctgagattggaggggtctgggaggagtgctctagaccagtgggtgcagatcgcatgatcgacaaagatggtagcatgtcacaggaaattgatatcccaggaccggtgcattccatttccatggatgttgtcggaagcttggtgacttctgcttctctatctgagtga

SEQ ID NO: 21190 - DNA, 1567 bp, Oryza sativa
  Clone ID: TF_OsC207355_1
atgaacggtggcattggcgacgcgctgatgcagccgcagcacgtgcaggtcatgtcgtcgtcgttgccgatggtggcgtcgacgttcgtggcggagccggcggcggcggccaacaagccgagggccgcggggctgccgcccacgccgccgcaggtgttcgccgcccagcgcgcggcggcggcggcgggcggcgacgtgtgcatggaggagtcggcgcaggggggtggtggcgggctgccgccgcgcaaggcgcaccgccgctccagcagcgacgtgccgttcgggtacctggccgggcagcaccagctcctgccgcccaaggtggaggccgggtggggccacctcggcgccggcgccggcggcgcggcggccgccgatgacctgttcaacgcgtacctgaacctggaggggctggacgggctcaactcctccgacgaccgccacgacgaaggggacagccgcgggagcagcatcaagaccaacggcgccgacagcagcgagaacgagtcggaggagtgcgccgacgacacccgcggcgggatccgcctctggtccgccgacggcggcgagaggagggagggcgtcaagaggaacgccgcgggggagccggccaccgcgccgctggcccgtcacgccaggagcctctccatggacagcctcatcgggaagttcaacttcacggcggggacggcggcggctgcggggaacggtgtcgcgttggggccgaacaggttcagcctggaattcggcagcggcgagttcaccccctccgagatgaagaagatcatggccgacgagaagctggccgagatggcgctcgccgacccaaagcgcgtcaagagggtgctggcgaacaggcagtcggcggcgaggtccaaggagaggaagatgaggtacattgcggagctggagcagaaggtgcagatcctgcagtcggaggcgaccaatctgtccgcgcagctcacgatgatgcagcgcgactcggcggggctcgcgacgcagaacaacgagctcaagttcaggctgcatgccatggagcagcaggcgcagctgcgcgacgcgctgaatgaggccctgacaaccgaagtccaacgcctaaaactcgccaccgctgagctcggcgattcttgctcgtccagcagtctagctcagcagatccaactcaatgctcagaatcagatgtttcaactgcagcagcagcaggctacgcagataccattctatcaactgcagcagtcacaacagaacggtgcagcgaagaacaatgaatcaaaagaatgattccagaggcattttgggctggttcatggaaagagaatattggtttagatgagcgcaattcgcatattcctaactcatttgttttaatgttgttaataatcaccttgcatttttctagtaggtggtggttggtgaacctccttttacctttctatgttcattgattctttgggtgatacagttgtcatttttaaggtaccaaactgatggaagttgtaggtgatggttattctttggtactaatatctatggcgggtattttgagtaaaaaaaaaaaaaaaaaaaa

SEQ ID NO: 21191 - DNA, 1776 bp, Oryza sativa
  Clone ID: TF_OsC1437_1
ttgtcgcgtgggctcgcctcgcctcgctgcccctagcctaggcgtgcgctaccagccagcacaggtggtgatctcatcatcccccgcccgcccgcgcgcgcgttcgcgctcccccgcccccaccaccccagatcccgaggccccgctccgccgcccgcgggatcgcgggccccgacacaagattttgcttaatgctactttatgcgtgtgtggataatggagtaatcactgctctgtgtatctgagctcacaccatgggtagcagtggcgcagacgcaccgactaagacaagcaaggcatctgcacctcaggagcaacagccacctgctagttcaagcactgcaacaccggctgtttacccagattgggccaactttcagggatatcctccaattccaccacatggcttctttccatcacctgtggcgtcaagcccacagggtcatccttacatgtggggagctcagcctatgataccaccatatggaaccccaccaccaccatatgtcatgtatcctccaggagtatatgctcacccatctatgcctccgggcgcacacccatttactccatatgccatggcctctccaaatggcaatgctgatcctactggaactacaactactgctgctgctgctgctgctggtgagacggatggcaaatcctctgaaggaaaagaaaaaagtcccattaaaagatctaaaggaagtttaggtagcttgaatatgattacagggaagaactctactgaacatggtaaaacctctggggcatcagctaatggagccatttctcaaagtggggaaagtggaagtgaaagttctagtgaaggaagtgaagcaaattctcagaatgattcacatcacaaggaaagtggacaagagcaagatggagaggttcgaagttcccagaatggtgtatcacgttcaccatcccaggcaaagttgaatcaaactatggcaatcatgccaatgacatcaagtggtccagtacctgctccaactacaaacttgaacataggaatggactactgggccaacacagctagctccactccagcaatacatggtaaagcaaccccaactgcagctccagggtctatggttccaggagagcagtgggtgcaggatgaacgggaactcaaaaggcagagaagaaaacaatccaacagggagtctgctcgcagatctaggttgcgtaagcaggctgaatgtgaggagttggctcaacgtgctgaagttttaaagcaagaaaatacttcacttagagatgaagtgaaccggatcagaaaggagtatgatgagcttctatcaaagaatagctcattaaaggaaaaacttgaggacaaacaacacaaaactgatgaggcaggagttgacaataagctgcaacattctggtgatgacagccagaaaaaaggaaactaattgagctatcgtgcaatgctcctgagcataaccctaactagattattggcaggcgcaactgtagtatgtgtattaacttcatacttattgcagttaattgttaccaggttgtgataatgttaatgccaactttgtgtggctggttcctgtttcagatctgtcttggcttatcttttagaagtcaagatatgactggcaatgtaggttgtgacccagttcactgtatctgttagaaatagtttataaactcatgtttacaaatctgtattgttgactactattgttatgtacacctgaagatgaaccagtattttatataagatgcagtcaggttgaacagttggtttta

SEQ ID NO: 21192 - DNA, 941 bp, Oryza sativa
  Clone ID: TF_OsC175078_1
atggcttctggtgaaaacaatgttgaagaggagctgagaaagacccgtaagcctctgggaaatagagaagcagtgcgcaagtaccgagagaagaagaaagcgcatgcagctttcttggaggaggaagtcaagaaacttcgcaccacaaatcagcagctcttgaggagattgcaggggcatatatcactcgaggctgaggtggtgaggttaagagcccttttgtttgatatccgaggcaagattgatgcagagattggtactttcccctttcagaagcagtgcagttttggttctgttacttgtacagaccattctccgtgctttaacactagcactgaggtagcagtccgggaagagagctctagaccaacaattgtggattgcgggattgatggaactggcattatttcgcacgagcttgatattcccaaaatggtgaattcagtggatgtcattccaagctttgtgaattctgcctcattgactgaatgaaactgatcaagttcctcataagttctccatgctagctccggttgcttgatgttgcgaccttgtgggtaatagctttccgttgttatagcctgctcgaataaaatggtggctatgatacgagtaaaagtctaaaattagtctaccatgcagatgttactgactgtaagtgttgggtacttatgatttattatgaagtgtgatatgtgctgtactgtatgatagtattagaagaggccatagtcagtatgccaaatgtggtttacgttctgcagaatactgcaagcgtcaagacgagctgaactttattcctgatgttggtttctcttgctagaactattttcgccagatactaatactaatatatcttttcaggtagctgttataatgagaccagagatgtatgtacatgccattttttttgctcgctggacaaaaaaaaaaaaaaaaaa

SEQ ID NO: 21193 - DNA, 825 bp, Oryza sativa
  Clone ID: TF_OsC21252_1
atggcgtcgtcgagggtgatggcggcggcggcggcgtcgtcgtcgtcgtcgcccccgcccccgcccccggcggcggccgcggccggcggggccgccgatctcgcgcggttcaggagcaccagcagcggcatcggatccatgaacatggacgacatcctccgcaacatatacggcgaggccgcgccgccgcctggggccgccggctcggccccggccccgcccccggcgggggaggcggcgggggcccccgtgggggaggtcgacgcgccgcgaacggcggaggaggtgtggaaggagatctcgtcctcgggagggctatcggctcccgctccagctcccgcggccggcgctgcgggtaggggtggcgggcctgagatgacgctggaggatttcctggctagggaggatgaccctagggcaacggccgtggaggggaatatggttgtggggttccctaatgtaacggagggtgtgggtacagcaggaggaggaagaggcggcggcggcggcgggagggggaggaagcggacgctgatggatccagctgaccgcgcagcgatgcagcggcagaagcgaatgatcaagaaccgcgaatctgcggcgaggtccagggagaggaaacaggcgtatatcgcagagctggaggctcaggtcgcggagcttgaggaagaacatgcacagctgttaagagaacaggaggagaaaaatcaaaagaggcttaaggagaaatggcacgtgtttatgcagatcaaggaacaagccgttgcagttgtcataaggaaaaaaacacaagatctacgaagaaccaactcaatggaatggtag

SEQ ID NO: 21194 - DNA, 829 bp, Oryza sativa
  Clone ID: TF_OsC15853_3
ggagctgcaagcaactggaatagaggtaagagacagtttggtctcgacaatttgccatgtcagattctgatcgaattggcacagaaagatgcttagtaaattcatctaacacaaatggtgatgtcctactagaatcatgagctaaacaattagatgctactacacgtgatgataactctcaaggcgcatcattaggctgagcatcagaatcctgttgcttctggtgggtgccattggtgtcgttctgttcattcatataaggtattgaatcactgttcccctctagtttttccttgagtgaagcattgtgtgaaagaagtgcctcgtactcctttttgatccgttcaagctcagccctaagagaggagttttctgcccttaaattgtcagcgcgtacagaaagctcttcacactcagcctgcttgcgcagccgggatctacgtgctgattcccgattagactgcttccttttctgcttcttgagctctctttcatcccattgctctcctcgaactgaaccagacgatgctttgccatgcattgcaggaacaggcgaagaaccagcagcaccccagtagtccattcctatgttcaagtttgttgtgggagcaactcccccgattactacacccgtttgagttggagccatcgacatgttctgatttaatgctgtatgtgatatgccattctgagaactaccatcttcctttacatcattttcctttgaatgtgaatcctggagcaacataaaacagggttgataggattttgaaagttggcgtcccttccattactatcactctcactagcactctcgcagcatgtacaa

SEQ ID NO: 21195 - DNA, 375 bp, Oryza sativa
  Clone ID: TF_435943
agatggcgagcacgaggctgagcctcgagctggggaaggtcggaatccagtcgtcgccgccatgctccagcagctcaagcgccggccaccccgcgatgcagcccgccgccgcggccacggcggcgccgggctacggccccaggccacgccacatgctcaccgaggccgagaaggaggcgaagcgtctccggcgagtgctcgccaaccgggaatccgcccggaaaaccatcctccgccgccaggcgatccgagatgaattggcaagaaaagttgcagatttgtcgtcgcagaacgagaccatgaaaaaggagaaggacgtggtgatgcaggagtatctctcactgaaggagacaaacaagcagctgaaagaacagg

SEQ ID NO: 21196 - DNA, 975 bp, Oryza sativa; identical to SEQ ID NO: 11566
  Clone ID: TF_OsC341905_1

SEQ ID NO: 21197 - DNA, 1169 bp, Oryza sativa
  Clone ID: TF_OsC782_1
ggatttcgggtcgatgaacatggacgagctgctgcggagcatctggacggcggaggagagccaagcgatggcgtcggcgtctgcggcggcggcggcggcggaggggggcctgcacaagcaggggtcgctcaccctgccgcgcactctcagcgtcaagacggtggacgaagtgtggcgggacttacaacgagaggcgtcgccgggggcggctgctgctgacggcggcggcggcggcggggagcaccatcagcccaggcggcagccgacgctcggggagatgacgctggaggagttcctggtcagggccggggtcgtcagagagaataccgctgcggcggctgctatggtagctgcggccgccgctccgccggtggctccgcggtcgattccggctgtcaacaacagctccatcttcttcgggaactacggaggcgtcaatgatgctgctgctgccgctgctggtgcgatgggtttctcaccggtggggattggggatccgaccatggggaataggctgatgtccggagtggcagggattgggggtggtgcgatcactgttgctccggtggatacatcagttggacaaatggattcagcgggcaagggggatggggacctgtcatcaccgatggcgccggtgccgtacccctttgagggggtgataagggggaggaggagcggtggtaacgtggagaaggtggtggagcggcggcagaggaggatgatcaagaacagggagtcagcagctagatctcgtgcccggaagcaggcttacacaatggagttggaagctgaagttcagaaactcaaggaacagaacatggaattgcagaagaaacaggaggaaattatggaaatgcagaaaaatttcttcccagaaatgcagaaaaatcaggtattagaggcggtcaacaatccttacggacaaaagaagcgttgcctaagaagaacattgacaggtccctggtaaaatttgagttattgataaccggagcttgacaagacacaccatattttaaccttaaggttcttgtacatattgtcaggatttcaaaactcatctctctgttgtaaattgatgatcaacagagtcgagtgtactagtgcttaacttgccctgtcaccttcaacttacagttctgcaagtcttctatcgtgctcttatgtcc

SEQ ID NO: 21198 - DNA, 1860 bp, Oryza sativa
  Clone ID: TF_OsC1049_1
ccgggcaggtttttactgtccccatgcagacaatgccaaagggataaacagagttaaaattggtgaaaattcactcgaatccaaatgtaaacaacccatttttctcctgttccaatcccatccattccattccattccttctccctgtgctcggattcctgttcttgcagctgatccctagatcttcctctttgcccgagaattttccgcccaattccccactccgattcctcttctttcgcccaaattttggctcaacatttcgcagcgcaatctcgagctgaatcttggggggtaaagctttgcttcttggaatcttggtgcggtttttgggggagatttgcgagcgtttggagccgagaagatgaacagggagaaatccccgatcccgggagacggcggcgacgggttgccgccgcaggccacccgccgggcgggccctccggcggcggcggcggcggcggagtacgacatcagccgcatgccggatttcccgacgaggaaccccggccacaggcgcgcccactccgagatcctgagcctccccgaggacctcgacctgtgcgcggccggcggcggcgacgggccgtcgctgtcggacgagaacgacgaggagctcttctccatgttcctcgacgtggagaagctgaacagcacgtgcggggcgtcgtcggaggcggaggcggagtcgtcgtccgccgccgcccatggagcgaggccgaagcaccagcacagcctgtccatggatgagtcgatgtcgatcaaggctgaggagctcgtcggggcgtcgcccgggacggaggggatgtcgtcggcggaggccaagaaggccgtgtccgcggtcaagctcgccgagcttgctctcgtcgatcccaagagggcgaaaaggatttgggctaacagacaatctgcggcaagatcaaaggaaaggaaaatgcgatatattgctgaacttgagcgcaaggtgcaaaccctgcaaacagaagcaacaacactgtcagcccagttggcactgctacagagagataccagtgggctaactactgagaatagtgaactgaagctacgtctgcagaccatggagcagcaagtccacttgcaagatgctttgaatgacaccctgaagtctgaggttcagcggcttaaggttgcaaccggtcaaatggcgaatggtggagggatgatgatgaacttcggtggcatgccacaccaattcggaggcaaccagcagatgttccagaacaaccaggccatgcaatctatgctggcagcacaccagctgcaacagctccagcttcatcctcaggctcagcagcagcaggtgctgcaccctcagcatcagcagcagcagccattgcaccctctacaagcgcagcagctccagcaggcggcacgagacctcaagatgaaatcgccgatgggcggccagagccagtggggagatggcaagtcaggaagcagcggcaactgatgcgtcatttacaaatttacaaaaaaattcgccaaagtttcggtgtaaggttgtggtttaacaaccatggagatggtctgtttcattgagatgatgatgatgtgcaagagtagttatcatcatcatcatcggtaggttcaggttggcttcagcttcagtcaaacagttgggtggatgttcagttggagagtttatctgtagctggttcagtaaggaaatggtcgaataatcaagaattccaggttaaaatctttcgtttctttggtaaggtagcacatcaccaagatgtactgttgtagtgttgtccccagttccatagattcaagtagccaaaaaaaaaaaaaaaaaggggggggcccgcgcctcgtccgaattcctgcagcccgggg

SEQ ID NO: 21199 - DNA, 1613 bp, Oryza sativa
  Clone ID: TF_OsC173090_1
ccgctttcagaactacgccctccccggactccgcctaccaccattttccttcaactttgcgggtaaccagaggcgaagagttttcgtgcaccgacttaccggaacgtaatcgcctattcttcccctactttgtggactttttggttgtacgtgtttacctagatgtcacggcctggcgcggcggaggagtatgctcatatttgctcgctgacatatatttctaatctattgagatgctctggtcgctcagtattccacatagagggtattatacgtacctgcatcctcagtacaaccactatatcaagtcataagattttcatgctttgtaaacgggcatcttgaggtcaaatcattttaattctagtaagtatccagattcattaacatatatatgaatgtgggcaatgctagaaagtcttataatatgagaaggaggaagtatctagatgtaatcaaacggtcacaaaaacaacaagaaaaaatctgtctcctcatagcgtccatgtctgcttgaagatagctatattccactggtagctttctgatatttctgacttcacctcagccacgcgcgttggttttggagcagtctcagatcttctccggttactacttattatcacaggcagtagcttcaggcaatgacaaggctgatgctgcctcaaaatgtgtcacatctccagcatggattctcttctgcaggttctccaagcttgcgacacgccgcacggacggtgacctcaaggccattgctgcacttggcacaggaattgcttcatctgggaggctacagtttgtccagtcgtcttcgacgagagcagcagcagcagcagcagaagctgcgtctgatacacctgaagaaacgggcatgctgcttgcaggcatttcagatgtagtgaacaattgaagtcctattccagttactctcctcaccgcttcttcagctatattcacctttctcctcatagcgttcatgtcatcttgaagattgccatattctgtggtagattgcttatatttctgagtcatgtcagacaagcgcttttgcagagatgcattctcagatcttaactgggaaacctgtgattctagatcgtttaggtgagcttgcttcctttttcttgacctcctggctgattcccgatttgacagcattctccttgtccgctttgcattaacggggtccgtatcttcctcaagatcgccatcatcatctgactgttcctttgatgtaccactattagctggtttaccttgatcgtcatcttcatgtatggcatttgagtttgttactctggttgatccatagccattaaaagaatcttgagaaaccaattgtgaagtgtctgaggcttgtaaattgaggtagcccaaagaagattcttgcagtttagcttccatcgatttagccacggccgcgcagtacaggtcgagcttcgtcttcagcaccgccgcgtaggcgcccggatcgccgccgccgccgccgccgccgacaccggcgccgccgcgcttcattctcgcaaagaaaaaaagttgcctcctttttcagagaggagtagatttttttcagagaaaactgagcaaccttgcagcccgggggatccactagt

SEQ ID NO: 21200 - DNA, 2410 bp, Oryza sativa
  Clone ID: TF_OsC1936_1
gtcggaggaaggcgatgatgaagaagtgcccgtcggagctgcagctggaggcgttcatccgggaggaggccggcgccggcgaccgcaagcccggcgtgttatctcccggcgacggcgcgcgtaagtccggcctgttctctcccggcgacggcgagatgtccgtgttggatcagagtacactggacggaagcggcggcggccaccagctgtggtggccggagagcgtccgtacgccgccgcgcgccgccgccgccttctcggccacggccgacgagcggacgccggcgtccatctccgatgaccccaaaccaaccacctcagcgaaccacgcgcctgaaagcgactcggactccgattgcgattcgctgttagaagcagagaggagtccacgcctgcgtggcacgaaatccacagaaacaaagcgaataagaaggatggtgtccaacagggagtccgctcgacgatccaggaggagaaagcaggcacagttatctgaactcgaatcacaggtcgagcaactcaaaggcgaaaactcatccctcttcaagcagctcacagagtccagccagcagttcaatacagcggtcacggacaacaggatcctcaaatcggatgtagaggccttaagagtcaaggtcaagatggctgaagacatggtcgcgagggccgcgatgtcgtgtggcctgggccagctcgggctggcgccattgctcagctccaggaagatgtgccaagctttggatatgctcagtttaccacggaacgatgcctgtggtttcaaaggcttgaacctgggtcgacaggttcagaactcaccggttcaaagcgctgcaagcctagagagcctggacaaccggatatccagcgaggtgaccagctgctcggctgatgtgtggccttaagacacttcatccgtgttcgagagagcttgagattctaagaagcagccggtgagaatctgaaaaggctagttgttcagtttcctatttttagtttatgtttgaattctctggctactaatgctcaaaatctgggagagaatctaaatcgtttgggacagataaaaaattatgcgagaaggtgtagctgacagaaaccttcccaaacaaatctccatcagaacctatatgtaaagtaatacggtatcctctgttactaggtgcatgtgcataactgacaagctgctaagtactaggtactacagtctgaggcaagtatttctggtgttttggtgctgaagaactatgttttagtgcgtttgatctgcggcaatcaaggccatctgatcgaaatttgattggtataaatctgatcgaaatttgattggtataagtataatagtttgattttgatcaactctagtcgtcagcgcctttggtgtatacgctctgtaacatctgttacgaattgatctgttcagtatacttcaacagtcctgcattggttcagttcttggcgtagctctggtgcttctggtgcgcatagcatcggtgtgaaatgtgccacttttcatggcagttgtaatagtaaacgactgcaaaattacggtgtactataattcctaaacaaatatgtgacaattacgatgaaaattatcactaagatgttattaccattatttttcgtacacaaatctcttaatttttacaaaatttgttactagcatgtgaactctctaatcccacactatccttattctttttcaagaaaagtacggttggtggtggggatggttgacatatggatcctctggcctcacatgtcctttccctgaaagttggtgatgggatggtgacagattaaccactcaccatcaccattgtttttttctttaaggaatatagattgaatacataagatttaagatttatggggaaaagtatagttcgccaatcttcaagatggttgtgtacaactgattttccaaagttttagtatgccccgaaccaatgaaattcgttcatctttttttagcatgtcggaaatgatgtgaaaattgcacttacacttgaggttttcttgtggatacaaattgctcaacaaaccatattaagacctgaaactataacatcaatcattagtacatcttttaggttattcaaaagcctgaacaaactgcatagtatccccaaatcccatttgccccatccgcaaaacaaaatgagcggcaatggataaatggaaacgaagctagctgcgaaaggagttaaattaagctccccatttaataattgaccaaggttccaacctacgtccaacaacaaattttatataatactcccccaatcccagtgtattccaaaggatttcaaataaatgtccccttagttcccaaaaaaaaaaaaaaaaaaaaaaaaaaaaaaaaaaaaaaaaaaaaaaaaaaaaaaaaaaaaaaaaaaaaaaaaaaaaa

SEQ ID NO: 21201 - DNA, 1230 bp, Oryza sativa
  Clone ID: TF_OsC103554_1
atggcttcgcatgctggaggtagtggcggcggcggcggtggaagtggccgggatgctggctcggcgcagcgcgggccgatgcaggggttggcgaggcaagggtcgctgtatgggcttacactcaatgaggttcagagccagttgggggagccgttgcttagtatgaaccttgatgagctgcttaaaagcgtgtttcctgatggcgcggaccttgacggtggcggtggcggtggcggcatcgcgggccagtctcagccggccctggggctgcagcgccaggggagcatcacgatgcctccggagctgagcaagaagacggtggatgaggtgtggaagggcatccaggatgtgccgaagaggggtgctgaggagggtggccggtggaggcgggtgatgatgtccatagtaaattttgtagattatatggggtctgcccacatatttcgcatcctttggcggtaggaaaaatcgatatagcttgagattccatcttccccctccagccggtggtggtttagagcttgtaaacaccagcacgggcagagccctagccatgtcgccccagctgctgatctcttcggaggctttgtcactagtcagtatgcttacatggcaactcacctggcacctcagccattagctgttgctacaggtgctgttttggatccaatttactccgatggccagatcacttcgccaatgctcggggctctttctgatcctcagacacctgggcgcaaacgctgtgccacaggggagattgcagataagctagtagaaagaaggcagaagaggatgataaaaaacagggaatcagctgccaggtcaagagcgaggaagcaggcttacactaatgagcttgaaaacaaagttcttcgtctagaagaggagaatgagaggctaaagaagcagaagcctacattcatactgtccagcaaagtgagccgcaagcaggtcaccaaagccatgagatctgccaccatttgtgtcctctgcatttgcattctcatgatcctgcaatgctttgccagcatcagtgcagtggatcttggcgatgctgcagcttcagcgtcagggggagaaggcctgatccggccgaggaagctgctgcagaatgcgccggcggcgaggtcaccgccgtcgcgctccgccgccgccgtggaggtcgaggtcaatgcgagcctggggaagcagaagccgtcgagcaagtcgaatcccaggcagaattag

SEQ ID NO: 21202 - DNA, 705 bp, Oryza sativa
  Clone ID: TF_OsC11304_2
cgccggtgccttacccattcgacaccgcgctcagggtgaggaagggccctaccgtcgagaaggtggtggagaggcggcagagtcggatgatcaagaacagggagtccgctgctaggtctcgcgcgcggaagcaggcttatataatggagttggaagctgaggtggcaaaactgaaggaacagaaggctgaattgcagaaaaagcaggtggaaatgatacagaagcaaaatgatgaggtcatggagagaatcactcagcaacttggaccaaaggcaaagagattttgcctccgacgaacactgactggtccatgctgaagccagagtctccggtttcgccgtggcgctcagcttcagagttgcttctctccttgttggtgaatggtgatgcccacgcgtccgggacggtcgaatgctggcgtcgattactcactaggtttagctgcgagatcgttgcgtgagcaaaggcatactatctaatctgtttaactccttatttagggaaatctggcatggtgaaaacggggcatgccatctgtgtttgttgtttttgtgcagctgttgcatctgctctgtatgttgctgttgcgttgacatgtcatcccgtttacagttcagtgattctgttctgtacccaagtttaagaggattcagtttcagtgatcaaaaaaaaaaaaaaaaaaaagactattacaaataggaaaaa

SEQ ID NO: 21203 - DNA, 1938 bp, Oryza sativa
  Clone ID: TF_OsC405_1
gttgttacttacgcatattttgccgttagttaattattatccggtaaagaagattagtagtaatccaaaattttcccaaccccaacctcggaacaaaaaccgcgtagtatttgtcgtaaccaggagcatccgagtcattaatttacacccaaacacaaaaaattagcagcacgcagccgccttcccaatcctctcctcttctccaagcggcaattcgcgcgaggttttctccgatcaaaccctcgaatccccccctcgcgaatccatcggagggtagccccgcgatccgcgtcggcgagagcggattccgattccgcgatggagcgggtgttctccgtggaggagatctccgacccattctgggtcccgcctccgccgccgcagtcggcggcggcggcccagcagcagggcggcggcggcgtggcttcgggaggtggtggtggtgtagcggggggcggcggcggcgggaacgcgatgaaccggtgcccgtcggagtggtacttccagaagtttctggaggaggcggtgctcgatagccccgtcccgaaccctagcccgagggccgaagcgggagggatcaggggcgcaggaggggtggtgccggtcgatgttaagcagccgcagctctcggcggcggcggcggcggcggcgacgacgagcgcggtggtggaccccgtggagtacaacgcgatgctgaagcagaagctggagaaggacctcgccgcggtcgccatgtggagggcctctggcacagttccacctgagcgtcctggagctggttcatccttgctgaatgcagatgtttcacacataggcgctcctaattccatcggaggcaatgctactccagttcaaaacatgctaagtggcccaagtgggggatcgggctcacagttggtacagaatgttgatgtccttgtaaagcagcccaccagctcttcatcaagggagcagtcagatgatgatgacatggagggagaagctgagaccactggaactgcaagacctgctgatcaaagattacaacgaaggaagcaatccaatcgggagtcagccaggcgctcaagaagcagaaaggcagctcacttgaatgagctggaggcacaggtatcgcaattaagagtcgagaactcctcgctgttaaggcgtcttgctgatgttaaccagaagtacaatgatgctgctgttgacaatagagtgctaaaagcagatgttgagaccttgagagcaaaggtgaagatggcagaggactcggtgaagcgggtgacaggcatgaacgcgttgtttcccgccgcttctgatatgtcatccctcagcatgccattcaacagctccccatctgaagcaacgtcagacgctgctgttcccatccaagatgacccgaacaattacttcgctactaacaacgacatcggaggtaacaacaactacatgcccgacataccttcttcggctcaggaggacgaggacttcgtcaatggcgctctggctgccggcaagattggccggacagcctcgctgcagcgggtggcgagcctggagcatctccagaagaggatgtgcggtgggccggcttcgtctgggtcgacgtcctgagaccgaaacccagagctgcttcggttctgaaagacactgcgagcaggaaatgatgattggacaggcgtagacattgctaatgctgtgaggttgatgattgttggtcgtcgtcgtcgtcattgtgcattctttgtaagggacacctcttagtaccctcttcttctaagggacttagtaccccttgtggatctcatcgtcctaaatactatacacattagccaaatgttcattggtgtgatggcgtcgtccctaatttgaacgactgatttcaggcagctgctatgctatcattcaataatactttgatcgatgcttcctttaacaaaaaaaaaaaaaaaaaaa

SEQ ID NO: 21204 - DNA, 948 bp, Oryza sativa
  Clone ID: TF_OsC65391_1
ttgttgttttttttttttttttttttttttttttttttttttttctcatacaatttatattaatttgggtcttgcagcaagcaagcaaacaagggtatgcaaaagttagccggtgacacaaacaattaagcatgcatgtatgcatccatgtgtagcggatgatcgacacagtaacaaaatagagtacttacgtactaccggaatgcatggaaagccaagccggcggatcagagtgagttgttgttacttgctagagactcttgctggagctggacagccaacccaattaaataatggtccccaatccaatggctgcccgctaccttgcctatgcttaattaattaaaggcttaagctgctgcgttctgatcaagtggatgagcttcttcggtgggaactctgcttgttggtaggctgctggatcagagcagccatctccgtcttaagttgtttgcagtgcctcttgagcttgagattctcattcaccagccggcgaacttccttctccagctcctgcacatacgccctcttccttgccctggagcgcagcgccgactccctgttcttcatcatccggatggtcttgcgctcctcctcttcctcgtcgccgccgccgccaccgccaccgcctatgcccacctgcagcagcagatccagctcctcggcgccgcccacgccgagggatagatggggagcaccatcggcggcgctggtaccggcgctggagatggaaaggaaggagctgcagctgctcaggcttagctgcgggctgcccacgccgcccagctgctccgccatgcctaccctattattgtgcctctcttttctttttcttcttttagttaagctaaagctagtgtgtgagtctagtagactctaagaatatccctcctcctcctcctcgtcccccccctttggtactccgtcgcatcagcagcaaaagtgcgc

SEQ ID NO: 21205 - DNA, 1768 bp, Oryza sativa
  Clone ID: TF_OsC1934_1
aaaaaacccatgggttgcgtagccgtagctttcccaccatttccttctctccgaagcctcctcctctccgcttcctcccgcgaaaccaaattccaaagcatttgatcgaatttctcccaaacttttccagcgttttcaatttcgccccgatttcggttcgaaaacccctcgcgaattcatttcaaactcgtccgagagcgcaatggagcacgtgttcgccgtcgacgagatccccgacccgctgtgggctccgccgccgccggtgcagccggcggcggccgccggagtagatgacgtcggcgcggtgagcggcggcgggttgctggagcggtgcccgtcggggtggaacctcgagaggtttctggaggagctcgacggcgtccctgcaccggcggcgagcccggacggcgcggcgatttaccctagcccgatgccggcggcggcggcggaggcggcggcgcgctggagtaggggctacggcgatcgtgaggcggtgggggtgatgcccatgcccgcggccgcgcttccggcggcgccggcgagcgcggcgatggaccccgtggagtacaacgcgatgctgaagcggaagctggacgaggacctcgccaccgtcgccatgtggagggcctctggtgcaatacattctgagagtcctctaggcaataaaacatcactgagtatagttggttccatcctgagttcacagaagtgcattgaaggtaacgggatactagtgcagaccaagttaagtcctggcccaaatggaggatcaggcccatatgtaaatcaaaatacagatgctcatgccaagcaagctacgagtggttcctcaagggagccatcaccatcagaggatgatgatatggaaggagatgcagaggcaatgggaaatatgatccttgatgaagaagataaagtgaagaaaaggaaggaatccaaccgggagtcagctagacgctcaagaagcagaaaggcagctcgcctaaaagacctggaggagcaggtatcactattaagggttgaaaactcttctctgttgaggcgtcttgctgatgcaaatcagaagtacagtgctgctgctattgacaatagggtactaatggcagacattgaagccctaagagcaaaggtgaggatggcagaggagagtgtgaagatggttacaggggctagacaacttcaccaggccattcctgacatgcaatctcccctcaatgtcaactctgatgcttctgtgccgatccagaacaacaacccaatgaactacttctccaacgctaacaatgccggtgttaacagcttcatgcaccaggtttctccagcgttccagattgtggattctgtcgagaagattgacccaacagatccagtgcagctgcagcagcaacagatggcgagcttgcagcatcttcagaatagagcttgtggtggcggcgcaagttcgaatgaatatacagcatggggatcgtctctgatggatgcaaatgagcttgtcaacatggagcttcagtagtaggagcatatcctaacaacatgatgagagcatttggaggtgcaaatttgcaacctgcaaatgctgttttgtagtagtagttgttgtcgctgtttttgtctgaaactgtagtttctatggattttggacttgctgaggaacatctgcggctgttgttgtttcaaattgagaaaatgagggacaatgggacatggtggtctcccttaatatagcgaaaaatggttggaataaaaaaaaaaaaaaaaaaaaaaaaaa

SEQ ID NO: 21206 - DNA, 1605 bp, Oryza sativa
  Clone ID: TF_OsC1934_2
atggagcacgtgttcgccgtcgacgagatccccgacccgctgtgggctccgccgccgccggtgcagccggcggcggccgccggagtagatgacgtcggcgcggtgagcggcggcgggttgctggagcggtgcccgtcggggtggaacctcgagaggtttctggaggagctcgacggcgtccctgcaccggcggcgagcccggacggcgcggcgatttaccctagcccgatgccggcggcggcggcggaggcggcggcgcgctggagtaggggctacggcgatcgtgaggcggtgggggtgatgcccatgcccgcggccgcgcttccggcggcgccggcgagcgcggcgatggaccccgtggagtacaacgcgatgctgaagcggaagctggacgaggacctcgccaccgtcgccatgtggagggaattattaggtcacatacccttggaagatgaaattattttagtagaaaaaaagaaactgttatattggaatctggcctctggtgcaatacattctgagagtcctctaggcaataaaacatcactgagtatagttggttccatcctgagttcacagaagtgcattgaaggtaacgggatactagtgcagaccaagttaagtcctggcccaaatggaggatcaggcccatatgtaaatcaaaatacagatgctcatgccaagcaagctacgagtggttcctcaagggagccatcaccatcagaggatgatgatatggaaggagatgcagaggcaatgggaaatatgatccttgatgaagaagataaagtgaagaaaaggaaggaatccaaccgggagtcagctagacgctcaagaagcagaaaggcagctcgcctaaaagacctggaggagcaggtatcactattaagggttgaaaactcttctctgttgaggcgtcttgctgatgcaaatcagaagtacagtgctgctgctattgacaatagggtactaatggcagacattgaagccctaagagcaaaggtgaggatggcagaggagagtgtgaagatggttacaggggctagacaacttcaccaggccattcctgacatgcaatctcccctcaatgtcaactctgatgcttctgtgccgatccagaacaacaacccaatgaactacttctccaacgctaacaatgccggtgttaacagcttcatgcaccaggtttctccagcgttccagattgtggattctgtcgagaagattgacccaacagatccagtgcagctgcagcagcaacagatggcgagcttgcagcatcttcagaatagagcttgtggtggcggcgcaagttcgaatgaatatacagcatggggatcgtctctgatggatgcaaatgagcttgtcaacatggagctcccacgcgtccggcatatcctaacaacatgatgagagcatttggaggtgcaaatttgcaacctgcaaatgctgttttgtagtagtagttgttgtcgctgtttttgtctgaaactgtagtttctatggattttggacttgctgaggaacatctgcggctgttgttgtttcaaattaagggagaccaccatgtcccattgtccctcattttcgaaaaatggttggaat

SEQ ID NO: 21207 - DNA, 719 bp, Oryza sativa
  Clone ID: TF_OsC12563_1
ttttttttttttttttttttttacagatacaaactagtatactattgtataattttattcatcgttgttttgtacaaacagcgacatgtaaccatataagcagcaaggaccggtgaacacgatggcaagacatgtgggtccaggcaggtttacaagcatcacagcatatatgtatatcaactactaccataataccttcacatcacttagtctgaaagaagacttaatgtgcaaatcctcttcagagcctcagaggctagtgccacaccagaagcaggatgagtgtgccactcgccggtcaccgctatgcccgtttcaccacatgcagctgccgctgcggcgcagctgggctgccacccctatttgcattcatcttctccttggactgctccatcattttctcaaccagcatttgcttctttgtcagtagaaccgtcttctctgcctctttgagacgagcgttctcctgcttgagatagttcagttcagcttcgagctccaccgtataagcctgctttctagcacgggaccgtgcagctgactcacggttcttgatcatgcgccgttggcggcgctccaccgtcttctcggcgcagccatcctctctgtggggacgctttcttgttccattctcaatcatcatcccattcccaatacaattcatcatatcagcatgtgtcatggcactcatcccatctgatcggacgccgtgggtcgac

SEQ ID NO: 21208 - DNA, 1287 bp, Oryza sativa
  Clone ID: TF_OsC1243_2
gggcagctcagctttgtggggggcgaaaaagaggagctttcccttctccttcttctccttctcctccctcggtgatctgcctcgctggggcatctctaaaagcatccgactccgacgccaccaccaccagttcaccaccgctgaaagaatcagcagcagcagcagagaccacacgaggagatgaagaagtgcccgtcggagctgaacttcgaggcgttcttccacggcgagaggggggaggacgacgccgacgccgccgccgaccagaagcccggcggcggcccgcacccgccgccgttcgccatgttctccgccgccgacctctccagcttcggcttcgcggactcggtgacgagcaccatcactggggtcattcccaatcacatatggccccagtcccagagcctcaacgcacggcatcctgcagtctacacaattgagtcgcaatcatcaatctgtgcagcagcaagtcccacgtcagctaccactctgaacatgaaggagagccaaactctgggaggcacaagtggttcagattctgacagtgagtcgctgttggatatagagggcggtccatgcgaacaaagcacaaacccactggacgttaagagaatgagaaggatggtttccaaccgggagtctgctcgtcgatcaaggaagagaaagcaagctcacttagctgatctcgagacgcaggttgaccagctccggggcgaaaacgcatcgcttttcaagcagttgacagatgccaatcagcaattcacgacggcggtcacggacaacagaatcctcaaatcagacgtggaggccctccgggtcaaggtgaagatggcggaggacatggtggcgcggggggcgctgtcgtgcggcctcggccacctgggcgggctgtcgccggcgctgaacccccggcagggggcgtgccgcgtccccgacgtgctcaccgggctggactacgccggcgacgaccccttcaccgggctgtccccgccggagcaggtgcagatgcccggcggtggcgaggtgggtgacgcctggggctgggacaaccactccaatggcgccatgtccaagtgaaaactacttcttactgctttgtcagctcagctacgtataaaaatgtgatgtcccaagtgaacggacttgagtttttcagagtcctcgtgtcgtgtcaagtgtcgtcctgtaatagaactgactagctatatatagtacacagtatttggtaagagactgaaaaactacgaagtataaatgttgtggaggttagagcttttctctgatttt

SEQ ID NO: 21209 - DNA, 1275 bp, Oryza sativa
  Clone ID: TF_OsC271_2
gcagctgctccatggaacagctatttcgacgacatcctcaaggatacggagcaccatgcatgcacccacacccacacctgcaacccgcctgtgcatgacctctcacacacccacacctgcgtccatgtccacaccaagatcgtctccgccccatccgacactccgtcggatgctgccgagaccgccgagtccccgacggagaacaatgcctccaagaagcggccgtcgggtaaccgtgccgctgtgaggaagtacagggagaagaagaaagctcacactgcctcgctggaggaggaggttgttcatttgagggctctaaaccagcagctcatgaagaagctccagaaccatgccacgctcgaggcagaggtatccaggctgcggtgcctgctcgttgatattagaggaaggattgaaggggagattggggcttttccttatcagaggccagtgaagaacatcgatttggtttctagtgttgatcagggaagttatcttggtggtgcccaggttatgaactcctgtgactttcgatgtgccgaccagatgtattgcagtccagggatgcaggtgagaacaatgggcgaggatggcgctgtgagtggtcaggtgttggggcaaggtgcctgtgatattgccagtatccaatgccaaggtgcaaaatctggatctgcaaagctcccagtctgtggggctatggagcatggttattacggcatccctaaggcagtaaggcgctgccagggtgtaaggcgtccactccgccttacgagaaagctagaggagaaagggcaaaaacaagtgataaacccatcctagctgtatgccaaattctgaaaagaaatgaaggatccccatcgccaagacttcaagtcagggcattcaagaaacatcgcataaattgctagcgtctatctctaggaatgtgtgttattctgtcgccgatgatgcttccacagtgcctgaggcgatttaagttcgttagctatgaagctatcagtatgtcctctagtttgcttagctttccctccgtttttttcttgatgttggaaatggacaatattgctgctagtgactcccaaatgctccctgataaaaaacttaaagattcagcatcattgttttatgccaggatacatgtccagatttggctaggcctcaagttttgatgtgaatctcttgtaaatacatcatgtatgaaatctttgtagtaacatggattcaatcattgtttggatgttccatcgattttttaattaatcaatatgttgcgtt

SEQ ID NO: 21210 - DNA, 1820 bp, Oryza sativa
  Clone ID: TF_OsC196_1
ctttggagctgagctacatagcacatccgtggagtctcttgtgctaagcaatttaccgttccagtgctctactttgtaggccatccatattagacggaagaactttatcagtattattattggaggagaccaattcaagaatgatataatggagctttaccctggctatcttgaagaccattttaacatccacaagcttagtatcagcagcgcctctcctccggagtacatgacctcggcgtcgacgcagttcgcggcaccggtcagaatgggggcgtacgaccggcctccgccagttggcatgtggagtcacgagcagttcaaggttgacaacggccaggccacgagtgcatccacgatcatggaggcagagatgaaatttgagaataggctagaagaaattccccaagtagttctggaggaagggagaaatgttgatcaggaggcaagcaagccgccagacaaggtcctcagaagacttgcacaaaacagagaggctgcacggaaaagccgcctgcggaaaaaggcttatatccaacagctggagacaagccggttgaaactagcgcagttagagcaagagcttcaacgggccaggcagcaggctgtgtatgcaaatgggagccttcgagaaccaaatcttggatttacaggaccgatcgatccaggtgccttaggttttgagattaagtacagccattgggtggacgagcagaatcgcaacactggtgagctgaggaatgcgctgctgcaggggcagacgacggaccaggacctggagctcaagttgctcgtcgaggctgggctcgacaactacaaccgcctcttcgagatgaaagaggaagccgccaactccgacgtgttctacatcatgtcgggcatgtggaagacccccaccgagcggttcttcctgtggatcggtgggttccggccatcggaggttctcaagaatttgagaccgcagctggagcctctgacggacaagcaggtcgtggaagtgggcggcctgcagcaaacctcgatgcaggtcgaggacgccctctcgcagggcatggacaagctgaagcagacgatcgcggactccctgacggcggccgacccgttcgactcccccgaggcctacatggtgcacatggccaacgccgtggagcagctcagatccctcgtccagttcgttacccaggcagatcatctccggcagcagacgctgcaggagatgcacaggatcctgacgacgcggcaggcggcgagggggctcctcgcgctgggggactacttccagcgcttccgagcgctgagctcgctatgggcagctcgcccgcgcgattcagggataagctaaacaccgtaatatggtcacggtagaagctacagatatcagtagcaattcgtcgtgttagttcgctacttcagtgtcaggtcaatggccagtgaaggatgaagagatctttctacctgtgcttcgtcgaagaagaacaactcgtgatcgactttctgcagcgccgctgcaactgcaatccaaggaatggtgtatgttcgcctgctgagatgaagaaataaccaaaattaactttggtctttctgatgtgggcacaagagaagatgtaatataatatgtaaatatatacatgttttgggtatcattgccagaggcctctacagctggttttatagacatgtgatgtaattatctgtaactagtgttgctcggttcctcctccctagtacggcagacataggtgacatactgccattgtattgtatgggagaacaaattagttcacttgagaactagaaaaacatgcagtgatgttttgctg

SEQ ID NO: 21211 - DNA, 590 bp, Oryza sativa
  Clone ID: TF_OsC285906_1
gcacgaggcctcgtgccgaattcggcacgagggagagagactagtctcgagttcttcttttttgtgtgttgggacttgggagagtgagaaaaatgctgtcagtgcaggaggcgcttgactttgacctggacgcgatgacgtccgggttcgggttcacgccgtgggcggctgacacgtgccctaccttggagcagctgatggcgtcgtccgcgtcgccctcgccgtcgtcgtcgcttgatgacaacgcggcggcggcggaggaggagaacggtgaggtggaggaggaggaggagcggaggcggcagcggcggaaggtgtcgaaccggctgtcggcgcggcggtcgcgggcgcggaagcagcagcggctggaggagctgcgtggggagagcgcccgcctccgcgccgagaaccgggagctggcggccaggctgcacgccgtggcgcgccacggcctcgccgcgcggtgccagaacgcgcgcctccgcgccgaggccgccgcgctcgcccgccgcctcctcgcgctccagcggctcgcccgcggccgccacatgatgatcacggcgtcgccgccgcagttctcgcgtcgctga

SEQ ID NO: 21212 - DNA, 714 bp, Oryza sativa
  unsure (1)..(714): unsure at all n locations
  Clone ID: TF_OsC1713_4810
tcgatcgaattaaggatcctgcagctacaagcaagaaggtgcaggtgcagggtgcggccatggcgaactaccaccaccaggagtactaccagatggcggcggcggcggcggtggcgtggccgagggagccggacagcccgcagctgagcatcatgagcggctgcagctccctcttctccatctccaccctgagggacgacgacgacggcggcggcgtccgcctcgccggcgccgcgctgcccgccacgccggtgtcgctcgccgggatcgccggcggcgccagtacccccggcggcgacgaggtggacatggaggtgcggcagcagagcggcggcagcggcgacgaccggaggaccatccggatgatgaggaaccgggagtccgcgcttcgctccagggcgcgcaagagggcgtacgttgaagagctagagaaagaggttcgccggctggtggatgacaacttgaatctcaagaagcagtgcaaagagctgaaacaggaggttgctgcactggtgatgcctacaaagagctcactgcgacgaacttcatcaactcaattctgaaggtcgaccaaaacaagcaagattatctgacgatacaaaatcattagaaagatctaaattatgtgtatttgcaatccggtgtgcgtttgtgcaggggtcaggcatgagagaggatatngtgtgtaggtgatcgatggatgctatgaactac

SEQ ID NO: 21213 - DNA, 1471 bp, Oryza sativa
  Clone ID: TF_OsC60_1
cgactcctataggggattgggatcctactagccggccgggttccccatcggtctaattgcgccccttatgcattagagcccccggagtcccctctgtttcgcagataagtcctttggttcccatctttttattacattcaggtcctcctagtttcttttcctttcgagtctactccttgcattcttgcgaggaagcccctcgggttggtcgaattttagtttccactccctctcctcgcggagtcgttgctgttcttgttcttggtcgaggttgaggttggtggcgtagatccgatctgaggaatgtttacctatcctttcctctaacgttcgccgtactccgatgaagttgaacgtgctccgccgccgccgttcccactccttctccgtcgccttcctctactggttctacgtcttctcatgaactcatcgccttcctcccaagaacaccatctccagcctctaattgattatatcttgatttctttttcatcctcctactagtttctttcttgtttctttggaatttttttgatctcttgaagagatccggttcttggattaagttttggacaagaaccgtactgtgaccatgtcgtcgccttcgcgccggagctccagcccggagagcaacaccagcggcggcggcggtggcgccgacgagcggaagaggaagaggatgctgtcgaacagggagtcggcgaggcggtccagggcgaggaagcagcagaggctggaggagctgatcgccgaggcggcgcgcctccaggccgagaacgcgcgcgtcgaggcgcagatcggggcctacgcgggggagctgagcaaggtcgacggcgagaacgcggtgctccgcgcccgccacggcgagctcgccgggcgcctccaggcgctcggcagcgtcctggagatcctccaggtggccggcgcgcccgtcgacatcccggagatccccgacgacccgctgctccgcccatggcagccgccgttcgcggcccagcccatcgtcgccaccgccatggccgacgccttccagttctgagccaccatggagagctcgcacgccatggccattggcatcaatggcatggttgcagctgcattacaactagtagtactagcctctgtggttgtgtctgatgatgcttattatgtttaattatggtttgcttcatgttgttttcattaatctagaccattaataagcaatgtgtgttgtaatcttgtctagtcttatgtgagatgtgttcatctccagtgctccttgctaataagggtggaagagaacaatccgatttgatgtaattcttggagagcacatgtgtgctggtttgtgatgtgatgaactgatgattgtaatattttgacattgaacctatgctataatgtttgcagcaatgaataaaaaaaaaaaaaaaaaaaaaaaaaaaaaaaagggggcccagcccgcagcccggggatccactagttctag

SEQ ID NO: 21214 - DNA, 878 bp, Oryza sativa
  Clone ID: TF_OsC31203_1
atggcggcgcaggagcaggagcaggagaagcagcaggtgaagacgagcacgacgagctcgctgccgtcgagcagcgagcgctcctccagctcagcccccaacaacctcaaggaaggaggaggggtggagagcgacgaggagatacggcgggtgccggagatgggagggggcggcgggtcggcgtcgtcgggggcgggggcggacgagcggcaggggaaggaggacgggaagcagcagggtggtggcggcggcggggcggcggcggcggggggcgggcaggagcaggcgccgccggcgaggaagcgagggcggagcgccggcgacaaggagcagaaccggctgaagcggctgctgcggaaccgcgtgtcggcgcagcaggcgcgggagcggaagaaggcgtacatgacggagctcgaggccaaggccaaggacctcgagctccgcaatgccgagctcgagcagcgcgtctccaccctccagaacgagaacaacacgctccgccagatactcaagaacacgacggcgcacgccggcaagaggggcggcggcggcggaggcaagggcggcgatggcggcggcggcgggaagaagcaccatttcaccaagagctaggaggagaggggctccggtgccggcgccgccggaggcagggttgtggtaggaattgaattgttcatctgctctgaccattgttaggaaacatcatcaatgttgttgttgttgttgttgttgacgtttttccttttttttcttcctctctgttcaactctacgcttagtcgactgcttcggtgatggttgcaattactgttgctgaacattgtgtcttgtattttattaaatgtgtttttacagccccaaaaaattaaaaaaacaaaa

SEQ ID NO: 21215 - DNA, 1473 bp, Oryza sativa
  Clone ID: TF_OsC32579_1
ccggccgggccttttccccttctcccctccttcctcactaaggttcccttgcttcagcagaacccctgctgggcaccctcctttttcaaaacatcctttgctctccagccacttcatcttgatgttcttaatctccaatagtcttgccctgtgcgaattttttctttgagaaccaaagtttcctggggaaattctgttgaatttttcctttgagaaccaaggcttcttggggagactctgccaaaatttttatcaactagcaagttgaaaatacatcattgtacatatattttgtctgcacatttatatacagtagcaaaacctgtttgtagaggaaattattatagtgtttctggctggttgatccatgatagattaaacaagggaaggttgtgacttggtagatgtcaccaatcctctccgaggtcatcctctccggatttatgatcagctcgacgctccggcgaggctctcatcttgtcctctctttctccgtcgtcttcctttactggttctatgtcttctcagtaacatcctagctactgttctcttttatttgatccatccaataccagagaatagaccaccatattctacataatacttctcattggaaattatagcttatagacaaaactgagggtgacaatactgtaaggtattttcctaactgtagcaccaaggagggtactcaggacttttattaggatgaccctgtcaggtgggaccctgtcaagcgggataacctctggctcaagccatgggacccggagctcagggtcagagggtgatatccagctgcaggtccaaatggacctgaagcggaaaagaaggaaggaatcaaaccgagagtcggcaaagaggtctaggttacggaaacaacagcacctcgatgaccttacctcacaggtgaaccagttgaagatggagaaccagcagctcaccacaacattgaacatggtcacccaaagctgtgccttcgcagagtctcagaactcagtgctgcgcactcagatgatggagctggatagcaggctatcagcgctccgtgagataatcttctacatgaacaatggaaaccaatcaccttctaatcctacaatagcagcgactacatacccatccaccactacaatgactgcagcaactactggccattacgattattatgatgttttcactgcaaatgcatggggctcagggatgcaaatgatgcagcagcccatagatcagtttctgtaccagtgctagctagcttctagccaggaagtcgatagagatagtggaccaaattaagaaacagggcattgagatattgggcgtggtgaatgttgtagctaggtccatattaattatattgtgtcaccagtggttgtttatcttttgctttgatttgtgatcggttgtgggggcaggaaaaaaatggtgttgtacctttctgctgttggtggtaagaggccaaatggctattgg

SEQ ID NO: 21216 - DNA, 1526 bp, Oryza sativa
  Clone ID: TF_OsC2044_1
agctctcgtctcgtctcgcggcctcgagccctcgaccaaccaaccacccgcttcttctctcccgtctcccgaaacctccgagagctcagaagaaaaaagaagaaaaaaaagagaaaaaaaaactggtggaaactggaaggtttgcggcggaaacgagggggagggatggtggcgaggagggcgtaggcggggggtgggggtgaggcggatgatggcgtcgagggtgatggcgtcgtcgtcgccgtcgcacacggcatcggatctcgcgcggttcgcggcggggaggggtgggggcgggagcgcggggctggggtcgatgaacgtggaggagatcctccgcggcatctacgccgacatgccgacgccggcgctgcccctcgtcggcggtgacaggccgatgtcgccgctcccggcgccggatgtcgccgccgcgccgcggacggcggaggaggtctggaaggagataactggtgcgggcgtcgccgccgccgccggcggcgtggtgccccctgctgctgctgctgctgctgccccggccgtcgtcgctggcgctggcgctggcaccggcgcggagatgacgctggaggactttctggcgagggagggcgcggtgaaggaagacgaggctgtggtcaccgatccctcggcggccaaggggcaggtggtgatggggttcctgaacggggcagaggtcaccggaggcgtcaccggcggcaggagcaggaagaggcacctgatggatccgatggaccgcgccgcgatgcagcggcagaagcgaatgatcaaaaatcgcgagtcggcggcgaggtcacgggagaggaagcaggcctatattgctgagctcgagtcgctggtcacgcaactcgaggaggagaacgccaagatgttcaaagaacaggaggagcaacatcagaaacgacttaaagagctcaaggaaatggttgttccagtcatcattaggaaaacgtcagcacgagatcttagaagaacaaactcgatggagtggtagacgtgagccaagctcagttgccatccccatacagtttatgtagcatttgctcctgttttgtcaattcttctgttttatcggcagtagcctagttgcggtgaatacatgagtatttaggtgacacgaagcttaaatgtctggagtcatatgctacggaggggagagtgcgtacgagctacaaaagcaatcatatgtgtagggaggggagagtgcatatgagctataaaagccatgttccaatttgtcgcgggagtgtattctgtcccatttgttgtctgtttcattttcagtttaacaattaggtgtagtgaggaagaattacgagtactgagtagtactaaacagggtgactctaggtatgctgatatgatatctagttaggcattacttctgattctctgtttggtgccacgactcaaattgtctgtacatacacgttggatgtaaagtcacattatcaagtgaaatcatgatgtatttcctccagaattttttttaactgaaaaaaaaacaaaaa

SEQ ID NO: 21217 - DNA, 2329 bp, Oryza sativa
  Clone ID: TF_OsC11088_1
atggcggagccggccctgctggaccccaccgccgccttcgacctccgcctctacccggcccacctcttcgaccacgaactccctctcgccggcggcggcggcggcgacgacgacgacgacctcccgctcgacgggctcgagttcgacctgcccggcgatttctccgtggaggacttcctcctccggtctccggagcgggacgactccggcgagggctctgctgccggatccgggcccaccgcctccccgtcgtcgtccccgaccacctcggcgtccaactccgccgtcgccaacggcagcggcggcgaggtcaagcacgaggagtcggatgaggggaggagcggtgggggtgaccccaagtggagcctgaagcggaagcaggcgagccccggcccgagctcggacgcggccaagtgccgccgatccggggacggcgacgtttctccgtcggcgtcggcgtcgcggaccgctgtggattccgacgagggggggacggtgtgcgaggaggaggaggacgagcggcgggcggcgcggctgatgcggaaccgcgagagcgcgcagctgtctcggcagaggaagaagcggtacgtggaggagctggaggagaaggtgaaatcgatgcactcggtgattaatgacctcaattctaggatctcctttgtcgtggccgagaacgcaacactgcggcagcagcttagtggcggcagtgtgaattgcccaccacctggggtgtatccgccggcgccaattcccggcatgcatttcccatggatgcctgggtatgcaatgagaccccctggttcccatgtacctcttgtgccaatcccccggttgaagccgcaacagccagtgccttcatccaaagtagtgaagaaaccagagagcaagaagactgtggagaacaagagtaagagcaagaccaagaccaagaaggtggctagtgttagccttcttggtttgctgcttattatgcttgtctttggtgctttcattccagggtttaatcataactttggaatgtgtgggcagagtgataatgctatgtttaggaattttggtcagtctcatgctagggtgttgagtgtcagtagccaggataaaagtagtttgaacaatagcgacatgattggtgttgatgttggaaagatgacggggaatactgatgggccagggaagaaacatcagcctgcacacaactcaagtgagatcctccctgctttgttgtatgtgccgaggaatggaaagcatgttaagatcaacggcaacctgattattcattctgtgcttgcaagcgagaaagcagtggcacataaggcctcaaaagatgatagtgatcagtcagctagagatcacaaagagactagtgttgccatagctcgttatctttcgctgcctggaaaggatgtgaatcgacaggagacatcctcggcagatggaccattgccacaatggtttcgtgaaggaatggaaggacctatattaaattctggaatgtgcagtgaggtatttcagtttgacatttcgacggcttctagcaatcctggtggcattatacctgcatctcctgttgtgaactcgtcaagtgtcaatgctaccgagaaaatcccagcacattctgctgcttatcatggcaagctgaaaaacagaagagtcatgtacaatgaagcgattccactcaccgggaagacggcgaacaacacagagccttttaacagaacctctgaaagcagcagcaagttacctgatagcaagccagcatcatcagttgttgtctcggtgctagccgatccaagggaggctggtaatggggatggcgatccgagagtatctccgaaacccctgtccaagatatttgttgttgttcttgttgacggtgtgagatatgtcacttactcctgcacgcttcctttcaagagctccagcccacatcttgtgaactaagcggctgggttgttcgccaaaaactgacagatgaatagatttatacaatgatctgatgctgtttcctaaccaaggactaaacttcctatgcactcaggctgaggtaattcaagtttgtcgaaggttcggagtgatgagtgcgagtttagttaatgtatgcagtttttgcagtgctgtgataatcgggttcgtttgctgtacctctagctgtaacggtgatgtaatcatgtaatactgtttgatcgttgagatataagtgcaactagtaatatgggtagtcgagaacacgtgcagaatatacatgcctttttttaccttagtttcaatgaatatcataaacaaagctacagtacatcaggttgctgaaaaaaaaaaaaaaaaaaaaaaa

SEQ ID NO: 21218 - DNA, 1276 bp, Oryza sativa
  Clone ID: TF_OsC2449_1
gttgttttttttttttttggggtttagatcaaatatactggtagtatatacttcaagaagaatgtacccgaaaagttctctttttttccctgggttaatccaaccaaattaagttccaagttttaggatcaattcaaacccaaaagcatattcgagcataaaggggtctactacttgctgacatcttctcctcttatgccgccctgccgctgccacctgccgccgccgggctgccgctgccctggtcctcgaacgcgctgatgatgccgatgacgaaggccgtggagaaggactgcatcgccatgctgttgggcgtcctgtggaactggagcagcgccgggaagaaggcgtggcccttgagctggttcgtgccgttggtcaacatgagcagcccgttcggggtcaccgtcgccatgccatcgaagctgagattcgcggcggtgaacccgttgaggacaaacttctcgtcgccctccgcctcccgcaaacctccgcagcccgctggtgccgcctcccgcagacccgatttggggattttcagaagaactggccctcttctgctcacagttgtattcttcagtatctgtctgagcatctggttctcattctgtagggtggagaatctttcttccaactctgagttcttcttctccaagtccttcaccttcacctcaagatcattcaagtatgccttctttctctcccttgcctgctgcgctgatacccggttcctcagcaaccttttgaggcgcttgtgctccttatccgcggggctgcgcccgcggcggcgcgcgctggcctgcgccgtcgacgactgcgcgcgctccgccccgccgccgccgccgccggccgccctccccgacgtcgaagcgccgcccggctccagccccagctccggcactctccctatctcctcgtcgctctccattcccgaaagaggaacagtaaaatggaaatcaagaaagggaaggagaagggatcgaagtggcgcttccttgccttccttgatctccatgtggtggccgccggagctggacgacctctcggagctggacggccgcgagctcgtcgcctgctcctgcattctcgccggcgaggagggattcgcgtgcactcctccgcttgcttcagcttcagcttccccactctgtcctctcctctcgtccttgctgcttgcgtgaagcatggaccatgagagctttttggctttaactggcgcgcgtgccgcgggagagggaaggaggggatcggtgagagatgcgcgtgttgtcgccat

SEQ ID NO: 21219 - DNA, 525 bp, Oryza sativa
  Clone ID: TF_rsiced_11007.y1.abd
tctctctgtgtgtttgtgtcacactcacgctgagcttgcgagcttgcttgctcagaggaggtaaagaaaccgaccgcgaggaggtctcgtcggccgcccccgccggtgtcccgccgccggggaccgccgcaagaggcggatgatcaagaaccgcgagtccgcggcgaggtcccgcgcgcgcaagcaggcccgcgtcaacaaccgggagaccgaggtggagcagctcaagcaggagaacaagatgctccgcgtcaagtacgagcagctgaggaagacggtggaggtgccggcgccggtgaggaggactctgcagagggtgctctccgcgccattctgattcttcctcctcatcgatctcctgctgctgctgctgctgctttgtgatgatcttggatttgtttttggagatggtggtggattagtagcttgtgttgctgtgatgatgcttaattagcagcaaagctagctaatccaggcatgtacattcaggtggacgaacttagctactatggttactactactac

SEQ ID NO: 21220 - DNA, 1315 bp, Oryza sativa
  Clone ID: TF_OsC3007_1
tttttttttttccaacttttttttacattgatgatcacaagaggaattgatataatgacatagtttataacattacataacacaaacaacataattaacccttacaaaacaccacatggacacagacaaaagaccatcacttattcagacacaaaatcatcatcagaagagtagtagaagaagaccatagagcagcagcagattaaagccttgaaattctcaaagcagccaagagaagaaaaaagatgaagacttcttgatgccaaccacagcttagctcagagctcactctcccatggcgcggcgttcgttcagtactggagcatgtgcgcggcggcggggcaggggatctgccatggccggagcagcgggtcgtcgggggggcactcctcctggatgtccatggcgacgccgctgaactcctcgacgacgcggagcacctcgttgacgctgcgcagcctgtcgccgagctcggcggcgcgcgcccggagcaccgtgttctcctgctccacgcgcgcgtactgcccggcgatttcgctggcgcgcgccagcacgcgcgcgttgtccgcctgcagcctcgccacctcctgcaccagctcgtccaggtgctgctgcttccgcagccgcgaccgcctcgccgactccctgttcgacagccgccgcttctccctccggtggtccgccgccaccaccacccccgccgagtccccgtccgacgaccccgccggcgacagcgacgacgacgacatttccacaaacaccttgtctacaaacagctgcttcttctgctgctacgattatttaatcaaccgaagaagaacacgaagaagaagaacaacaacaagagagctctactactactagtaacaatggcggattgacgcggagaagatgattcccccagaattatgagatcacataaaaccagtagaggaagacaaccgagaaggagtggaggaagcaggagcggcgcaggtgagtggcgatcttcataaagctcagagatttcttctctgctcgcctcggcaaaccatggccagcgagctcaactcctccctccagcgcaaacaattcctcccaaatcccaacaacaaaaatcacgatctttctcaccaccaagatccaacccaagaacagcaaccacaaccaaaattcgacaccgattcgatcagcgggagctgatctgctcgaagaggacggaatcgagctgattggagaagaatttggggggagaaatggatcgagagatggagatgaatggcaaccacccaaatcaaaggatgagccccggggtggggcagcccggggatccact

SEQ ID NO: 21221 - DNA, 717 bp, Oryza sativa; identical to SEQ ID NO: 11590
  Clone ID: TF_OsC542_34

SEQ ID NO: 21222 - DNA, 1367 bp, Oryza sativa
  Clone ID: TF_OsC359_7290
atggacccgcgattcccgccgccggcgccgtccgggggagcgccgccgagggggcaccaccggcgggcgcactcggagacgttcatccggctgcccgatgccgacctgctgctcgacccggacggcgagttcggattctccgacctcgacttcccttccctctccgacgactcccccgcggcgtccgacccgaccccgcctcctcccccgccggcgctgccgcaggcggcgccgcggccgcctgggggtgcacacctgaggagcctctccctcgacgccgcgttcttcgatggcctcgcgttccagggaggaggagggggtggtggtgctgggagtgggagtagcggcggtggggctgggcataagaggagcgggtcgatggatggggagagctcgctgttcgagggcgagtccgcgccgcccgactacgccaagaaggccatgcccgccgataggctcgccgagctcgcgctcctcgaccccaagcgcgcgaagaggattctggcgaacaggcaatcggcggcgaggtcgaaggagaggaagatcaagtacaccggtgagctggagaggaaggtgcagacgctgcagacagaggcaaccacgctttcaacacagctcacgctgctccaggcgtactgggatgctatgatcataaaaagtgttagtctctgtttggttgtatttattctcaactgtgagtaccgctatagttctgtacttgcaaattgcactttccaggacaagcagggccattacaaggcaattgaaatcaaagaatccaaatatatttatccagataagcaaagcaacctgttgagaaagccttctctgtttaatgcagctctgaatgacgccctacgagaagaagttcagcggcttaagatagcggcaggccaagttccaaacatgaacggaaactccttcaatggaggactccagcagcagcagcagcagcagatgccgacctatttctcgcagcagcagcagatgcactacttaagtggccaccagggacgtcatcaccacccaaataatccccataactctttgaacggaggccaatcgatgagcggccagaccctaaatgactccatggatttcatgtgagcaggactcaagcacacctcaagttgcacgctaactgcaactcatgtactgtaaagatagctgatgtataccatatgcatatatgaatcattcgtagggtagctagctgatctttgtaccattactgaaaatgcaattcatcctcctgttcaatcatctgttaatgccttagtctgaaggttgaaagaactgtgtttaacatgtttgcgacggttgttttgtaaagatgttgttatagtgaatggaatgggttctgattg

SEQ ID NO: 21223 - DNA, 856 bp, Oryza sativa
  Clone ID: TF_OsC799_2
ccacgcgtccgtaccggactacgcgaagaaggccatgcccgcggagaggatcgccgagctcgcgctcatcgaccccaagcgcgcaaagagaattctggcgaacaggcagtcggctgcaaggtccaaggaaaggaagatcaagtacactagcgagctggagaggaaggtgcagacactgcagaccgaggccaccccgctgtctgcacagctcacgcttctccagagggatacatctggtttaactgccgagaatagagagctcaagctacggttggcagtccatgggaagagcaagctaactaccgtgatgctctggaatgaagctctgcgagaagaagttcagcgacttaagatagcagcagggcaagctccaaacatgaacgggaatcccttcaatggtggactccaacagcagattccgccctattacacgcaacagcagcagcagcagcaacagatgccttatttaggcggccaccatgctcagcaacgccatccaagccatcagcagagctcatcaaatggcggccagtcgctgagtggtcagtccctaaacgactccatggatttcatgtgaggagaagaaactcgggggcccctattaaaccatataccaactgcagctcagcattgtaaagatagctaatgtacaatgtaatgcatatgaatcattgaatagggtagctagccgttctttgtaccagtaaacagaagtaattcttgtatgacataatcctccctttccccctttgttcattcctggattaatgcctagactgagtaactatgttaaccatttaacacttgtctgtaaaaaaaaaaaaaaaacttgtcttgtaaagtggtcgtttgtaac

SEQ ID NO: 21224 - DNA, 2033 bp, Oryza sativa
  Clone ID: TF_OsC737_3
ccggccgggacaatcagagcgaaatcgagagagagggcggcggcggcgacttcgtgcgcaagagggaggcggcggcgacttcgtgcgcaagagggcgtgccacgggccagcgacgccagtgtcctcccttctccatcctccttcctctcatccctcctcccgccgatccctttcccttctccatcctccttcctctcatccgccgccgcgccggctcgtggctgagctgctcctgcacctcctcctcccagtcccgcgcccgcagctcccgcctctccccccgcttcttccgcctctcccgccctgtcagctccccctcacctccatagccaagtgctagccaataagaaaattttctgccgcatccatgatacttagagactccactgcttcattgaccaagaaaatatagaagatcaaaggtgtcttgtagaacttaggtgttaaaaggaatagagtaatctagggaggaataaagcatgggaaaaggagaggtagccactaggtccaaatctcaaaaatcatcggcgacacagaatgaacagagtacacccactaatcctcctactgcatatccggactggtctcaatttcaggcatactataatcctgctgggacagctccaatgaccccaccgggctttttccatccaaatgtggctccaagtcctcaggggcacccatatatgtggggtccacagatgatgcctccctatggaacaccgccgccatatgcggcgatgtatgcgcaagggacaccatatcagcaggcacctatgctaccgggttcacacccatacaatccttatcccgggcaatcaccaaatgggacagttcaaactcctacatctgctggcggaacagagacagataagtcaggcaaaagtaagcggaagactcccctgaagagatcgaaaggaagcttaggtaatcttgatgtagttgcaacaaaaaataaaaaggcgcccgcaaaaccttcagcatcctcatccaatgaaggttcttcacacagtgagagcggaagtggaagttcttctgaaggaagcagtacaaattcaaaaagtggttcaaggacaaaggatggttctgagcatggccagggtaatgatgctagcaacaaaggagctactgctcagagttctgcggttgagcccgtacaagcatctactgggccagttgtgcttaaccctatgatgccatactggcctgtccctcctcccatggctggcccagcaactggtgtaaacatgggaatggattactggggtactcctacttcagtacccatgcataataaagttattgcagcaccagcatcagctccttcatcaaactctcgtgatgttgttctcagtgatccagccatacaggatgagcgagcgctcgcgtggcaaaagcggaagcaatcaaatagggaatcagctcgacgttcaagattacgcaagcaggctgaatgggaggaagtagccaatcgagctgatttgctaaagcaggaaaacagctcacttaaggaagaattgaaacaacttcaggagaagtgcaatagcttgacctcagaaaatacaactttacatgaaaagcttaaagagcttgaaggcgagaaatcaaatggaaactggtataaagagtgaaaagctgtaacttatcactttctgacttctgatataaattggaggcgacatggtaggtccgataattaggaggtattcatgtatgctattagatttttggccgagaggtagaattgtatcataggatttgacatgatggctacagattcttcttccagttgccgcggctgctgtactctatgctttttttttttttctgcacttgtgtaagattctacgaagtaccatgtaaaagtccccaagtgatgtttgaaactctgggggttagcttctgagatagttgatgtagagctgctcattgagcgtctttacctgaattgatgtgtgtcacagttatagtttgtgacttatcattcagataattagaggcacaaatttgtataacaaaaaaaaaaaaaaaaa

SEQ ID NO: 21225 - DNA, 531 bp, Oryza sativa
  Clone ID: TF_OsC342012_1
ctagctgtctccgccggcactgctgtctggccctcttctgtttgctgttgtgttcttcagcacctgcctaagcatctggttctcgttttgcagggtagagagcctctcctccagctctgagttgctcctctccaggtccttcaccctcgcctccagctcactcatgtacgccttcttcctctcccgagcctgctgcgctgacacccggttcctcagcaatcttttgaggcgccggtgctccttgtcggcggggctgcgtccgcggcggcgcccgctgctgctgctgccggcgacgccggcctgcgccgcgggcgacgacgacgacgtcccggccgccgtcgccgccgcgtcacctgcaacccgaacactacctctgcccgacgtcgacgtccccggcagcgccagcccgaactccggcaccctccctactatctcctcgtcgtcgctatccaccctttctagaagtcccccgccaaccgctttgactgattgcttcacgacctgcccgtcgtccttccttttaatcgtcat

SEQ ID NO: 21226 - DNA, 1647 bp, Oryza sativa
  Clone ID: TF_OsC15853_1
tcaaggcgcatcattaggctgagcatcagaatcctgttgcttctggtgggtgccattggtgtcgttctgttcattcatataaggtattgaatcactgttcccctctagtttttccttgagtgaagcattgtgtgaaagaagtgcctcgtactcctttttgatccgttcaagctcagccctaagagaggagttttctgcccttaaattgtcagcgcgtacagaaagctcttcacactcaggctgggacaaatagtttggtgcctcaataagcctatccatgatgttctgcttgcgcagccgggatctacgtgctaatgcaggattagactacttacgtgtctgcttcttcagctctgtttcatcccattgctctcctcggacagaagcagatgttgctttacattgcatggcaggaaaaggcgcagatccagctgcacctgattactccgtcggtatgttcgagtttgttgtgggagcaactccccccattactgcttccggttgacttggagccatcaatattttcttagtaaatgctgtatggattatttgatattgagaacaggcatcttcctttacatcattttcctttgaatgtgaatcattttgagagttggcatcacttccttcactttcactctcacttccactctcactgtgggaggtaatcccgttggcagatggaccagatgttctgccaagctcatttttcccgttaatttctgaagcacctggtgcagttccagcagtttcaacatttccatttgccagcatagggtagtgattaaatggatgcacaccctgagctccccacatgtagggatgagcctggggacttgcagcaacaggaggtggaaagaacccatgcggtggaattgccgagtaggcctgaaaaccaggccattcagggtaaactggagctgtagtgccagatgtagtggctggagactgctccggttctgatgcctttgttgccttggacggcgtgccaggatcattagtacccatcaggcatcccaaaacactcaaatttaagaatgacgcatcaaccaagaactccacagatccacactcctgggaggctccaaggcagacgcgcatatcaaattcttgcaatcctttggccaagagtgattggcagttccaacgcaggcgcccttggtactccaaggaatgacagatgtcaccatcaatgacggatatttgctttctcattgctagagcagctgattttgtattatatttcacttgatatcttccagctggagttgagtcgttgttgatcgagatttctggaacaacttcatccaagaactcatctgcgacatcaccatcctcatcaatccttagcttccttgtataccacctaaagccctgaacgccgccgtcgccctggggacagggcacgagcaccggcccgggcccgggccgctcgacggggacggggacctggacgctgaacccgcgcctctgcacgttcccggcagccgccgcggcggccgcggcggcgacgaccttatcctgcgggacttcggcggcggcggcggagtcccccgcggcgccgtcgtggtggtggtggtgggggtggtggtcggcgtcgtccctggagattccaaacatgccggcgatccggcggaagaaacccat

SEQ ID NO: 21227 - DNA, 2526 bp, Oryza sativa
  Clone ID: TF_OsC1438_2
gaggacgaggcggagatggcgagcacgaggctgagcctcgagctggggaaggtcggaatccagtcgtcgccgccatgctccagcagctcaagcgccggccaccccgcgatgcagcccgccgccgcggccacggcggcgccgggctacggccccaggccacgccacatgctcaccgaggccgagaaggaggcgaagcgtctccggcgagtgctcgccaaccgggaatccgcccggcaaaccatcctccgccgccaggcgatccgagatgaattggcaagaaaagttgcagatttgtcgtcgcagaacgagaccatgaaaaaggagaaggacgtggtggcgatcaggacgatcaagaaggcggccgtggcggagccgatggacacggcgccgccggcgcagcagcaagcggagacggcggcggccgtggcgccgccgacgacggccaccccgccgtcgacggcgccgcagccgagcttcctgtacaccgcggcgccggcgggcgtggcgccggtgccgtacgtgtggggctcgtggccgccgtgcgggccgacggggtacgagccgccgccgccgctctgcctcccgccctgcgcgtggtactaccccgtcgtcgccgatccgcgcgtgtcctcgccgccgacgtcgacgtacccgcagtcgtaccaagaacagccgacgagcagccctggcggcgggacggccgaggaggacaccgacgacgacccgtgctcgctgacactcgccatcgacgtcgacaagaggagcgcgcctggcgccggcggcagcgcggccggagctggacagcacgcctccataagcgacagggagaaggcgacggcggcggcggaggcgaggaagcggaggaaggagctgaccaagctgaagcagatgcacggcggcggcggcggctcccgtcccggcggcggaggcgagcactgcgcctgcccaagcctccgcgccgcgggatgccgccgcgctctgtgctcccttctccggcctcggtttgctcagatccaccgcgtcgcgccgtcgatccgacgccgatgcggccgccggcgccggcgacgacggcaggcgcgggggggaaggtgacgccgaacctggcgatggacgcggaggggacgcggctgctcaacctcaccgtgctgcagcgcctcgaccccgccgtcgaggacatcctcatcaccgccgcccacgtcacgctctacgacttcaacatcgagctcaaccagtggagccggaaggacgtcgagggatcgctgttcgtggtgaagaggaacaagcagccgaggttccagttcatcgtcatgaacaggcgtaacaccgataatctcgtggaggatctattgagtgactttgaatttgaacttcagcctccgtatttgttataccgaaatgctgcacaagaagtaaacggtatttggttttataaccaacaagactgtgatgctgttgcaggtgtttttggaaggatattgaatgcttacgccaaagtgcctccaaaagcccaaagtacctttccacaaaaagtgagtttgaggaattggaagctgttcctacatccgctgctatagatggcccccttgaaccttcttcgtcgtccactgttctagtttctaatgcccctgatgaatcattgactgattatttcagtggcgctgttaatgttgggaatgtatcaattacaccaatggttggaagaactcatcagcctatcgagtctgttgcatcctcacacgtaccattgatcatcccatctgctgctcctacacatcaaatgggtgttccttcaggggctgcgtcagctccaccactgcccgtcattgacactaacgttcattctagccactcaacaaatcttgtaactccagccttttttgcacctccctcatcgtcttctgcatcattggtggcaccagcttcatcctttatgcccacagcatcaccttttcatccaacttctgccgatgctcaccgtccagcatatggacatggtacaccccttcttcaaccccttccgccgccaacaccacctgcatcacttacccctgtacacaacgatgagcctgttatttcgagggataaagttaaagatgctctcctgaggcttgttcagctttggcttctttttatatcggatgtccgcgaagagattgtgcagctttgtcttgatgcattattgatgtaggagttacagaatgcacatgcgtagactgcttactcagcctttatggagtgtctggccttgacgagagttcacctgttctttcgtagttttgtgtgctttagttctcaaaactttatgtacagctttggcttctttttatatcggatgtccgcgaagagattgtgcagctttgtcttgatgcattattgatgtagagtttttatagcaatggctggtagtatttcttccaaatggttgtacttgtatagtatttttgtttcctgttggaaactcgaaatcggaagctggactatgtgtggcaacgttaaaatactgtccattttgtgtgataaacaaaa

SEQ ID NO: 21228 - DNA, 1747 bp, Oryza sativa
  Clone ID: TF_OsC7438_1
gggcccccggcctccagcccccagctcctttgttaggttttcttccagtgagctctttttgctcatattcagatcttcacttatttcctagttgttactactgcctttgagtattgacagcttcatcctgccaactcagctcaatcttcctctgaagtttcagtctttgtttctgaatctcttcagtgttcagaggggaagttctgccaaaaaatttctctggccatccattttccaaggggagattctgccaaaattttcatctctgtccatcaatattcctggggaggttctgccaaaattttctctgaaatcggttaatttataaggggaggttctgccgaaattttcgctggtcatcaatcttccctttgttgacataccctgcataagtatatacaacaaacatataactttttgcaaggtaagaaggagtttttatctgttcttgatgatagactcctagagaagttgtcctagttgtgtagatgttgttgctcatcatccctgagcacctcctctctagatttatgactggcccagccataacccagcttgttcagtccttctctgttgtcttcctctactggttctatgtcttctcagtaagctccctgtagttgtagccttttgaaattacaagacttatttatacaacataattatcaaggcatccacatataaactacaaggtatatatatatatatatatatatttacaaaaagaaaaggaataagagggagtaaaattgttgccggtgcgaaaaaaaaaattgttgagaggtgaccatgtcgagtgggacctcgtccgggtcgagccagggaacccggagctccaggtcggaagatgacctgaacctccaggcccagatggagaagaagaggaagaggaggaaggagtcgaaccgagagtcggctcggaggtctaggatgaggaagcaacagcacctcgacgaactcacctcgcaggtgaaccagctgaagaatcagaaccagcagctgagcatggcactgagcctgaccacacagaaccttgtggcagtgcaggcacagaactcagtgctgcaaacccaggagttggagctgcagagcaggctgtgtgccctaactgacatcctgatgtgcatgaacaacaccagtgctactcctactcctacaattccagccaccactacaagtgcttgtgatatttttggtgccagctcatggaaccagccacccatagacttgtaccagtaccagtgcttctgatctaggaataagaagagggttgttgtggtagtgtgggtaggaccagaagccatcaagtaatgtttcaatcatgtagggccattgttgtcactgttaatgtatgcaattcaatcttaattgcctgctgtaggggacagggatatttgctctttcttgtagctgttggtggtagagggattaccagatggcaaaatggtgctttggcaatgtgttaggtggggctggttttggttgttaagggtagggaggagaaaattggtaggtttttcttgagcatgcaagaggggaggcaaaggattttgtgtaatgatgctcttcaaggaaagtattcataattatgattataatgtaatatgtggatttggtggatcttcataggccaaaaaaaaaaaaaaaaaacttttacatcctctgtctgtatgtgtgacgatactgctcaattaatactctgtgggggtcccgattccccatatacactctattgaggttctaatcc

SEQ ID NO: 21229 - DNA, 682 bp, Oryza sativa
  Clone ID: TF_OsC1517_1366
aggagtacaacactcttgcaacagcacccaacaatttggagactgcagagaaaagggtgttcttactagctaaggaattttcaacatggcagttacagcttgaaccacctttaattccagggcagcttacttctactattaacatgattcagaagtcggccgagttaacccgccggagctgattctttggctcctgttgcggcacatactgcactaccggttcaggtgccttgtgcatcctgagccgcttgttctcctcctcaagccgcgagatcttgttctccagctcgttcgtgtacgcctgcttcctggcgcgcgacctcgctgccgactcgcggttcttgatcatccgcttcttccgccgctccaccgtcttctccgcggcggcgccctcacccgcggcgggggcgcgcttactccctgacaccgggccgtcgtggtacagcgcgtccagcaccggcccggcgcccagcccgacgtccaccgtcttcctccccgccgccgccgcccccgcccccgccccaccgccacccgtacggagcaggtcgtcgaggttcacgccgtgcagctgcccctccacctcgctcagcgcgaggccgcacagcgacccctgcctcgacacgcccccgctcccttggtgcgacgacaaaccagtctcaaccagaaattgcgccagcacaaa

SEQ ID NO: 21230 - DNA, 1605 bp, Oryza sativa
  Clone ID: TF_OsC20200_1
ccacgggtccgcgcaggcacgcacggcaccggcggcggaggacgcggcaggagcagcagccgcctcctccaatccccgagccgaacactcgctggcgggcgcgcgcgcgcgcagccggggaaccgggggggagacagggtggtggtggtgaggcgggggcgagcgcaatgcaggagccaaagcacaccgatccggcggccatgcgcggggcgcaccaccgccgggccagatctgaggtcgccttccgcctgcccgacgacctcgacctcggcggcggcggcgcgggggcgttcgacgagatcggctccgaggacgacctcttctccaccttcatggacatcgagaagatctcctccggccccgccgccgcggggggctccgaccgggaccgcgccgcgggagacgtcctcgccgccgcgccccaagcaccgccacagcagctccgtcgacggctccgggttcttcgccgccgcgcggaaggacgccgccgcatcgctggcggaggtcatggaggctaagaaggccatgacccccgagcagctctccgagctcgccggcatcgaccccaagcgcgccaaaagaattctggcgaacagacaatctggagctcggtcaaaagagagaaaagctcgttacataacagaacttgagcggaaggttcaaactcttcagactgaagccactactctctcagcacaactcacactatttcagagagacacaactgggctttctgcagaaaatgcagagctcaagatacggttgcaggccatggaacaacaggctcaactgcgagagcctctgaatgatgcactaaagcaggaactggagaggcttaagctcgctactggtgagatgaccaattccaatgagacatatagcatgggactgcgtcatctcaccagtacacacccctttcttccctctcgcccagcataatgcagcccgccagaacggtggaacccagttgccaccacaatgtccaaccaccccgtcctaatgtgcccaatcacatgctatcccatccaaacggtttgcaagatatcatgcagcaagaccctcttggccggcttcagggtttggacatcagcaaagggcctctagttgtgaaatcagagagcagctcgatctctgcaagtgaaagcagcagcaccttctaaccaggcctacccaccgagcccacagttccattagattcgtttgttcatagcctgacatcctcgcgctgctccctgttctgtaagcttattatttattcaattcgttcgatttagttgaaattgttcgtaattgcagtggctgatctattcccttctgtggacatgattcctgtacccctcacatccatttgttttgggttcatctcctgtgtgctgtgtttgggattatcagggcaccaggactggctttctccgagaatactgtgttctttgtggtcgtgtggacttgttcaccatggattcaattcaaccttttgaaaagatgcatgtattctctgattttttttctcagtcatgtacatgtcactgttatgctagtttgattgatgtgtactgtggaatttgtggataacaaaaggagttaagattgggattgctgggaacc

SEQ ID NO: 21231 - DNA, 1670 bp, Oryza sativa
  Clone ID: TF_OsC340_1
atggcagagtccagaatattcggaggtctcaagcccaccaagtccaggttactgggccctactatcagaggcccaccacccaacggcgcggccactcatgccccacgtcgcatcctcttctccttttctccggagagtcaatggctcggtcaaagctcaacgagagcatgtcttcctcctctccgttctccgtgtctccccgccccatccgccgctagccccgcctaccctcgcctcgcctcctccgccgcctccgcctccgcccccgcccgcctccgctcccgcattaccctccccggtggcagatctcccgtccccccaatggacccggccgcctccgccgcggagtcgtcgtcgctgtcgtcgcgcgacgtcgccgcgatgccggactcgccgccgcggcgggcggcgaggcaccggcgcgcgcagtcggagatcctcctcggggcggcgctcccggacgacatcgccttcgacgccgacctcggcgtggtcggggaggtcggcggcggcggcggggacgactacgaggaggaggaggaggatgacgaggaggaggagatggagggggcgggcggcagccggatgttcgagatgttcctcgaggccgggggcaagctcgagaccccggagcccgcggcgccgctgccgccgccgcccgctcggccgcgtcaccagcacagcatgtcgatggacgggtccacgtccctggcgtcgtccgccgcgggtgtggcggggaggatgggcgcggacgctaagaaggccatctctgacgccaagctcgcggagctcgccctcgttgaccccaagcgcgccaagaggatcttggcaaaccgccagtcagctgctaggtcaaaagaaagaaagatgcgctacattgcagagcttgagagaaaagtacagactctccagacagaagcaactacactatcagcacagttgtccatgttacagagagataccactggtttaacaagtgaaaatagtgatttgaaaatacgggtgcaaacaatggagcaacaagtcaggctgcaggatgcactaaatgacaggctaagagatgagattcagcagctaaaggttgcaacaggtcaggttaatgccaactgcggcaaagtgggaaactttggcctctcctcatttggaggcgccaatccacaaggttaccagcgcagtcacatacaatctcttctggcagcccagcagctgcagcagctacagatccactcccagcaccagcagcaacagatgcatctgcagcagcatcatcatcttagcacggtccaacagcagcttctgcaggaggggttgcccttgccaggggatctgaagatgaaaggaattgtggcggcatcccatgcacagaacgccggcgcatctgaaagccacgctctgaggagtgagccgtgagttggcataggctcatggcggttgtcagtaataataacatgttgtatctgagtgactcatgcataggctagcgcagtatctaggtaaaatttcagactatctatgaagcacttagatgcctgcagcctgtagaatgtagatcccattcagttgtaagttgtagaactgatgaggcaaaactgagtaattcaccggtgccatggagtatgttcacgtcacctgcagcccggaaaaactcgagactagttctctctctctcc

SEQ ID NO: 21232 - DNA, 3189 bp, Oryza sativa
  Clone ID: TF_OsC1713_5475
tttttttttttttttgaaccaaaatagtgtattcctttgatcacaaaataaccatcacaaaactgtcagcaattttgagcatatatttgcaatttgagctctgaaggtaatgagtagtggaaagcatgtacaatttgatcacaaggtctctcatcttgatctatttatcgttatccctttcttttaccaactcatttgtaccaaaagaatcaatcatatggcaactaaaaccccatatgaaaaaaaaaatcctgtcgctcacatccatgtagatcacctgacataatctgcaccgtcaagaaaatgagcatactgtgtcccattcagtttgttgctcacatcatcccagttcctgacaaggcctggaagaggactagtgtgaattttcacctgcctgctgaccagctttctcaccggaactccgaggaattcttgtacctggaacaatgcatttctgttgcggacaatatcctcgtagtagaggatcatgtgccgtgtggtgttgaagtggtccaagcaatctctgatgtatttctcggcatttctgatgtttggaatcagatttgacacatccagcaccggcttgaatttcgctaatatctcagcctcttcttttgagtgtacatgggatttgtgggttccattcagctgcttcgcatctctgtcgtaatcattagccaaaacagagataagcctgcgcaatgtatttctcctgaagagaaatatcacggaaacacccttcttgtttaaataactagctatatcatcatgatggtccataaacccctgatttagcatccacttcaatccaaatgcagccgtgcactcattctttgctgcactggtgaaccaatccaaattatacaatttgtcaagggtctgtaagatagatgagatattctctcttctatccaccctgttaaatatttcaccatttgagctgatgttagggtggctgttcagcaaagtctcaaaccatccacttcccgaccgttgcatagatacaagcacaaaggatcgaaccagattgcaggaacactctcccctgctataactctcaggtttcggaaagtgcacataacgcagctcctcatgaggaagatgaggctttcggcaatgaatttctgcctgcacttctccactgttctcctcagatctattctctagtgttatctggttaaaggagatgtagcatacatagaatccaaatattgcaatgaggaagacaagaatcggtcgcggtggaaacggtgctcccttggaacttttaagtgaatatggatgaagtgggcccgaagtaggtgggacccacatgtcagtgacacctactgcaggtgcggtccagcagacgatttgcatccgggccaggagcgctgctatttcttccaataatctgaccgacaacagagtgttccatccagcaaaaacatttacactatctataagaacgacaacgaagatgcgggacagagaatttgaggagatcctcccctcaccatccctatcgctcgcttcccttggatcagccaggacagagactacaacggacgaaactggcttacgaccagcatggctctgactatggttcttggggggtgctttgaaatgatccgtgtcattggatgtcgaacctcgtaaagggatggcttctgagtacgaaatccttctgttcttcaccttctgaacagggccagaaggaagattttcagtataattttgtgacgtgttagtcactgacccagagtagacaggcacaatgccatttgcatcagctgttgttggagataaatcaaattggaatacttcagtgcacatcccggagttcaacatgggacctgacattgcttcactaaaccactgcggcagcatcccatcatcctccctgtatatgcttccatctccaggagccagagccatcagttcattcattcctttagcagaatccatgacttctccagcttctaacggagctacatagccagggattgctaagctagtctcctcctttccttggtttccagaacccttctcgccatagttagacaaacgggaagaggctttctcactcgcaacaatggacttaataaccagatttccattgatcttcacatgcttcccattcctcggcaaatataacaaagctggcagcgtttcgcttccattctgaggtaccttcggatcaacaccatttgagacactattttgtggcccttcaacagccagaattctcccatgatgtgacggaacaatcgcagcgccttccccagtgtacgctgcaccatacatccgatttaccgcaggaaccaaacacccgcagaccatcatcaagaacagcaatccaagcaggctaacacctgcaaccttcttggtcttccgggccttcttggccggtggctccggtgtggacgcaggctgctgcgtcttgagccggggtatcggcacaagcggcacctgcgagccacgcattgcgtaggctgggtggatccatggcatcggcaatgggtaaaccgcagggtacatgggcattggcggcggtggcgcggcggcaccagcaccggcggcgccacccaattgctgcttgagggcggcgttctcggccgtgacgcaggagatcctggcggtgaggtcggcgatggtggcctgcatcaccttcaccttcccctccagctcctccacgtactgcttcttcctctgccgcgactggtgcgcgctctcccggttgcgcaccagccgcgcgcgccgcttcgcctcatcatccttcccatccttgccgccgccgccgtcactcccgctcctcgacggcgacgacgaatccgcggactcctcgttcttggaacccccgtcgccggccgacgacgtccccgcttccggcgatccggcggccgaggacgacgacgacgtcgtcaccggcggcggcgcatccggcgggaagagatccacatcgaagtcgaagtccagatcgtcgagatcgaaatcctccagcgcgaaggcgtcatccccgagggtcgggaagtcggggaaatcgtcgccgggggggaaggggaggtcggcgaagggcgcgagtaggtccggctccgccatggatcccggtcaccggcggcgcatacgcggcggcggcggcgatggaggtggatgggatcacggacgcggtggtggttgcggaagcgtgagggctctgcaatggaaaag

SEQ ID NO: 21233 - DNA, 1274 bp, Oryza sativa
  Clone ID: TF_OsC1243_1
gcgatcaacacaaaaagcttctctttcccttctcctcctcggtgatctgtctcgccggggcatctcgaaaagcatccgactccgacgccgccgcgcgccaccacccggccgatcgccgacgccgcagccgctggaagcagcagggacgacggagaatcggagatggacatcgaggcgttcatccacggcggaagcgggggcggcgacgccgacgccgaccacccgctcggcatcttctccgccgccgacctctccggcttcggcttcgcggactcgagcaccatcacagggggcattcccaatcacatatggccccagtcccagaacctgaacgcacggcatcctgcggtctccacgacaattgagtcgcagtcatcaatctgtgcagcagcaagtcccacatcagctaccaatctgaacatgaaggagagccaaactctgggaggcacaagtggttcggattctgaaagtgaatcgctgttggatatagagggtggtccatgcgaacaaagcacgaacccgttggacgtgaagagagtgagaaggatggtgtccaatcgggagtctgctcggcgatcgaggaagagaaagcaagctcacttagctgatctcgagtcacaggttgaccagctccggggcgaaaacgcatcgcttttcaagcagttgacggatgccaaccagcaattcacaacttctgtcacggacaacagaatcctcaaatcagacgttgaggccctccgggtcaaggtgaagatggcggaggacatggtggcgcggggggcgctgtcgtgcgggctcggccacctgggcgggctgtcgccggcgctgaacccccggcaggcgtgccgcgtccccgacgtgctcgccggcctggactacgccggcgacgaccccttcacggccgggctgtcccagccggagcagttgcagatgcccggcggcgaggtggttgacgcctggggctgggacaaccaccccaacggcggcatgtccaagtgaaactactggtcctacttctatgtcagctcagctacgtttgaaacgtgatgtgtccaagtgaacggacttgagtttttcagagtcctcgtgtcgaagtgtcatgcactcttccctattcctgtaatagaactgactagctaagagactgaaagtctgaaactacgaagtataaatgtggtggaatttggaactaaaaaaaaaaaaaaaaaaaaaaaaaaaaaaaaaaaaaaaaaaaaaaaaaaaaaaaaaaaaaaaaaaaaaaaaaaaaaaaaaaa

SEQ ID NO: 21234 - DNA, 2059 bp, Oryza sativa
  Clone ID: TF_OsC14251_1
tgtcacttcgtcgctctcgaggccggcgttttaaacgccccccccacacggctcctcgctgccgacacctgtccggtttcctctcctcgcctcgccgcggcgcccgcgtcctcctcaccaacgccagagctccacatcccacctctcctcaggttcccgtctctgatccctcgttgcgttacggggaagcaggcgtggtggttgctccccgtgcggagttttcgattggtttggttgggtgagtttggtgctggggtgttggggattggttggttggagtttggagatggattttccgggagggagcgggaggcagcagcagcagcagcagctgccgccgatgacgccgctgccgttggcgaggcaggggtcggtgtactcgctcacgttcgacgagttccagagcacgctgggcggggtcgggaaggacttcgggtcgatgaacatggacgagctcctccgcagcatctggacggccgaggagtcgcacgccgtcggcgccgccacgacgacgacggcgacgacggcgtccgtggcggcggcggagcacgcggcggtgggggcgccgcccgttcagaggcaggggtcgctgaccctcccccgcacgctcagccagaagaccgtcgacgaggtctggcgcgacatgatgtgcttcggtggcggcggcgcctccaccgcgccggccgccgcggagcccccgccgccggcgcaccggcagcagacgctcggggagatcacgctgaaggagttcctcgtgcgggccggcgtggtgagggaggacatgtcggtcccgcccgtcccgccggcgccgactcctacggcggctgctgtacctcccccgccgccgccgcagcagcagacgccgatgttgttcggtcagagcaatgtgttccctccgatggtgcctccgctctcgctgggaaatgggctggtctcgggagctgtcggacacggcggtggtggtgccgcgtcgttggtttcgccggtgaggccggtctcgtccaatggcttcggcaagatggaaggcggggacctgtcgtcgctgtcgccatcgccggtgccgtacgttttcaaaggtgggctgaggggaaggaaggcaccgggcatcgagaaggttgtcgagagaagacagcggcggatgatcaagaacagggagtctgccgcgaggtcgcgccagaggaaacaggcatatatgatggaattggaagctgaggtagcaaaacttaaggagctgaacgatgaactccagaaaaagcaggatgaaatgttggagcagcaaaagaatgaggggttaggtggcagcatttaatgagccgacaagttggaccgacagcaaagagaatttgccttcggaggactctgacgggtccatggtgatcgaagctaaaggcctagttacctgtaactagaacacagtcctttcaatgtgagcagtgatcatagtagttgtaggatggtgaagctgaagacctggttacctgtaactagaacacagtcctttcaaagtgagcagtgattacagtagtagtaggatggtgaagctgccagttacctgtaactagaacacagtcctttcaaagtgagtatagtagtaggttagttcagaatcgccagatcgatctgcccttgtaggccaaccattagtccgtgggcttgtctcttgggcggacaggctgcctgagatattcactcgataggttttagttgtctgagttatatccaagcattgtatgtaacctatttaaccatggtgcctgctacctgtattgtattttgctgctgtaggaacctatgtcggtgttaccatcttgttcttaatttgtgtacttctcttgccattttggataagatgtatctgaacttatacatatgtacttttccttgccattttggacaagatgtatctgaatttacatgaacccattttggacaacgtgtatctgaatttatatgaaccatggcactgggctgtgtgtgtatactgtatagcattgtgccaaatttgtgagaaacggattgcttatcatggataacacttggacaagatgtatctgaattt

SEQ ID NO: 21235 - DNA, 622 bp, Oryza sativa
  Clone ID: TF_OsC1713_4787
cccacgcgtccggagagagagagagagagagagagagagagccagagacaagcttagcaacaacaaccaaaagcaaggagcactaactgcagctgttggcgatcgaattaaggatcctgcagctacaagcaagaaggtgcaggtgcagggtgcggccatggcgaactaccaccaccaggagtactaccagatggcggcggcggcagcggtggcgtggccgagggagccggacagcccgcagctgagcatcatgagcggctgcagctccctcttctccatctccaccctgagggacgacgacgacggcggcggcgtccgcctcgccggcgccgcgctgcccgccacgccggtgtcgctcgccgggatcgccggcggcgccagtacccccggcggcgacgaggtggacatggaggtgcggcagcagagcggcggcagcggcgacgaccggaggaccatccggatgatgaggaaccgggagtccgcgcttcgctccagggcgcgcaagagggcgtacgttgaagagctagagaaagaggttcgccggctggtggatgacaacttgaatctcaagaagcagtgcaaagaggggtcaggcatgagagaggatattgtgtgtaggtga

SEQ ID NO: 21236 - DNA, 1881 bp, Oryza sativa
  Clone ID: TF_OsC87823_1
aatgaaactaatttagtgttataaatataaattttaaagaagttttttttttttttttttacaaagttactgttccttgccttgtaaagaatatgggcccatatacccaagtaaaaagggtaggttacatttcatttagtttggtctccacaaatttcaattctaaaaagtgtttagcgatctcacaaggtttgaggttggcatgcagcacaacacccctatgttacaacactgctaaaacgtggtacattggtctcacctagcaagcttccatgcctgagcagggaacagcaattggaaacggtattttgagtagtagatggtcacctgaatatactgaccaaattgacacctaacactgtactgccgaatgttatgtgagtagtagcgtgagcttgcaaaatccccaggccgcatgcgcgtagtctctcctctgtgacagggaaaatggcagattagcttgcagcaacaacatcagtggccgggccggagccgaggagttgtcgaagcttgggttcagcatgctctgtgtgtctgacactcgtcttgttcgtgttgtcgatcattgacaaaaagttctccacgacgcgaggagaggaggctgtggtggttttctgcagagatgtttctgcctgggtcgatgctgcaggatccttaagcttccccattagagccgaattctccagcctgagcttctcggagctttctgatagcctactgatttcagatctaagtgacgtgttctctgctgtaagtgattctacttgtgtagccagatcctccgtttcagcctgctttctcagccttgatcgtctggcggattccctatttgattgtttcctcttttcacgctttaattccctttcatccttgatcagtaattctgttgatactcctgtatgacttggaacaatcacaccaggcggtggagatattggtgtgcccaatgccctcgaattagcaacattagtagcactgggcctaattacttgagctggaaagctgtgatttggcaaaatcgcagtacttcccaatatatggctgggaggtaaagcattttccatctttgcagctgctgatgtttcagcaccagctccatcatccaatctccgtttcctgccagtcttgcccacctttagatcatttacatcactagagccttctgcactgtaatccccactagacgtcattgtttttttactgtcaccactcccagtggatactgcagccccatcaacttccttaagtttcttgttggagcctttttccttactgcttgcagacttggctggttccatgctcaatggatttgccatcatgggcataagagggtgtggataagctccaccgtgtgggtacattgcagcatacggggtcccaaaagggggtggcattataggctgaggaccccacatatatggtggaggagcatggcctgaagctattgctggggcaaaatatgtcggtggtaagacaccagggccataatatgcctgaacagcggaccaatcaggaaatggacatggagttggttgatccttaggaggggaggttgttttcccaatcttttgtgtagcaacagcttcatcatgagccatgccttttatgaaagcctgctgtcttcaattcaattgcctcttgtagagagatttaaggaagagagccacttagaacatgctcgctcgccggctccgtaccggaggagccgcacaggggttggaggagtcgcgaaggagagggagctcgccgccgcccgcgcgcgcgtgccgggaagcgagacggcggtggaggagaccctcggaggaagcacgcggagagagagaggagacgtgaaagccagattgatctccaatgagcgccctcggccgggtgcctcctgcc

SEQ ID NO: 21237 - DNA, 1080 bp, Oryza sativa
  Clone ID: TF_435945
cggcgagcagccagatgccaagatcctccccgcggctactcctcccatgtcggacgaccacagcggcggcggaggcgagcagcggcaatgccggcgagggttcgcggtggacgtggtggagctcggtgcggccctggctctggccgacatggccggcgccgccgtcaaaccggccatgcagctgcagctgcagccgaccgccgctcaggaggaggacgaggagatggcgaccacgaggctgagccttcagctcggcaacaacgtcggcagcatcatccagtcctcctcctgctccagcagcggctccagcgccggcctccccgcgccacccgccgccgccgccgcgccggccaccgcctacggcaccaagcccctccacatgctcaccgaggaggagaaggaggcgaagcggctgcggcgagtgctcgccaaccgggaatccgcacgccaaaccatactccgccgtcaggctattagagatgaactggcaagaaaggtcgcagatctgtcaacacagaatgagagcatgaagaaggagagggagacagtgatgcaggagtacctctcactgaaggagacaaacaagcagctcaaagaacaggcacagcatcatctttcgctttccttgttctaattaatctcttagtagtataatcttcttcttttttgttctcttttactacaaaattattattactcctaccattctgaggccaaagagagcccaagagaatctactctactctactctaccatgttcccaaatccaaacctccagttactttaatccctaatcccttttctcttttacttgtactacaaattaagctaagtaccattctgagttaaggccaaattaaagagaatctactagcatgttcctccatttgccacatgactgcactttactgctgctactggtcctagtagtggtcaaatcaatttggccattgctgtacggctgtagctagctgctggcgaattgggaactgaaaatgtttttattggatgctctggcacttgtgtagtgctgtgtatgtgccacactgacatctgtaatggatataaccattttttcta

SEQ ID NO: 21238 - DNA, 1424 bp, Oryza sativa
  Clone ID: TF_OsC39545_1
atggagcaaactttggacgtacctagatcgttgagactactggcgccaaaagctcaacaacaaatggatgaattttggagggatcgacaaaaggagattgaaacaacaaaggactttagcgagcatgcgatccctatggcccgcttgaagaagatcgtatcttctcaaaagggtaacatgatgatgacctttgacatgccagcattcttatcgaagatgtgtgagctcttcgtacaagaacttgctgtgcgtgcatgggcatctgctcaatcccataatcgttgcatcatactagacacggatattgctaaagccattgcctccacagagtcttatgactttcttgttgatatcctccataatcatcgtgtgaaacacaaatccactccttgttctacacttactacaaagcgttgtaggttagtcgatcaaccttccacatctcacatgccctaccaacatcagctgccacaatttgctcctacatatactccggccatccctattactcctagtttaatgccaccaatttctcactatataccgttccaatatccatccttatcacaagaagtgtccccgatgatggcttctgcacccatagtgaatagatcaatgttgctcattcacaacatagcaaggggtctaggcttacaaggaaacaatatcagcacgttcgccaacaataatatcccagacaatattgttggttgtagtagccccacagttcttgcaagtatgatgagtcctgctttactagaagttgcagggacatcactaaatccaccaaactctcattccatctgcacaatgaacatgatcaactcgagtgatcctagtggatctagtattggtgacattaatgttgcaaatcaagcaagtcttgctccctctggacgttttaaccctgctatccttcgagagtcatcatgtccttcgttcttatatagtaacaatgacacaattgttgctataccggagggtgtagatattagtggcaccatggatgttgctagtgatgttgctgctatagttatcaatggtcaagaagaacatgagagggaaacaaatgttgagcatcatcagcaaaatgagatatatgaaagcattgatataggaataatcaatgcaagtgttgcggatgataataaatatagtattagctgggatgaattgggaatggctgatgattcattgctagacaaatttttggaggagtttcaagtaagaaatgacggtgttttgcgcactgggattgagttgcatgaagacccattccttggtgacgtgatgttagcaaacccaagtacaagcaatgccaataagtaatttagttggcaagttttgtttatatctcttttgtaagaatgaggttgtaactttttcttgttgaatataatgttgtttgtttgcagaggcggacc

SEQ ID NO: 21239 - DNA, 792 bp, Oryza sativa
  Clone ID: TF_LIB4830-003-R1-N1-A5
ccggccgggaacctcacatatattgtgttcatcctcataccaccaaccaattagtgccagtagcacatttctgcagttgtagttcaagtaaggtatatcattcagagcaacaaagggaagcaatgaagcaaactttggatgtacatagatcgttgaggccaccaatgccaatggctcaacaacaaatggatgaatcttggagggaccgacaaaaggagattgagatgacaaaggacttcagtgagcacatgatccctatggcccgcttgaagaagatcgtatcttctcaaaagggtaacatgatgatgacctttgacatgccagcgttcttatcaaagatgtgtgagctctttgtacaagaacttgctgcgcgtgcatgggcatgtgcccaatctcataaccgatgcatcatactagacatggatattgctgaagccgtagcctctactgagtcttatgactttcttgttgatatcctccacaatcacagtgtgaagcaaaaatccactccttgttcttccaccaagcgttgtaggttagttgatcaaccttctacatctcacattccccaccgacatctgctgccacagtttgctcctacatatactttggccatccctattactcctagtttaatgccattaatttctcaatgcacaccatcctcttttccatccttgccacaagaaaagttcccattgatggcacccacacccattgtgaatagatcaatgttgtttatcaataatatagcaaggggtctgggcttacaagggaacaatatcaatgcag

SEQ ID NO: 21240 - DNA, 1379 bp, Oryza sativa
  Clone ID: TF_OsC36885_1
ccggccgggaaaaaagatcaatcatcctatagttgctcccctatttcagcatctcaatttaagaaaggtgtgaaggcatgccgatcccggaaaaggacggggtggaggacaatcaagaggatgatacattttcaaggttgcaattgcttgcacaacaacgacatgccatggagaagttctggaggatgagccaggaacagatcgaagaatccgcaggcaacgaagagcttatactgccgatttcccgtgtcaagaatatcatccatgcaaaggagggtggtatgatgttatctgctgataccccagcttttgtaacaaaactttgtgaacttttcgtccaggagctcatccttcgtgcttgggtgtgcgccaactcacacaatcgtgaaatcatacttggcacagatattgctgaggcaatcaccaccacagaatcctatcactttcttgctaatgtagtccatggccaccaggcgctaggaagcaacataccagagataggggtttctgcttggaagcgccataagctagatgaaatgacctcactctgccatcctccccaagcagtgcaggtcacagatttagctaaccatccacccaatattcctgtttgtcctcctataggtcaatcgggtactcagcacacaacatctacacatgttttgatgatgcaaggagaatctattcacaaggcaagtaaagaaaaatccccactgaaggaagtgatggtgccgaccaacaaggtgggcatgaccaacagctcttatggagttcctaatggtggtggtgctactagtagtaaagttgttattgatagcccgaaaggcgaaacagcacaagttttctcttcccagcatgcatgtccttccctagaagataactatgttattcccattcctgctggacatggtgatagttttcgtactcttgatgaggccaatataccccagctacatcaggagcagaaaaactttatttcacaagatgctattgttggtgaaaacattccgctgaatgagtctttggaaaagagcaagcataaggatgaggacttactttttcctgacaaagatcttcctgagtgatctacaagacagaagatgaatgttcatgacaatactaggaatacaaataagcaacgaactgaagaaggatgcatcctggttaatccatcgaccatgtcttagtagagttttcttctgtgtttctgtgttgaagctttatgatttaccttatactttagtcaagatgaataagaaataagtatgtgtttccgtgtgaggcggtaatatgtagtaccttgtatttccatccatcttcgtatggacaataataataagacctctgtttgcttcatgataaaaaaaaaaaaaaaaaaa

SEQ ID NO: 21241 - DNA, 983 bp, Oryza sativa
  Clone ID: TF_OsC321147_1
cccgggctgcaggaattggcacgaggccaaaccaaatattttgaactctccggactccggccgccgccttccagaggaacgtcgcggctgccggtgccggtgccggagaagacatggccgggaagaagaaggccctaacaaatcccgcctctccctccgcctccgcctccgcttccacccctaagaaatccaccgccacctccaaggaccgctccacgccgaaaccccgcaaaaaccccaaccccaaggaggaggcaccaccgccgccgcccgccaacaacaagcgcctcaacccccaagggggatccaaccgtaagaagaaggccgatgcggggacgccctccaagaagccgaagcgccagccgccggagcccaaacctcggaagcacaagggggccaagagcgagaagccgcaccgggtttccggcgaaggggagaagcccacgcccacgaagaagaagaagaagaaggagagcagcaaggagcccaagcgcgagaagcagcaagcgtccgcgcctatgtcgactccctcgaagaagaacaaggaagccaaacgcgacacaggaggagcggggaagcccacgcccaccaagaggaagctcggcgacgtggatcccccacaggagcgaccgtccggtgaaggccaggcaagctctcccacgcccgccaagaagcggaaggacaaggcggcggcggcggaggcggttgccgaccacggcgccggcagcttcccgatggctcgggtgcggcagataatgcgggccgaggacgccaccatccgcccctccaatgaggctgtcttcctcatcaacaaggccaccgagatattcttgaagaggtttgcagacgatgcttatcgaaatgctttgaaggatcggaagaagtcaattgtgtatgataacctttattttgttccacagaaagttacagctgaagatgctttgaaggctccagttagcagccaagtgaaccaaccacaataa

SEQ ID NO: 21242 - DNA, 453 bp, Oryza sativa; identical to SEQ ID NO: 11610
  Clone ID: TF_OsC353113_1

SEQ ID NO: 21243 - DNA, 1295 bp, Oryza sativa
  Clone ID: TF_OsC44121_1
ttttttttttttttttttacattttttttttcatgccagcacttttgagtattggattagaaactgatgaaaggtaaggtacagttactacattagttgcaaatcacctaccaaatcacaatcttttttttttctactgctgccatagcagagcagaactaacattaggaaagcctaagacctaatcagattacccgtttcagccaacaatcatgggaatagttttgacaagagcactgagttttagaggccctaagttcacaggacaatgtatatcaatgtcacaacttcactgtatcatctttagctactttctggcagagagtgctgctcttcaggggcctcttcctgttgctcttgaggctgctgccacacatacgtcaccgggtgaccttgctgtccaccgtacatcattcctgatccaggcccctgctgcgctggcacgtagtaatatggatatgtgtctgctgcgccccccacattaggcggtaggccaaccctcggaagcccaagcccttcttctttcatttcatccctgggaactatgtccaccaagaagtcatagatatcagtcctggtgatggcagctgcaatgtcattcttctgcaaggtccggcgcttgttctcctccgtgtgcatccacgacctcaatgttaactctaatatgaatacctcgcatgcctttgcgaagacaacgggggcttctgccgagatcatccggacatcctcatcagccttcattatcttctttatccttgcgagtggcaagctgtggttcttgaagtcggttgtttgctcaatctcttccatttggttagcccagaactcacggagttgctgctgttgctgttgctgcagctgctgatgaaattgctgggcttgttggtagactagctggtgctgagcactgagttgagctggattagtggggaatggtgctgatggctgtgagccaggaggaacaacagcaggagctccaggaaccatggcttgaggtggatatgcagcagcaggaggaggatatgcttgtgacccaccagtggcaacacccatcacaggctgaggctgtgaggatggttccatgtcagctcttgtccgtccaaagccaaaggcccgagagacgacgcccggatctcccgcgccggcgggagcgggagcggcggcggcggagagcgctccctccggcgaagggccgcgccgcccacctccctctcgtggagccctcggcgtcggcggcggagagagagagagagagggagacgcggtcgccctcgggccgattcctgcagcccggg

SEQ ID NO: 21244 - DNA, 1055 bp, Oryza sativa
  Clone ID: TF_OsC179782_1
aatggagcccgcatttcccaacggaggtgcggctgctccaccaccgcccatggcggcggagcagctgccgccggcggcggcggtggtccgggagcaggaccgcctgatgccgatcgcgaacgtgatccgcatcatgcggcgcgtgctcccgccgcacgccaagatctccgacgacgccaaggaggtgatccaggagtgcgtgtcggagttcatcagcttcgtcaccggcgaggccaacgaccggtgccaccgcgagcaccgcaagacggtcaccgccgaggacctcgtctgggccatggaccgcctcggcttcgacgactacgtcccgccgctcaccgcctacctccgccgcatgcgcgagtacgagggcggcggatcaggtggtggtggtggtggtggccgtggcgccgccgccgcccccgccgtcgtgccgccgccgccgccgccgcctcccgaggacgcgttccgctacgtgcaggtccatcatcccgtgtacgcggcgccaggtgagccggtgcaggggtacggttaccccgtggccatgtcgtctgctctgccggcgccgcacgtgcacgtcggcgtccgcggcggcgggcagcacgaggtgttcggtggcgggccggcgcccctggctgtctactacggaggagcgccgtacggcgaggccagcagccgcggcggctgctctgccgccgacgaggggagctcgtcgtcgagcgcctcgccggcgccggtcggccccaactatgagtaaaaacaaaagaagaagaaaatcaaactcttccccggctgacaggtgatcgagctcgtcgtctacaaattatcaatcgtctgtcgatcgattagcatgtaatctaataaaaaaacttaagctagcttaagacttaattagacatgttctgttcatctttccgccaccgtttcatcgaaagagattaagaatgtggtagtagctagaaatcatttcgagctcgaattacttaatcgtgttgattaattgcaatgatgaactaacaagaggaaatgatgtagtagtattaaaaaaaaaaaaaaaa

SEQ ID NO: 21245 - DNA, 971 bp, Oryza sativa
  Clone ID: TF_OsC117223_2
ggcgtacgcccacgccttcccccctctctctcctctcctctccgcgactccctccacccccgcgcgcgcgcgttttttttttttcgtaagggtttttggagggcggcgcggggatggcggacgcggggcacgacgagagcgggagcccgccgaggagcggcggggtgagggagcaggacaggttcctgcccatcgccaacatcagccgcatcatgaagaaggccgtcccggcgaacggcaagatcgccaaggacgccaaggagaccctgcaggagtgcgtctcggagttcatctccttcgtcaccagcgaggcgagcgacaaatgtcagaaggagaagcgcaagaccatcaacggggaagatctcctctttgcgatgggtacgcttggctttgaggagtacgttgatccgttgaagatctatttacacaagtacagagagatggagggtgatagtaagctgtcctcaaaggctggtgatggttcagtaaagaaggatacaattggtccgcacagtggcgctagtagctcaagtgcgcaagggatggttggggcttacacccaagggatgggttatatgcaacctcagagcaattttcacatattggtagttctgcaatcttttgcattcccatacatgtatcaggtggcacaaatctattgcaacaaatatgaagtgtcaagggagcaaatatgggatacccctcagataatggaactctccccatggataccgtacaccataaaccgtatttggaaagagactcatggtagccaggatattcgtattcagggaaggccgcgcgaggctgcaaatagcgctttggactggcaatggccatcaaagcactcatcgctggctagcaacttctatggtacacgagtggtgggaggccatcatgagtaccagagaagcaccaaaaaggacactacgcacgttaactttgctagtggcctgggagatctaggatga

SEQ ID NO: 21246 - DNA, 941 bp, Oryza sativa
  Clone ID: TF_OsC91871_1
gatcaaatctagaattaaatttactcagattcaaaaatacccaactccaactatgtcaatcgtcataacgtgcagatcaaaataattaatcactacaaaaattaaattggacgtacaagaattattcatataaaatcgatcattttgcatactccgattaattactccatatccatcatgtcgccgggccatcttagctgctagcttcttcatcctaacctcatcttccatgtccttcaatcaatctcagcacatccatccccacctagctctcaagattaggaggaaaggttgggtgttgggtgagaagaagacgacgcaaagaacggtggctagaactgcctggagctatccgtcgacctgtccatggcgttgaacatgaaatgaccggcggtggcggcggcggcggaggaggaggaggaagggtggtcggggcccgcggcggcgccggcgccggagcgggaggtggcggcggcggcggcgcggtcgccctcgagctcgcggtacttgttgaggtacctgcgcatggggtcgacgtagtcgtcgaagccgagggcgccgaaggcccagcagacgtcgtcgccgttgaccgtcttgcgcttctccttgtggcacttgtcggaggcctcgccggtgacgaagctgatgaactccgagacgcactcctgcatcgtctccttggcctccttggagatcttggcgttgggggggaggatctgcttcatgattcgccccacgttcgcgattggcagcaacctgtcctgctccttgatgatctccgccgccgcctgatccgccgcctccccctgcagctgctgctgccggcgatgcccgtcggcgtggtggccgccatggtggtcggccatggctaagctcgagctctctctctctctctctcttcagtggtggtggtggtgagttcttgggctagtggaagcgct

SEQ ID NO: 21247 - DNA, 1864 bp, Oryza sativa
  Clone ID: TF_OsC210306_1
atgttatcctctatgttcctcttcctcctccctctctcccttctctctttctctctcttgggcaatctgtgggcaggggcggcgacgtcggcgggcgagggctggagcagcgtcgggctgcggctcatgctactaggaggtgctactccatttttctacattaacatcgagacggtgatcatcaccaacatgaactactacccggaggggtccaacccggtgtacttcgccgtgctcgtcaagtacgaggacctcgacggcgacgtcgtgcaggtcgacctcatggagtccaagtcggcgtacggcggcgccatcggagtgtggacaccgatgagggagtcatggggctccgcatcggcagtgacatcggcaagaccctttgtcaccaacaacgtcatcccagccatctggtctcgaatcgcgccatcactgcctccgtcaccccttccgcgccgacctcgttccgcgctcgcccactgccgcgcctctcccgcctcggtctctccctctgcccgcgcctccccgacgccaccctcgccgcgctcaccgccgcaccgtccatctcgcagtcgacatctcctgctctcggggattcctgctgctgcgcttgtcgttgcatgcccgaatctgaatgatctcgacttctccaatgaccactatggctcgacctcaggaatgcggcggcggcggaggtggccaagttgtgtggggttttgggggggttttggcgatggagatggtgatcgttattccatcaccttctctgcatatattgtagtgttaagaactcaagaggcatatgtgcagatcctacagcagttgcataggagtacatctttagaaatggacccacattcacacaagaaggcacatgaaggtctgattggtgacaaccctgacgcgtatgccgtgacgacataccaacctgtgctgatggtagaaccatcagccgctgctgccttccctccagctccccaggttgctccagcctatccagtgaacccaatgcagcttccagagcatcagcagcacgcaatccagcaagttcagcagctccagcagcagcagaaggagcagctccaggcgttctgggccgaccagatggccgaggttgaacagatgactgagttcaagctccccaacctcccgcttgcaaggatcaagaagatcatgaaggccgatgaggacgtcaagatgatcgcgggcgaggcaccggcgctcttcgccaaggcctgcgagatgttcatcctggacatgacgctgcggtcctggcagcacaccgaggagggcaggaggaggacgctgcagaggagcgacgtcgaggcggtgatcaagaagaccgacatcttcgatttcttggtggatatcatcactgatgataagatgaaggatgatggcatgggctctcaggctgcatccatggtttcgccatatacctcaggaggaatgggattttcctttgatctgtacccgaaccagcatcacctcgcatatatgtggcctccacaagagcagcaggagcagtggcctccacaggagcagcaggagcagaagcagaagcaggattctgatggtggtggacaagatgaatgagataaatcacattctgtgattacttattgtcgtagtgtggtttggttagcttgagtttggttggaaaaactttttttttccgtagactgtttttatgtttgttttgctgccttctggtagcgataggagggcgatccggtctgaaactgttggtagcattcatgatgaatttctcagtggttataatttatgaatcttagtaacagctgttgcaagaacaaatatttcctctggttagaattgttttttaaaaaaaaaaaaaaaaaaaaaa

SEQ ID NO: 21248 - DNA, 817 bp, Oryza sativa
  Clone ID: TF_OsC265473_1
taattttttttttttgaatttgaaacccaactttgcataaacttgtgtcagcatcacacctgcttgcgtaatagagtttagaaaagtttctttattcatagattctgaccttgtgatcgccatggcgactggcctctctccctgagccaaacctctgggcactattcagctccggtgcatcgccggcgacggcgtccttgccggtgagcctctggacgacggacttgaagtcgtcggcggtgtcggcctccacgtacaccgtctcgatgatcttcacggtcaccggcttcgcttcatcctcccgcatgcagttggcagtggtgctctctggatttttacggaggaggaagaagaggtcgaggtggtttgcattggcgtctgctctttgggccccgtagttgacaagcgatgatccaggatctccattaagtacaacatctttctttactggcagttcagaagctcttgaaccctttgtgtcaccctcccggtagagcctgaggtagagcttgagaggctcgacatagtcctcgaatccgagcgtgcccattgaccagatcaggtcgtccccattgatggtcttgcgcttctccttgaggcacttgtcgcttgcttcgctggtgatgaagctgatgaactcggagacgcactcctggacggactccttggagtccttggcgatcttgccgttctccggcacggcccggcgcatgatgcggccgatgttggcgatcggcaggaaccggtcctgctccttccctactccgcctccgccgccgccgccgccgttctccgtcccgtcgaacccctccgacat

SEQ ID NO: 21249 - DNA, 618 bp, Oryza sativa
  Clone ID: TF_OsC68950_4
ttactgcggctggacatagtagtaggccatggggtcggtggcgggcaaaccggcggcggggtgggggatcccggcggcaacggcggcggcggcctcggcgtccttggcctcgtcgcggggcacgatgtcgacgaggaagtcgaagacctcggtgcgggcgatggcggcggcgatgtcggacttctggagcgtgcggcgcttgttctcctcggcgtgcgcccagccgcggtgggtgagctcgaggatgaacatctcgcacgccctggcgaacacgacgggggcctcggcggcgatcatgcggacgtcctcgtcggccttcatgatcttcttgatgcgggcgagggggaggttgtggttcttgaagtcggtggtgtgctcgatctcgcggtactgctccgcccagaagttctggagctgcgcggcggcggcctgctgcgaggcggcggtggcggcggcggaggcggcggcggcggcggggggaggcggggcgtagagcggcggcgcgtgggcgtagggcccgacgggtggggggtaggctcccgccggcgggtaagggacgggggcgcccagcacggggggcggaggaggcggaggaggggtggtggatttgggctccat

SEQ ID NO: 21250 - DNA, 1231 bp, Oryza sativa
  Clone ID: TF_OsC26303_1
tttttttttttttttttttttttttattgggaatcagagtaaaattgctaccattacagagagcatctatttctcaatagtacaacacgctagttcaggacgaaatacaacatgaatatttatgcctcccaatacagattatatggaaccgaatgacagccaaagaccaattgttaaattatcctgaatatacatacaacaacagagctagaccacgaaccgaaactatcctcacggggagtaatttacatctgagaagcagccttggctcgacgcttccaagcagcatcagttcctggttgacaaacatgggacctagaggtggtagcaagttacttccttcactgctcaccatgaggtgtaggtatatatattagctaacgactgcagcaccaaataaaatccacctagcaacagttgcatgaaaaggtcctatcttcagtttgagacatccccattatggtactgaggttgcatataacccattccttgattgtatgctgcttgttggcccatcccttgggcacttgaactgcttcctccatgagaaccaagtacatcctttttcacagagccatcaccagcctttgcagttaatttactatcaccctccatctctctgtacttctgcaggtagaccttgaggggctcgatgtagtcctcgaagcccagcgtggccatcgcccacagcaagtcgtcgccgttgatggtcttgcgcttctccctctggcatttatcgctcgcctcgctggtgatgaaggagatgaactcggagacgcactcctgcacggtctccttggcgtccttggcgatcttcccgttggccgggatggccttcttcatgatgcggctgatgttggcgatggggaggaacctgtcctgccggacgcgtgggccacccccacccccacctccccctcctccccctccccccctcgggctcccgctctcgtggctcccccctcctccccccgggctccccggcccatccgccatcccacctcccccctccttatatagaagcgcgggcgcgcgcggagagggcgcgacgtggagaggagagagaggggggttgggcgcgaggtggtgaagcgaggaggagagagagagagagagagagagagagagggggggggagaggagagagagaggaagcgggggtgggaagcggagcggaggtgaggcggagaggcgagagggggagatcggacgctggagaagagaagcggcc

SEQ ID NO: 21251 - DNA, 1032 bp, Oryza sativa
  Clone ID: TF_OsC83094_1
cggcacgaggcgcctctctctcgatccatctcccccctctctcctctcctctctctctccgttcccaatctgcggaggcggaggcggagctagggcgcggcgtcgccggcgaggagttccgcaggcgcggtgtggacggggctcctctgcttccgcacacggcgggcggcgacggcgagcagggttggaggggcggcgcggcgacctcctcgttcctgccttgcctgcctccatctggtgttggaaatatcataagttttgggacaagcaagagaggacatggagccatcatcacaacctcagccggcaattggtgttgttgctggtggatcacaagtgtaccctgcataccggcctgcagcaacagtgcctacagctcctgctgtcattcctgccggttcacagccagcaccgtcgttccctgccaaccctgatcaactgagtgctcagcaccagctcgtctatcagcaagcccagcaatttcaccagcagcttcagcagcagcaacagcgtcaactccagcagttttgggctgaacgtctggtcgatattgaacaaactactgacttcaagaaccacagcttgccacttgctaggataaagaagatcatgaaggcagatgaggacgttcgcatgatctccgcagaggctcctgtgatctttgcgaaagcatgtgagatattcatactggagctgaccctgagatcatggatgcacacggaggagaacaagcgccgtaccttgcagaagaatgacatagcagctgccatcaccaggacggatatgtacgatttcttggtagatatagttcccagggatgacttgaaggaggagggagttgggctccctagggctggattgccgcccttgggtgtccctgctgactcatatccgtatggctactatgtgccacagcagcaggtcccaggtgcaggaatagcgtatggtggtcagcaaggtcatccggggtatctgtggcaggatcctcaggaacagcaggaagagcctcctgcagagcagcaaagtgattaa

SEQ ID NO: 21252 - DNA, 903 bp, Oryza sativa
  Clone ID: TF_OsC1960_1
ctccgaggctttttccttccggccgggatcacaatccaatacaagttcacaacataagcatagtacaggtcattgagacttgagagagcatggcagggaacaaaaagcgtggtggcaggaacatggatcaggtcaagaaggcggcagtgagatcggatggggtgggaggtagtgcgaccaacgccgagctgccgatggccaacctcgtacgcctgataaagaaggtgctcccagggaaagcgaagatcgggggagcagccaagggtctcacccatgattgcgcggtggagttcgtcgggttcgtcggcgacgaggcctccgagaaggccaaggcagagcaccgccgcaccgtagcgccggaagactacttgggctcattcggcgaccttggcttcgatcgctacgtcgaccccatggatgcctacatccatggttaccgtgagtttgagagggctggtgggaataggagggtggcgccgcctcctccggcggcagctacaccgctgacgcccggtggaccgacattcactgacgcagagctgcagtttctccggtcggtgatcccctccagaagtgatgatgaatatagcggctcatcaccagccataggcggctatggctatggatatggctatggaaaaaatatgtgaacaacttgatgcatgtgtgtgtgtacactgcatgcatgcgtggagggtcaaacagagtcaagactcttgtggtggtttcaataagtctctagtgacaatataagttgtgtatcgttgtttcctttgtaaaaaaaaacgtcatgtatcgttgtgtgtcctcatccggtaatcctttacgtgggtgggttatgcgagaaaaagaaaatgacgttgcatcaaataaaatgcttgatgtttgcgtatttactgtatc

SEQ ID NO: 21253 - DNA, 1092 bp, Oryza sativa
  unsure (1)..(1092): unsure at all n locations
  Clone ID: TF_OsC197894_1
atggaggccggctacccgggcacggcggcgaacggcgctgccgccgacgggaacggtggcgcgcagcaggcggcggccgcgccggctatacgtgagcaggaccggctgatgccgatcgcgaacgtgatccgcatcatgcgccgcgtgctcccggcgcacgccaagatctcggacgacgccaaggagacgatccaggagtgcgtgtcggagtacatcagcttcatcaccggggaggccaacgagcggtgccagcgcgagcagcgcaagaccatcaccgccgaggacgtgctctgggccatgagccgcctcggcttcgacgactacgtcgagcccctcggcgtctacctccaccgctaccgcgagttcgagggggagtcccgcggcgtcggcgtcggcgtcggcgccgcgcgcggcgaccaccaccatggtcacgtcggtgggatgctcaagtcccgcgtgcagggctccatggtgacgcaccacgacatgcagatgcacgccgccatgtacggtggcggcgcggtgccgccgccgccgcatcctcctccgcaccaccacgcgttccaccagctcatgccgccgcaccacggccagtacgcgccgccgtacgacatgtacggcggcgagcacgggatggcggcgtactacggcgggatgtacgcgcccggcagcggcggcgacgggagcggcagcagcggcagcggtggcgccggcacgccgcagaccgtcaacttcgagcaccagcatccgttcggatacaagtagtaacaagcagcagaatggcgatcggtctgcacctgcatgcacacgtatcgcatgcagatcgagctagtagtgcaactggctaacttgaaccagttaaaaacttaagacttagtgatcgtgtgtggtttaattaatttgctacgttcaggtagtgatcgatgagattttaatttcctactgtcagtttaattcaccgttcatgtactcgatccagctagtactactcctagttacccttgttctaatcttaacgcaattgtgtcgatcggacgatcgcacgtttatcttcaagtggaatttgtcttataacnntaaaaaaaaaaaaaa

SEQ ID NO: 21254 - DNA, 1457 bp, Oryza sativa
  Clone ID: TF_OsC712_1
ccctcctttattccccgtctcctccgcgtgagctcgccggagcaccgccggccgatcccccccacccccgccacgcgagcagcgccgctcgcgcggcctgctgcccccgcctcaccctcgccggtgaacggcgcatgcccccccgacgttaggtgtcgcgcctggagacgcggagatggatccgatggatatcgtggggaagtccaaggaggacgtctccctccccaaatcaacaatgtttaagattataaaggagatgttgccccctgatgttcgagtggcaagagatgcacaagatcttcttgtggaatgctgtgtagagttcatcaacctcctatcttctgaatccaatgaagtttgcagccgagaggacaagaaaactattgctcctgagcatgttcttagagctctgcaggatcttggctttagggagtacattgaagaggttcaagcggcctacgaacaccataagcatgataccctggattctccaaaagcaagcaaattcactggtgtggagatgacagaggaacaagctgtagctgagcaacagaggatgtttgctgaggcccgagcaaggatgaacaatggtgccgccaaaccgaaggagccagaacctgaagcgcagcaacaaacacaacagccaccacagcctcagctgcaccctcaaccacagcaacccctgcagcctcaacttcagctccatcctcaaccacaacaacagccctcacagctacatcctcaacagctgctgcatcctcaatcgcagcaaactccgcagcctcaacctcaggtccaccctcaaccacagcagcctccacagctgcaaccgcaacctcagcttctccagcaaccgcagctgccccaacagctgcagccgcaatctcagctccccccacaaccgcagcagcccccacagctgcagctgcaatctcagctccacccacaaccgcagcagcccccacagctgcagccgcaacctcagctccatcagcaaccgcagccgcaggcagagctgcaatcacagtcacaaccacaaacagaacatggcttggacagttcatgattcagattccatgttgtgtagcctcagtataaggaaaagttggtgtacttccgctggcatttactaggactctgtgtgccccttgatagctttaggtttccatgcttcatgtacaatgtaaatccagtgtgatttcagttaccatgttgctaataatctgaagctctcttttgtcactgatgttattacttttccaaacaccctttctctgactctatgactgtagtagtatcatggcatgtatgatgccttgtcaaaagggactccattagcagtgtaacttgactttttccggtggcggttgtggtttccgtggcttttttaaaaaaaaaaaaaaaaaaaaaaaaaaaaaaaaaaaaaaaaaaaaaaaaaaaaaaaataaaaaaaaaaa

SEQ ID NO: 21255 - DNA, 2814 bp, Oryza sativa
  Clone ID: TF_OsC1528_1899
ttcattctccgacatctggcgcgccaggtagggggcgcgttccctgtcaactgcagaccttatcgctattctccgttacaaaaagacgagattgagaaacaggtgaaagaaatgattgatgctggtttaattacacctagtatgagtccctatgcatcacctgttttacttgtcaagaaaaaggatggtagttggcgtttttgtgtggattacagaagattaaatgctctcaccattaaaagtaagtttcctatgccggttgttgatgaattattggatgagctctcaggcactaaattcttctctaaactggacttgaaagctgggtatcatcaaattcgaatggtggaaactgatgaagccaagacagcctttaagacacatcatgggcaatttcagtttagggttatgccatttggtctcacgaatgcaccctccacctttcagtgccttatgaactcagtccttgcaccatttatcaggaagtttgtgttggtgtttatggatgatatcttagtttatagccctgaccttgatagtcatttgcatcatcttcagcaagtttttgttattttgaggcagcaccagttgtttgctaggaggtctaaatgctcttttgcttgcactcaactggaatacttaggacatatcatttctgacaaaggagttagtactgatcctgagaagacagcagcaatgctggcttggcctgtgcctacttctgttactgaattgaggggatttttgggactgacaggctattacagaaaatttgttcagggttatagtatcatagcacgaccattgacactcttgttgaagaagaaggcctttctttggactgatgctgctcagcttgcttttgatcagttgaagacagctatgagtaacactccaatgttagctttgcccaattttcagcttccttttactttggagactgatgcatgtgcttatggtcttggtgctgttttaagtcagcagggtcaccctattgcttattatagcaaaactttgggccctgttaatcagaaattgtccatttacgaaaaagagtttctagctattatgatggctgtggataagtggagatgttatctgcagagaggtccatttatcattaaaacatatcacaaaatcttgtgtcatttggatgatcaaatattggggactgaattacagcaaaaggcaatgactaaattgatgggtttgcaatattcttttcaatacaagagaggggttaataatattgttgctgatgctttatctagaatgccttcctcctctcaattttgtgctttttctgtggtccaaccgatctggattcaggagatgatcaattcttatacagtggatcctcaagctcagcagctactagctgagttggctgtgcattctcctaattctcaagggtattcattgacacaagggattattagattccagaataagatttggattggatccaatgcaggactgcatactaagttgattcaagcttttcatgcttctgcacttggtggccattctgggattgctgctacttatcatcggattaagaaattatttgcttggcctggtctcaagttggatgttgaaaattttgtgaagcaatgtcaggtttgccaacaggccaaacatgaacactgtcggcttcctggactgttagctcctctcccaattccaaaagaggcctggcaggacatctccatggattttattgaaggtttaccgcgctctgatggctataatgcaattttggtggtggtggatcgttttactaagtatgcgaatttcattcctttgcgtcatccattcactgcatcacaagtggctcatctggtggacaaaactgtatttaaaactcatggcatccctcgttctattgtgtctgatcgtgatcgtctctttactagcaagttctggacaactctttttgctacttgggacactcaattacagatgagcacagcatatcacccgcaaacagatggccaaatagagcgtgtcaatcagtgtttggaaatgtatttacgatgcatgactcaggctaaccctaagaagtggagccattggattcatttggcagaattttggtacaatacaaattatcatacatatcttggctgttctcctcataaggctctttttggggtggatcctcattattctcaagttcctgatctgacattggctactctgcctgatgtggtggatgttcagactgaaaggcagcacttgtctgaatttttacagcagcagttaactcgagcccagctgcgcatgaagaacaaggttgataaaggtcgttctgaccgtgtttttgctgtgggtgatgctgttttcttgaagttacagccttatgctcagtcctcagtagttaatagaccatatcctaagttggcttataagttctttggcccttttactgttttggagcgcattggagtggcggcttatcgtttggatctacctgccagcagcactgtgcatccggtgtttcatgtttctcaactcaaagctcaggtgccagatcatactcctgtttatacttctttgccatcccaagtggttcttgatgctgctgacgttgttcctgaggcgattttggagcgtcgactagtgaagcgcagcaatgcagctcatgtccaggtgttgctgaaatggtcttcattaccagcagatcatgctacttgggaggactatcatgttgtgaagactcgctttccagatgctccagcttggggacaagctgaaactcctgcgggcggcactgtcatgaccggcaatggtgacactgagaaagaggtttaa

SEQ ID NO: 21256 - DNA, 3453 bp, Oryza sativa; identical to SEQ ID NO: 11626
  Clone ID: TF_OsC351798_1

SEQ ID NO: 21257 - DNA, 4362 bp, Oryza sativa
  Clone ID: TF_OsC113064_1
gggggaggattagttttcttccttttcattcatgatgtcttccccaccgagtggtcccttgtcttatagaccttacagctaagcaacagcatgagctcgcaggcccaacaacccaacataactcatgtgagcgcgcaggcccatttcactctattcctggaacgctactgtagctgtccatcacgactactgtggcgcgtcgcactgaataccatcagctgtgacagtaccgcccgccaaagatgcagcttgtccccaagctggcgcagaagggaatcgtgtcttcaacacatcataatcctcccaggtggcatcatcagcagacagagatgaccacttgataagcacctgaacatgagctgcattccccttttttaccagacgcctgtccagaatcagttcaggccacacatcggcagcatccagtacaaccggtgtgggtagagaagtaaacactggagtgtgatctggcacatgagctttgagttgagacacatgaaacacaggatggaccgcactgccttcaggtaaagccagacgataagctgccgacccaactttctccaagatttgaaatggtccaaagaacttgaatgccagtttgggatatgggcgattcaccaccgaagactgagcataaggttgcaagcgaagaaagacatgatcaccaacagaaaaggaacgctcagatcgccctttatcagccttatgcttcatacgcaattgtgctcgttgtaactgttgctgtaaaaagacagacaactgattgcgttcagaaattaagtccaccacagaatgatgaactgaggacagcagcaccggcacttgactgatatgaggttccactccaaacaaagctttgtgaggggaacaacccaaagatgtatgaaaagatgtattataccagtactcagccaaatgcagccaactgttccatttggtgggagtagcttgaatcatgcacctcaaatacatctcgagacactgattcactctttcggtttgcccgtcggtttgaggatgatatgccgtactcatgttcaattgagtgttccatactttaaacaaatcaccccaaaaacgactagtgaacactttgtcatgatccgacacaattgactgtggtaagccatgggtcttaaacacaaatttatccactgtgaccgctacttgtgaagcagtataagggtgtctcaaaggaatgaaactagcaaatttagtgaaacgatccaccacaacaagtataacagtgtaaccatcagatttgggcaaaccttcaataaaatccatcgagatgtcgatccaagcttctttcggtactggtaaaggaactaacaacccaggcaatcgacaatgctcatgtttagcttgttggcagatttgacactgtttaacaaagttgaatactgcagttttcagaccaacccaagagaacaactttttgagccggtgataagtggccatagtgcccgagtgaccaccaattggagaggaatgaaaagcagtgattaacttagtctgcaaacccagattagctcctatccaaatgcgaccatgatgacgaatgagaccatcagtcaaagaataaccctgatcattaggagaatggactgccaattctaccaataacttctgagcctgagtatccacagcatacgagtttaacacttcctgcaaccaaatggggctagccactgacagagcagataagtgagactgaggaggcactcgagacaaagcatcagctaccacgttctccactcctttcttatactggaaagtatattgtaaccccatcaatttagtcattgccttttgctgtaaatcagtccccagaaccaggaactctttttcatatatagaaagcttctgattagccactcccaatgtcttgctataatatgcaataggatgattatgctgactgaggacagctcccactccaaacgcacaagcatcagtttccaaaataaaaggttgggagaaatcgggcaaagccagtacaggagttgaactcatagcaagtttcagcttctgaaaagcctgctgagcatcatcagaccactggaacgctttcttctgtagtaagacagttaaaggttttgccaggatactataatttttaacaaactttctataataccctgtaagccccaaaaaccctctgagttctgtcacattggcagggactggccaagccaacatagctgcagtcttagtaggatcagtactgactccttgatctgaaattatgtgtcccaaatactccaattgagaacaggcaaaagaacacttggaccttttggcatataacttgtgttgtctcagcagttcaaaaacttgtttcaagtgtgtgagatgagacggtaaatcaggactgtacactagaatatcatccataaacaccaaaacatacttcctgattaagggtgcaaacactgaattcatcacacattgaaaagtagaaggggcattggtcaacccaaacggcatcacatggaattgaaattgaccatggtgtgttttaaaagcagttttatattcatcatcctccaccatccatatttgatgatagccagctttcaagtcaagtttagagaagaaacgagtaccagcaagctcatcaagcaattcatcaacaataggcataggaaacttacttttcacagtaatagagttgagtttgcgataatccacacaaaaacgccacgtgccatccttctttttaaccaataaaacaggagaagcaaaagggctcatactgggagtgatcaacccagaatcaatcatgtccttgacctgactttcaatctcatctttttgcaaaggagaataccgataaggtttgctattcacaggagctgaaccagggaaaagagtaatagcgtgatcataaactctgtgaggtggtaaactgtgtggatcttgaaaaacatcagcaaactcatgcactaactgagaaacagcaggtggaactgaatcagcagaagggaagtcagctgtttccagcagtgcagctgcccatatatcacaccctttttgacacttaagaacctgagacaaagacatagcactcaactcagtttggggaggagaatcagggactccctgaagttcaacccaagtaccctgatacataaacttcaaagttttgttggcccaattgcaagacatatcaccccactgtgccaaccagtccatccccaaaatagcatcatgtccacccaaaggaacaactctcatatcataagtgaaagtacgcccttgaaaccaccaagtaaactgaggaaccataaactgacagtgtatacaatcaccattagctactttaaccagggagggagcaatgggctgcaactgcaatcccaagagttgagcaaagttatagtccaagaaactatgagaactgccagagtcgaccagtaagagcaacaccttattctggaccaaagctcggagtctgatagtgttcacatgactagcaccagacagggaattgagtgaaatatgacaattctcatcctggtcagagtcttcttcagcagtcactgcattcaaaagatcatccggaatcacttcagtaacttgcatagctttaatctgaccacccagcgcacactggtgctcaggagaatatttatccccacatttgaaacaaagaccattggctcttcgataatcccttaactgtcgagccttccatagttctgctcgttcaggcttaatagcaggagtatcagtaccaccctgaggcaactcccctttggtaggcaatggtttatacatcaatcgcttagattgcttagtactcaattcaagtagaacactctcttgcatcaatgccacagcagcagcttgctgaactgtggtaggcaactgaaccatcactgctcccactgatggatcaaatacacggatctgatagacaagagaatcaaattgatgcttatattcagccacagaacctgcctgtcttaaagtttgcagagcctgaatcttctcacgttgcgaggtgctctcaaactcacaaacaacagcatgtcgaaactgagaccaattagcaacttcctccacgagcttaaacgattgataccactgggcagcattccccgacatgtgaagaacagctgctgaaacttgaaatacaggaggaatctggtacatcggttctgaagccatggcttgcttgtgcagctgcgccgcctgcacttgctccttctgcaaagcggccacagcatccatggcgagatccaccttggtagcgacttgatcaattcggccgctctgcttggttaacttgtcgtccaaagcctccatacacagcgtgagggagtccagcttctcgagaagcttagcctccat

SEQ ID NO: 21258 - DNA, 3177 bp, Oryza sativa; identical to SEQ ID NO: 11629
  Clone ID: TF_OsC321575_1

SEQ ID NO: 21259 - DNA, 4265 bp, Oryza sativa
  Clone ID: TF_OsC136280_1
atgccggctcgcaccaggtccgttaacagtttggatagtgtggatggatttgacgctagagctgagatcctgcagcttaggcgggagatgacagatctgagtaatctgagaggtgagatgggagaaatcaaggaccttttgaagagtatttgcacagctctacctggatttcactctgctggtgcgagtactagtgggacggctggtgcaggtggatctgcagggacccaggctatggctggtgcaagtgtatctgcaggagcacaggctgctactgggacaggggctttgattgcaccattagttccccctggattttcatcagtggcaccaattttatctacgggaggaatgcagtcaggagtggctctacctcaaactgctgatgagactcaggtaaactcaactaatgcaattccttccagtcagatacatgctggtatgggaagtgtttttccatcaacaagtcttccaccaatttttccaatacacatgtctggtgctgttccttctgttggacatgtgaatttttctattgagccaaacactgttaacccaaattttgcaccaatattcacctcagcaccaatattcacttcagctactagaactcaggctggtcatttacctggggggttaaatatacatggagtggagtctcaggaggatgtgggaatgaatcattatggaatagaaacaaaccagccatggaggtatccgcagatgcagccaacagccagacctcatctgaatgctacagggatacatatggcaaatggaggaggacctgtttggccagaaggacccagacatctgtttggtgggatgcctaatccatatgctgacatgacactaagaagccagaggttggagttaacaatatttaatggagaagatgctattgggtggttacaacaatgcgagaagttctttgaaatgacaggaacaccagtagagcaatgggtgaatttagccactgggcacttggtaggaagagctgggaagtggtttagaaatcttgggataccatggcattatattaattggccccaattttacttgatgatttcagatagatttactgaggcaaatgcacacgaagctgtggagcagttgcagaatgtgaggcagactggttctgtcatgcattatattgataaatttgaggatagtgttgcattggttaaaagggatcatccctatctgattgagtattatattttgagctgctttattgggggtcttagagctgatatcaaacatgatcataagtgcaggacagggaaggtgatacatatgatggaagaagtagaggatgaagaagaggaatcaggaagtcctgaagaaaaccaggaaggggaatatcaaacagcacctggaagtcctgctaagaaagaagatgataatgaagaacaactgatgcagatttctactcatgcaatacagggtacatatggaatcaatacattctctttgattacctatgttaaaggaaggaaagttgtggcattggttgacagtggtagcactaataccttcatgaattatgaatttgcattgagaagtgggtgtgaaatcatagaatttgaccacaatagagtcatggtagctgggggaggaatacttaattccacagctaaaaccgaggtgatccagtacaaggtccagggatatcttttcggtaaagcattccagttgattcctttaaaggggtatgatattgttttgggggcagactggatatatgagcacagtccaattaatttggacttgaagcagagaactctgacaatgaacaaaatgctggacaaaaatgttatggggtttgtaattgaagtacatactctcaagactttggagatggagaatgtgccagtccctgattctgtagcaactatcctagctggatttgcagaggtttttgctgagcccaaggggttaccacccagaagagaatgtgatcatgctatcccacttaagatgggagctgaaccccctaatcagagaccatatagagtaccacaccagcagaagaatgcaatggaggaaattataaaggaactcctggagtctgaagagattaggcccaatttgagtccttactcttcaccagctgttatggtcagaaaaagggatggcagctggagaatgtgtgtggactatagacaattgaatgcaagaactattaagaacaagtttcctatgccaattgtagaggacttgctagatgagttgaatggtgctaaggtattctccaaactggatctgagatcaggcaaaaatctggaagagcatgaaaaacaattgcagtgtgtcctatctattttgagatcccacaagttatatgctaagaggagtaaatgcacatttgcagcaccaagtgtagaatatctggggcatatagtatcaggagaaggagtggcaaccaagcccagcaaaattaaagatgttctagaatgggcagtcccagtgaatataactaagttaaggggctttttgagattgacaggttactacagaagatttgttcaggggtatggtgctatctgtagaccactacatgatttattaaagaaggataatttccattggggtcctgaacagcagaaggcttttgaccaactaaagaagattatgactacttgtccagtattagctcttcctgatttcagcaaaccgtttgtattggaaacagatgcttgtggttcaagcattggggcagtactaattcaagagggcagaccaatagcttattatagcaaagctctggggcagagagcagcagggtcatccacttatgaaaaagaagcaattgccattttggaagcacttaaaaaatggaggcattatttgctgggtaatcaagtgattataagaattgatcagcagagtcttaagtatatggctacacataaactttcagaaggaatacaacacaaattattgctgaaactcctggagcttgactataacattgaatataaaaaagggaaagaaaatgcagcagctgatgcattatcaaggagagacaccaaagaagtggaagagaaggaaaaatgctatgcaatcacattggtctatcctgaatggatagaggatgtgaagagcagttatctaaatgatgcccaatatatgaaattggtggatggggaggaactaaatgaagaatctagcaatttttctttgggtgctggaatactaagatacaaaaacaggatatatgttggcagtactactaatatcaggaacaaactgatacaagctttccacaaatcagcttttgggggtcattctggagttaaagtcacttaccaccgaatcaagaagattttctattggccacagcttaagaaggaagtggagaaaattgtctctgaatgccccacttgccagattacaaaagctgagcatgttcattctcctggtcttctagatcctctgcaaatacctgaaatggcttggacacatatttctatggattttattgaagggctgccaaagtctcaaggcaaagatgtcacaccgtatgaagcactatatggtgtacatccacctcagaatggggagcaagctatccctggaaatgtaactgaagaaatcagaatcactgctcaacagagagaagagttgatgttgagattgaaagataacttgttgagggctcagaatcgaatcaggaaatttgcagacagacttaggtctgaaagaagttttcaggagggagacatggtgtatctaaagatgcaaccttatagacagaacgcttttggcttgaggggatcgctcaagtttcgtgcacagttctgtgggccatttagaatcctgaaaagaattgggaaagtggcttaccatctgcagttaccggaggaagctggaatacatccagtgttccacgtaagccagctgaagaaacatgtgggaaatttggttgtaccacttcctaatcttccattggtggatgaagatggtaacatcaagactgaacctgtcgctgtactagcaagaagggtagttccaagaagaaatgagccggtcactcaatggcttgttcactgggaaaatctatctcctgaggatgctacttgggaggactctgcttttattcaagcaacgtttccacattttcgaccttgaggacaaggtcgtgctcaaggggattggattgttagagatggagatttcagagaagaaatggagaagagtttcagaagtttcatttaaaaattcagaagttcagagttagagtgggataccggttgggtgac

SEQ ID NO: 21260 - DNA, 4550 bp, Oryza sativa
  Clone ID: TF_OsC22007_1
atggccgagcccaccatcgccgacctcttgaaggagatcaagaacatgtccgccgaactcacctccctgaaggccgatatggcgaccatgaaggacaaggcctcgacggccgcaagcaccgagactcgccaccctgatgggttgcgcgacctcgacctgcctccccggcccaagaagtgggattttccccgctacgacggcaccacggatccgctgctcttcctcaacaaattcgaggcgtacttccgtcaccaccgtaccatggccgaagagcgcgtcggcatggcgtcctaccacctggacgacgtcacgcagacttggtacacccagctgctcgaggatgagggaaccccgacgtgggggcgcttcaaggaactcgtgaacctgcgtttcgggccacccctgcgttcggccccgctcttcgaactttccgagtgccgacgcacgggaacagtggaggaatactccaaccgcttccaggccctcctgccgcgcgcgggtcggctcgacgagtcccagcgcgtccagctcttcaccggcggtcttctgccgcctctcagccacgccgtccgcatccaccatccggagacgctcgccgccgccatgagcctggcacgccaggtggagttgatggagcgtgatcggccggcgccacctccactacgtgctccgccgcgtgggctgctacctgcgcctgcgccacggctcgcgttacccgcgcccgcgcagcagttggcgctgcctgccccaccagcggccgccccacagggtcgcgacgcggccaacccacggcgcctgacgccggaagagatggccgaacgctgccgccaaggtctgtgcttcaattgcaacgagaaattcacccgtggccacaacaggttctgccgtcgcctcttcttcgtcgacggggtggagatcgacgacgtcgcaatcgagggtgacgcggcggccgccgccggggatacggaggcgcccgtgttctccctgcatgccgtcgccggcgtgcccatcgcggacacgatccagctccaggtgaccgtcggcgatgcctccctcctcgccttgctggatggaggctcgacgcacagcttcatcggtgaggaggcggcaaggcgcgccggcctcccgatccagtccagcccgcgcatgacggccatcgtcgccaacggcgaacgcgtggcctgccctggtgtcatccgggacgcggcgttcaccatcaacggctccacattccacaccgatctctttgtgatgcccctcgcaggtttcgacgtggtgcttggcactcggtggctcggcacgttgggtcccatcgtgtgggacttcacctcccggtcgatggcgttccagcgagacgggcaacgcttcgcctggaagggcgtggcctcgacctcaacaacgcacctgcgtaccctagccgcggccagtgggacgctcctggatgagctcctggtcgcctatgaggacgtcttcggcgaaccgacgggcctcccacctccacgtggccgcgaccacgccatcgtcctcaagcctagctccgctcccgtggcggtccgtccgtaccgctacccagcggcgcacaaggacgagctggaacgccagtgcgccgcgatgatcgagcagggcgtcgtccgccgcagcgactcgcccttctcctcgccggtcctgctcgtcaagaaggccgacggctcgtggcgtttctgcgtcgattaccgcgccctcaacgccctcaccgtcaaggacgcgttcccgattcccgtcgtcgacgagctccacggcgcccgcttcttcaccaagctcgatctgcgatcggggtatcaccaagtgcggatgaggcccgaggacgtccacaagaccgccttccgtacacacgacggcctctacgagttcctcgtcatgccgttcgggctgtgcaacgccccggcaacgttccaggcgctgatgaacgacgtgctccgaccgtttctgcgacgcttcgtgcttgtcttctttgatgacattttgatttacagtgagacttggaccgaccacctgcggcacctgcgtaccgtcctatccgtgctccgtcagcaccggctcttcgtcaagcgcagcaagtgcaccttcggctccccctcggtgtcctacctcggccacgtcatatccgaggcgggcgtcgccatggatccggccaaggttcaggctatccacgagtggctggttccccgttcggcacgggcggtgcgcagcttcctcggcctcgccggttactaccggaagttcgtccacaactacggcaccatcgctgccccgctgacggccctcaccaagaaagacgggttctcctggacggaggacaccgccgctgccttcgacgcccttaaggcagcggtgacttcggcgcccgtcctcgccatgccggacttcgccaagccgttcaccgtcgagggcgacgcgtccacccacgggttcggcgctgtgctggtccaggacggccaccccgtggcgttcttcagccgccccgtcgtgctgcgtcatcgtgccctcgctgcctacgaaagggagctgatcggcctggtgcacgccgtacgtcactggcggccgtacctctggggccggcgcttcgtcgtcaagaccgaccactactccctcaagtacctgctggaccagcgcctcgccaccattcctcagcatcattgggtgggcaagttgctgggattcgacttcgccgtggaatacaagccgggcgctgcaaacactgttgcggacgccctgtcaaggcgcgacacggaggagggcgccatcttggcactgtctgcgcctcgctttgacttcatcagcaagctgcatgacgcgcagcgccaggacccggcgctcactgccctccgcgacgaggtcagcgccggcacgcgcacgggcccctgggcgctcgtcgacgacctgctgcagtacaacagctggttatacattcccccggcatcgcccttagctcgggagatcatcgaggctacacatgaggacgggcacgagggtgtcaagcgcaccatgcaccgcctccggcgcgagttccacatccccaacatgaagcagctcgtccaggactgggtacgctcctgcgcagtgtgccaacgctacaagtccgagcacttgagcccggccggcctcctgctgcccctgccggtgccccagggcgtttggaccgacatcgctctagatttcatcgaggcgctaccacgagtgcgcggcaagtccgtcatcctgacggtggtggacaggttcagcaaatactgccacttcatcccactggcgcacccgtactccgccgagtccgtcgctcaagccttcttcgccgagatcgttcatctacatggcgttccgcagtccatggtgtcggaccgcgaccccatcttcacctcgacgttttggcgcgaactcatgcggctgatgggcaccaagctgcacatgacgacggcattccacccacagtcggatgggcagtccgaggctgctaaccgggtgattattatgtacttgcgttgcttgacaggggaccgtccacggcaatggctgcgctggctcccatgggcggagttcatcttcaacacggcgtaccagtcctcgcttcgggacaccccgttccgggtcgtctatggcagggatccaccctccatccgctcctacgaagcgggggacacgcgggtcgccgccgtcgccaaaagcatggaggagcgggctgagttcctctttgacatccgctaccggctcgagcaagctcaggcggtccagaagctgcactatgacaagcaccaccgccacgttgcataccaggtgggcgactgggcgctcctccgcctgcgccagcggcccaccacgtcgctccctcagtccggcacgggcaagctgaagccccgcttctatgggccataccgcatcaccgagctcatcaacgacgtggccgtccgcctggagctaccggccggcgctcgtctccatgacgtgttccacattggcctgctcaagaagttccacgggccgccaccgggtgcaccaccggcgctgcctcctctccatcacggcgccatcgcccctgagccggaacgtgctgttcggtttcgtttggcgcgaggcgtgcgccaggcccttgttcagtggaagggcgagtctccggcttcggcaacttgggaggacatcgaagttctccgtgccaagtaccctgcccttcagctcgaggacgagctgagtctcgaggaggggggagatgtcatgtgggggaagacctacaccaggagacaccgagccagagatgtgcgccgggcagcagaacgtgcgggcgcacgcatggacgcagaacgcgcggtgatcgcgggcacggcgcatgcaaccgaggatgaagcgatcagcgcaagtggctgaagttggaaagctatttttagttgttaagatattatttgctatctttgattagttccttgaatcgaggagtttgtttcctccgttggttagggccgatggccatatattccctgtaaaccgaaaagattagggaggcaagatcaattacctgctctcct

SEQ ID NO: 21261 - DNA, 1836 bp, Oryza sativa
  Clone ID: TF_OsC448_2
atggcgcgtgggaagaatcacccggacggggaggaggaggaggcgccggcggcggcgggggaggaggaggcgccggtggagatggacgaggagggggagatggaggaggaggaggaggaggagcagggggagggggagggggaggagagagacgaaggggaggaggaggaggagtgggaggatgcggaggaagtggaggggggagaggagagcgagcaggcggcggcggaggaggaggattcgccgctggtggtggtggaggccgaggcggcggcgcctgtggtggatggctccccgccgaagctggcggaggggtactacgagatcgaggacatccgccgccgccgcctccgcaaggggaagctccagtaccttgtcaaatggggttctcaatgggagggtggggcatgggacctcgcagccccggagctgtcaggaaggataagaacagaggactggaaagaccaagaggaaataacttattgtttgcctaaacaagtgcgtgttgatgtggaccatgtggtaaaagtgcccaggttgagaatggctgtggacactcatattgccatatttgggacaatacacctctacgagttcagctatgaagaccaagaacaggattgcgttcagaagaagcagcagtacggcaggcgtggatggccggaaagtgctaacacatgggagcccctagaaaacctgagtgcctgctctgacattattgatgctttcgagatgcggttacaatctccaaggcccggtcggaagcgtaagcggaagataacaactactccagtagcaggctcaaacccatctcatggtaaacggggccgccctcgcttggatgctaagtcccacactcgagctcctgcaccagaacctaagcaactgccctgtcggacaagttgtaggagagcgactaattgtagtagtaagacagttgcagggcttgatgcgtcagggagtgtggtgaggaaccagcttgcacagaacattgtacaggagggtagttccagtgtgatttcaaggacaccatgtcaggagctaccgctctcaattaggttgacggaccaacaaaacgagcatcaccttgtgaatggttcgtctaattctgagaacttagtgaaggtacctccatctcagggtggccaggtaactggtgccaagaagcgtaaatctggaaatgtgaggaggtttgagcagaataaaccaacacaaggacaaggagaatgtggagcattagtggtggctgaggatgttggttccactgaaggagaaactggcgataagaaaaagacagagggctgtcctaaccgagttcatatcaccaagatcatcaagccagtgcgatttgcagcagctgtgaacaacgatgtgcagcaagtttcaattacattcaaagcactcaggtctgatgggcaggaagtcatggtggacgacaaagaattgaaagcaaataatcccttgctgcttattagctactacgagcagtgccttcgttataatccgacttcgtgagagatgaactgaaggaactgggtttagctgcctgtgtatttaattagcatttgtgtgtttagaagcttgtagctctatgggcttgataatttagtctggtcttgcagtaggttgctaaatgcaagaaatgtattgcttggtctccccactgattgcttattcgcgccatcttatgtgtaacattttgaacagtggggagatatgtgtaatctatgcttagggatcttatgtttcttttctctatgtttagttatttgggatcgtcgtgacctgcatgcaaaaaaaaaaaaaaaactcgagactagttctctctctctctcc

SEQ ID NO: 21262 - DNA, 3807 bp, Oryza sativa
  Clone ID: TF_OsC346257_1
atggcggcactgaaaaagcaggtggccgatctcaaaggagtgaggatgttggaccaacagaggaacatttatctgggtcaggcaggagaagggaatcagtacgctgaggctgtcctcaaggggccaagattagaaatccctctgttcagtggagaagatccaatagattggcttaagcagtgtgagaagttttttgagattacgggtacccctctggatcaatgggtgaatttagcggtggctcatttgaatggcagggcattgaaatggttcggaggaattggtctgccatggcaagtgatagcttggccacaatggtgcagcatggtctgtactcgattttctgctgcgagtgaacatgaggcaattgagttgttccaaaatgtgaaacaatttggaacaacagtggagcaatatattgacaagggggtcctctaggtggatttagtaaagagagaccacccttatctccaggagcaatatctgaccagctgtttcattgggggattgagagcagatattaaatacgatgtgtgtgggctgctaatgccagaaaaatggtgggaaatttcaaccgaaacaggaatcagaatccacttggaggtaatcaggggcggaatgctaaccataggggacaaaacagaggtgagggagataggagagaggaaaagaagtgctggttctgtaaagaaccttggtttccaaggcaccagtgattatgcccttaggaattcttatcccttgaaaaatactgacacaaagaaagtagtagttgctggtggtggagaacttaagactgatgtcatggtgccagacatcagctatgagattcaaggagaatgctttactaaccaatttaagttgcttcctctcaagggatatgatattatctggggtgctgattggatctataattatagccccatttcgctggatttgaagcaaagaattttgggaattacaaagggaaacaaagtaatactcttacaagatttcactaaaccaaataagcactttcagatcagtggtaaaagattggagaaaatgttaaagaagggggctcttggtatggtgatacaagtcaatgtcatgtctgaaactgtggaggaagaagggcatgttatacctgaagacattagtgacattatacaacaatttccagctgtgcttaaagaaccaaaggggctaccacctaagcgagaatgtgaccatgtgattaatttacagagtggggctgtaccacctaacatcaggccatacagagtgccacattatcagaaggaagcgatggaaaatattatcaatgagctgattgaatctaaggagattcaaactagtgatagtccctattcatctcctgctgtgatggttcgcaagaaagatggatcttggaggatgtgtgtcgattaccgacaattgaatgcacagactgttaagaacaaattcccaatgccaatcattgaagacttgttagatgaattaaatggagcaaggatattctctaaactagaccttcggtcagggtatcaccaaattaggatggctgagaaggatgttcataaaacagcatttagaacacatcttgggcattatgaatatcaagtaatgccattcggtttgacaaatgaccctgccactttccagtcacttatgaatcatgtcctagcaccattcttaagaagatttgtgttggtgtttttcgatgacatattaatctatagcaaaacaagggcagagcatctggagcatgtgaagttagtaatgcaagctttgcaagacaaccatcttgtaatcaagcttaaaaagtgtgcttttggacttgcaagtgtgtcttacctaggacatgtaatctctcaggatggggtggctacagatcccaagaaggtggggaaaattaaaaattggcccacacccaaggatgtcactgatgtaaggaaattcctggggatgacaggatactaccgaaggttcattcaaggctatggtaccatttgtagacctattcatgacatgctgaaaaagaatgggtttcaatggggagcagatcagaccacagcttttgagactctaaagcataagctgagaaccagccctgtcttggctttgccagactttgatcaagcattcaccatagaagcagatgcttgtggagtcggcattggggcagtactaatgcagggagggcgacccattgcatttttcagtaaggctttgggacccaaggcagctgggcaatccatatatgagaaggaggctatggctattcttgaagctcttaaaaagtggaggcactatgtgttgggcagtaaattgatcattaagactgaccagcaaagtttgaaattcatgatgggtcagagattggtagaggggatacaacacaaattgttgctaaaattgatggagtatgattataccatagagtataaatctggaaaagaaaatttagtggctgatgctctgtccaggctaccacaaaaggaagctgttgcagacaggtgtcacccaatgactgtggtgatacctgagtggattgtggatattcagaggagctatgaaaatgatgtacaagcacacaaaattctcagtttgattggtactgcagcagatccagatagagaatataagcttgaagcaggattgctaaaatacaaagggaggatctatgtgggagaagccacggatatcagaaggcaattgatcacaacctatcattcatcttcttttgggggtcactcagaaataccagatatggcatggactcatattactatggactttatagaggggctaccaaaatcacaagggaaagatgttattctggtagtggtggatcgtctgaccaaatatgctcatttcatagcattagcccatccatatgatgtggagcaggtggtagaggcgttcatgaacaatattcacaaactgcatggtatgccgatggtcatcatcactgacagggaccggatttttactagcagtctgtttcaggagattttcaaagcaatgaaggtcaagctgagatttagtactgcttatcacccacaaatggatggacaaactgaaagagtcaatcaatgcctggagtcctaccttagaaatatgacgttccaagaacctcacaaatggtattcatggctggcactagctgagtggtggtataacaccactttccacaccgcaattcagatgactccgttcaaagcaatgtatggttattctcccccacaaatcaatgaattttcagtgccatgtaacatatcagaagaagctagggtgactattgaagaaaaggaagcaatactgaacaaactcaagaatagtttggctgatgctcaacaccgaatgaagtattttgcagataaaaatagaactgaaagaaacttagaagttggggatatggtatatttaaaattgaaaccctatagacagtctgcatttgggatcagagggtctctcaagctaagatccaagttttatggaccattcaaggttcttcagaagattggccaattagcttataagcttcagttacctgatgatgctcagatccaccctgtgttccatgttagtcagctcaagaagcatctggggaagcatgctattcccatgtccaatttaccctcagtaggaccagatgggcagattaaaacagaaccactagcagttctacagaggagaatggtacccaggaaaggagttgctgtgactcaatggttgatattatggcagaatttgtctcctgctgaagccacatgggaagacgcatcagtcattcaagcaatgtttccatcgtttaatccttga

SEQ ID NO: 21263 - DNA, 4113 bp, Oryza sativa; identical to SEQ ID NO: 11644
  Clone ID: TF_OsC15548_1

SEQ ID NO: 21264 - DNA, 4044 bp, Oryza sativa
  Clone ID: TF_OsC65320_1
atgtcgattgctgaaggagaagttgtcaatctgaaccagaaggtggtggatctcagcacgaacctcgaccgcatcctgggatcgctaaagggtgtggaggcttggattccaagcgtcgacgctggaatgcaaggcctccggcggtcggtggaaggaatcaaggcgcgggtcatcaagctggaggcccagtcgtcgacggcgacgcctccgccaaatgggcaccgcgtggacaacaagtaccagggtgaagcgactgcggcagagtctgcccaggagcgaaccctggtcaagagtaagatccaaatccctcaatctgcagttaatttcgaagttggggagagttcagagtgggggattgggaattctcaatttggaacacaggggcctagattacctaaaactgaattccctaagtttgatggagataaccctaagttgtggaagaaaaaatctgaaaaatactttgacatgtatcaagttccttatgcaacttgggcctcctttgctacccttcacttcgtaggaaatgctgctctgtggttacaaacttatgaggaattacatgctgtagaaagttggtcgggggtgtgtgtagcagttaatgggaagtttggtagggataggtatcaacaattcttagagaaacttgataacttgaaacaagagggaactatagaggagtattacagtaggttcgaggagttgatgcataaggtactggtgtataataggggttatgatgagaccttctttgtgactaagttccttgggggtttaaaaactgagattaaggcagcaattaagctgcacaggcctggtactgttgatgctgcgttgtctcttgctaaaacgcaggaagagctattgatggaggtgaatttgaaggcatatcacaagaccactataaaggagtcgttcaagaataatttcaaggtgccaagtctagctaagggcatccttggccctccacctgatgagatcaagaaaactgaagaaaggcctaaatgggaagaacaatatgactcattgaatgcagctagaagagctaggggagagtgctttaagtgtggagaaaaatttggtccaggccataagtgtccaaaggctgttcagctccatgtcttggatgaattgcttgaggtctttcagttttctgatgaacctgggcaggtggaggagagtagcagtgatgaagaactgcttttatctgaaaatgctttgtttggaactgagggcaagcgtactatatggttgcaaggactgattcagcaggtcctcattttgattgattcaggtagctcaagcagttttatggcttctcatttggtggacaggttgcatctggttcccaatagcatacctagtgctctggtgatgataatagatggtggaaaattgttttgtgatgagatggctgagcaagttgagtggtggtgccagggtaatacattctcttctaacttcaagattctcgggttgggtggctatgatttgattttgggaatggattggcttgaggctcatagtcccatgtggattcattgggggcgtaagactggtatgcataaaaagggggtgatttcacagttaatccagctatgttccattcaagaaatagctgcaaaccaggaggcaattccaagggaaattgaggcggttttgcagcactatcaaggactgtttcaagaaccaacagaactcccaccacacagaacctttgaccatgagattcctttgttagatggggccaagcctgtcaacattaagccctacaggtatgctcctaaacagaaggatgaaatagagaaacaggtcactcaaatgttgcagcatggtgttatacagcctagccatagtccttttgcttcccctgttctcttggttaaaaagaaggatggtacttggcggttctgtgtggactataggggtttgaatgacattactgtgaaaaacaagtacccaatgcctgtggttgatgaattgttggatgaattgtcaggtttaaaatggtttactaaactggatctaagatctggctatcatcagattcggttagtggaaaaagatgagtttaagactgccttcaagactcaccaaggacattataaatttcgtgtcatgccattcggattaaccaatgcaccagccacttttcaggggttgatgaacactatatttgcacatgccattcgcaagtttgtgctagtttttgtggacgacattttgatctatagcaagaccttggctgaacatgtctgccatctgaaatcagtactgacagtgcttcaacaacatcagctctacatcaaaagaagtaaatgctctttttcacaaccttctctggaatatttgggacatataattggtgctattggggttgccactgatcctcagaaggttcaagctataagggactggccagtacctaaaaatcttaagcaattgagagggtttttgggcctggcagggtattatagaaagttcatcagaaattatggggtcatcactaagcctttgatagagttacttaaaaggggtaccttctttttctggtctacactggaacatactgcctttcaagaagtgaagcagtgtcttcagcaagcaccagttttggccatgcctgacttcaaccaacaatttgttattgagactgatgctagtgacaagggtattggggcagttctcatgcaggctggccatcctattgcttttctgagtaaggctttgggacctaaagcacaagggttttctacatatgagaaggaatgtttggctattctcatggctgtggataaatggcatcaatatttgcaatatgctgagtttgctatcctaactgaccacagaagcttgactcatctgtgtgatcagaaattgtcaacacctatgcagcaaaaggccttcctgaaattgttagggttgcaatggatggaagttgtggtcgatggttatcaccatgatcctgctacaaaacagttattggttgaattaagtttacatcctgatggggtcaacaatttcacattggttaatggcattatcaaattcaagggtagaatctggctagggaaacacgtggaagcccagcaagctgtcttactctccctgcacaatagtggcgttggaggccactttggtatagctgccacttaccaacgaatcaagagcatgtttgcctggcctggactaaaaagggatgtcaaggcttatgttcagtcttgtgcaatctgtcaacaagcaaaagccatcatctctgacagggacaggatctttacaagtgctttatggcaggaactctttcgactctcggatgtcaagttgaatatgagctcgtcttaccaccctcagacggatggccaaacggagcgtttgaatcaatgtttggaagcttatttgcattgtgctgtttattcttcccccgctctgtttgcccgtaagccaactagcttcggtgtgattgatatgggtcaaagtactatcccggatgtgcaacagttgcttgtcaatcgggcgaaattgaacgagttgcttcaccatcatctggttcgagctcaacagcgcatgaaagcacaagctgacaagcatcgttcaaaacgccagtttgcccctggtgatatggtttacttgcgacttcaaccatatgttcagctaaccatggccaaacgttcttgtcacaaattgagtttcaggtactttggaccttataaagtcctggaacggattggagcagtggcttatcgattggcattgccggctgggagcttgattcacctagtggttcacatctctttacttaagaaggcagtgcaacctgatacaccagtcagttcagatctacccctgacttgttctactgatgaagttgaagtctatcctaaagccattctacgtcgtcagttgatcaagcgtggtggttcttccattccttctgttctggtacgatggtcagggcttcctgatactcttgccacctgggaaaatttggccgacttatggcgtcgttttccatctgcgctggcttgggggcaagccagtccttaa

SEQ ID NO: 21265 - DNA, 4062 bp, Oryza sativa
  Clone ID: TF_OsC355669_1
atgtcttccaccgtcaccaacgtcgccgacgattggaagaagggtctcgctgaggtcctcgaccgcttggactccatccgcggcaagctctccgacctcgacaatgaacagcaggcgcaccacatcgccatccagcgtttggaacgcgctggccgcgatcgctcgccgcgccgtaacaatcgcgaccgtgacgacgaccacgacaatgacggccgccgcggtgatcgtccgccacgctaccacaagattgactttcccaaattcaacggccaaggtgacccactccatttcctcaatcgctgtgaacaattcttccagggccagcgcacgccggaggaggagaaagtttggctcgcatcctaccacctgctcgacggtgctcggcagtggtatatgcgcatcgaacgcgatttgggcacaccgacatggcgacgcttctccgacttgctcaatctccattttgggccgccgttacgccaggcgcctttgggcaaactcgccgcctgccgacgcaagactaaggtggccgcctacatcgaccgcttcctcgacttgctcgctcgcgctggccctctcacggaggagcagcaagtagacctcttcaccaccggactccaagaaccactcagcatcgacgcgtcctcttcagcggcgccgaccccgtcgcaaccggatgcagcttcctcggtgggacaagcgtccacacaggttgcaggccgcacggttcgccgcctgtcccagtccgagatggacgaacgccgacgcaaaggattgtgcttcaactgcgacgagctctacgcccgtggccacaaaaaggtttgcaaacgcctattccttcttgatttggcttatgatgatgatgatgacgaggtggaaggcgctgcaccggctgtcgaaccggagacgcttcgcatctctctgcatgcggtcaccggcgtccgtccgtccaacgccatgcatctccatgtccgcttgggcgacgccaccctccacgcgctcgtcgacacggggtcgacacacaacttcctgtcccaggaggccgcagcacgggtgcacttgccgctcgtccaacgcgctggcctgcgcgtgacagtcgccaacggcgacaaggtgccctcgccagggatgttccaggacgcgcgcatctccattgacaccgaggtgttcatcaccgacctctacgtccttccattgggcggctacgacctcgtcctcggcatgcaatggttgtcaacgctgggccagatactatgggactttggccaacttaccatgtctttttggcacaaagatcacatggttctgtggcgtggcctgcccacgggcgcttcaccggctgcgcacgtcgccaccacccgcgacctgctcgacgacctcctcaccgagttcgccgacgtcttcgccacgccatccggccttccgccaccacgccatcaagaccaccgcatcactttgctgcccgacaccgcgcccgtggcggtccgaccttaccgctactcggcgcgccacaaggacgaactggaacgccagtgccgcgacatggaggcccaaggcatcatccgccgcagctcgtctgccttctcctcgccggtcctcttggtcaagaaggccgacgggtcgtggcgcttctgcgtcgactacagggcgctcaacagccgcactgtcaaggacaaattccccataccggtggtcgacgagctcttggatgaactccacggcgcgcgattcttctccaagctggacctccgctctggttatcaccaggtacggatgcgcgacgccgacgttgagaagacggcattccgcacccacgacggcctctacgagttcttggtgatgccctttgggctgaccaacgcaccggcgacattccaatccctgatgaacgaggtacttgagcccttccttcgccggtttgtgctcgtgtttttcgacgatatattgatctacagcccgtcgtggtcatcgcacctacaacatctgcgcgccgtcttcaacacgctccgcgcccacaagctgttcgtcaagcggtcgaagtgctccttcggggacacctcggtcgcttatttgggccacgtcgtctccggccagggcgtcgccatggacgcctccaaggtgcaggcagtggtggactggcctcgcccctgctccgcgcgagctctccggggcttcctaggccttgcggggtactaccgcaagttcatcaacgatttcggcgccgtggcggctcccctgacacgcctgctcaagaaggacggcttcttgtggtcgccggaagccgaggtagcgtttggacgtctcaaaaaggcgctcaccacggcgcccgtcctcgccctgccggacttcgatcagccgttcatcgtggagtgcgacgcatcaggcacgggcttcggcgcagtgctgcatcaggatggaggacctattgcctatttcagccgcgcctttgcgccacgccaccacgccctggcggcctatgagcgggagctcatcgggttggttcaagcagtccgacactggcggccgtacctttggggtcgccggtttgtcgtcaagaccgatcacttcagcttgaagtacctgctggaccagcggctagccacgctcccgcaacaccactgggtcggcaagctattgggctttgatttcgaggtcgcctacaagccggggcggcagaacacggtggcggacgcgctgtcccgccgcgacgagccggctgcctcgctttgcgccatcaccacgccggtgtttgactggctacaggatctgcacaccgccaacgacacggaccccgcgctggtcgccctccgggaccagattctggccggcaacaggacagcaccatgggcactcaccgacggcatcgtcaccttcaagcagcggatgtacattcccccggcgtcagcccttctccagacggccctggcaatggtgcacgatgacaagcacgaaggcatccagaagaccttgcatcgtctccgccgcgagttccatacgccgggtgaccgccgtgtggtacaggaattcgtcaaggcttgcgccgtctgccagcggaacaagacggaacatctccaccccgccggcctgctcctgccactgccggtgccgtcggccgtctggtccgatgtgtccatggacttcgtggaaggatttcctcgcgtcgcaggcaagtccgtcatcctcaccgtcgtcgaccggttctccaagtacgcgcacttcatcacgctgtcgcacccatactccgccgagtctgtggcgcgcgccttctacaccgacatcgtacgtctgcacggcatcccaacatcgatcgtgtccgaccgggatccggtgttcacttcgacattctggaatgccctcttcgcggccacaggcaccaagctgcacatgtcatcggcgttcctcgacgacattcgctaccggctggagcaggcccagcagcatgcaaagaagttctacgaccgccaccatcgggagctgcaatttgtggtgggcgactgggtttggctccgtcttcgccatcgcgttccggcatcattagcaactccggtaaaaggcaagcttgggccgcgctattatggaccatacaaggtactggaaattatcaacaaggtggcttatcgcctcgctctgccggctggggcgcgcctgcatgatgtgttccatgtcggtcttctcaagccgttcgtcggcacgccgccgacgtctccaccggcgctgccctcgacactacacggagcggcgttgcctcagccagcacaagtactcaagtctcgtatggctcgtggggtgcatcagctgctcgttcgttgggacggtctgccggcatctgcaacgtcgtgggaagacttggacgatttccgtactcgctatcccgcattccagctcgcggacgagctatttgtcgaggaggggagagatgttatgtggggcattcagtatcagcgccggaaccgacgccaacagccagagcaggcgccgtgggacaccaaggaagaacttggtgtcaatggttttaagaaaggagaggtcaatcctgtatgctcatttctgatatatggaaactag

SEQ ID NO: 21266 - DNA, 7001 bp, Oryza sativa
  Clone ID: TF_OsC4120_1
ttttttttttttttttttttttttttttttttttttttttttttttttttaaaaaggtaaccaggattttttttccatagacaaacatgtagtatttctaaattgtaaccctgggagtggggtggtaaacggactatctaaatcatacacgcataaataaatgaatacttgtccatgtccaaggtaccatgtctgaaaatatacacttcatgtatatagaggctttcgagagtttgctcccgctggactagagggctaaactactagtccctggatttttactctatctggattctgggctaagcatacaaacacaaaaggcaggtacctgatacctccacacactggaaaccattgggaaagggaaaatcccagcgctaaatggaagaaaaataagcatttgagctcattgctcaaaagttctaatgctcatctgtgatcatctcgtccaccttatcttcgtcagctgtctgagctgccgaaactggatttgccgcacctgaattttcgctctcatcagggggcgtccgtttctcctggtcgccggtgcttacggctttgcctggtacaccctcttgggttgactcctcgtcgctggatacgggcactacagcaggttcgctgctcgtcccaggtgcatcaaccaacggtaatacagaaagttcagtaggtgtattacctgatccagacaattcgctcttctgattgtcagggtcaggagtatccctcacaggtgatctacaagatccagtatccatgtcatctaccgcggagaactcgattctgtgagtaccagtctcaggaggctctggcctggacgggcaagtggcagcagcgacagaagcaggttctgaaacttccatggttctttctggttcttcaaaagtggaaggggttgacgcatcctgcccccgactgccagctgatgatgaagatggtgagttcaagttgagcgagggggtatcactgcttttaataactgcaggagaggcaggtgcggcttccatggatagtggtgctgacggagtagagttgtggtcaccttgcccaactgtagttttggaatgatctaccagggaggaagcttgctgaactttgtgaactctcctcttctttggagcactccttgggtccttggggagagagagacgaggtcctggaatcgggaatggaggtattgctggtttttgctctccaagtagtaggcacacagactgagcaatagctgaaacagttgctggtagctcacattcaggtggcttggatggaggtgcacgcacagcctcctgaagccagtgcggtagcttgttcggttttgaactttcaaaatcaccagagttctcagctagaggatctgacagctttgtgtgattcagattcatctcaatgggtaatttccctaacttcacacgccgttgcatctcatggaataatttggcctgtccgtccgaaaaaccatgaagtatgctctcatgagaacttgatccaacttcattctgctgaatggaattactgctgtgtctgtttatgggcagtgacccaatgctttccttcataaaaggattcggcataaatggtgggatcaaccccatatcaggtttctcccacttgtcaagtgggccaggaaaatctccactgtgtcctgatctatttttgaaatcctgccacggtgtcagtgatggaccaccctcacttaaattcatgtaattagtgggctcaacatgagaaaatctggttggtatatcattgcaacctaactgaatgtcagttaggtgggactgcaactttggcggctccatcctcagtttggaaaagctacttccattaagtgcccgagacatcattgcatccgatatgccaggaaatgatgtagagttggagcttctggtggctgtaggcattggttcctctataattttctgctcctccaaaatccatcttgaggccagctcttcatgagatcggtggctcaaaaacttcagctttggatctctaagcatggcctcccaatttcctcttccatgcctgcgaaccccaatccacaaagcatcgagttcatcttctgaccaatagtctggttttaaactcttcttcaggaatttatttgaggcattcttcaagaacttgcttgaggagtactgagcacgcatcattaatttgtccaagaccttcttatgattttcaggcatggacgaatggatttgttgaactgggttgattgccaaacctggaagaaggccagacatatctgccatgaacttgttcttctgctttgaagttccagcaatatctgccataaagcttggtagaaatgaactatttggcaattctgggacacaattacgaagatattcattgctagtgcccaaagacaagttgggaaatagatccggtactgacttcaaatgcttaagtggaatactgtcttccagactaaaattaggaagacccagtttcccttgaaatgaaggaatggacgatacaggattttctacatgatcaccaatccccttcccggatataggaggaataggttggaaggggaagtaactgtctggaatgatattattcagccttcgcaaagtctcctcggaggaaccaggaaacataggcttacaaggagttggttggccatcatgtttttgttcgctagaatgatcaacagcaggagtcaacagcggtttgttggctagttcaccactagctcttttttgctcctttgtgcttggcccacaaactgaccctttatatgagttcatctgatcagcatttggagcacaaaggccaagaacaggtaaaaggtgatgtggagttcctgaattggagatatctgctgcctttgggtgatgttttgatgaagcagcattgccagtaagcttggcataaagctcttgaggaatttcaggatatctcttggttttcttcgaggattgcttcatttctgcagttgattcaccgagacgtttagccccagatggctgcacaggattgggatcttctacaattctcaagggatttgcactggaatcatatagtttcatgaattcttcaagtctgtcatcagcataattcttaatcacatggcgctgagcaatcctttccttttgtctagctcggagtttttcatatttttccttcaaagccagtccagctgcagtgtattctcgctttggttcatcctcctcatcagagtcctcgcttaaagcttcattaggaatggttgcaaatgtttccctgtaagaaacagccttccttaaacgcttacctcgaccaagagatgcttcctcctcagtttgatactgctcccatctgacacgtaagagtttatcccattcattttcttcaacacgattagctgcatcctgctttgcttcagatgcctgctcgcaaccatcattatcaatatttgggatgtcctcggtggcaccagggtcatcattcagctcatcgttccaatctattgactttacagtgccaagcatatcattgtccaagtccccatcagtgctttcagctactgttgatggaacgttggatctgtcaagaagctttgtgatagcattttcatcccaaataaatttagcagaaccatcagcacatctgtcttcataaacatcgcctagtccaccagtttttcttttatgcttaaactcaacctctgctacatcatttttagcaccagaagcttcattattatctttaactgcaacatcgctattcctgaagagttcctctgttccccagcgaatgatatcttccacttccttctgtgattctgatttgttaacaaaaagttgatcaagcatcaattttttcttcgcaaggtgcaagatacgctcctcaacactagcacgcacgacaagcctgtaaactaaaagtctgtttgactgtccaattctgtgtgctctgttcattgcctgtatatcagcatgtggattgaaatcagaatcatatatgataacagtatctgcagttgccaaattaattccaagcccacatgaccgcgtagatagcaggaatacaaaacgactcttgtcctgattaaaacgagcaattgctgcctggcgttctgccacagatactgaaccatccactctttcaaatgttttcggaccaaactcccaagtcaggtaatcttcaaggatgtcaagaagctttgtcatctgagaaaaaataagaactcgatgaccatccttgtgtaggattttaagcatagagtgcaacaaagttaactttgctgaggcctttattcgcatttcatgcaagaactctggtgatcctgattcaggttcagttccaggaataagatacggatgattgcagactttccgaagttgcattactatgttcaacaatgactggtgagcaccacctttcccaatattgcgcaatacttggtagttctttgtaagcatagcacggtagtattcagcctggattgatgtcaattcaacaggcaccattcgttcagtctttggagggatattttgcattgcatcctttttcagtcttcgaagcatatgtggagctacaaggttcttcagctcctccactttctctgttgttgtaaggtcattgaatttctcctcaaatgaagctagagaagggaaagaagcaggttgtaagaagttcaataagttatacatttcaccaatgttattctgtaacggagttccagtcagcaaaactctatgctgaaatgataatgtattgagtaaactgaaaagtttgctgctagaattcttcagacgatgaccctcatcgactataagaacctcccatgacacagaccgaagatatgcagcatcaacaagcaccatttcataagtagtgagcaatacattgaacttatgagatttcttgattttacccatctggcttgcatcaccctcatgccactcatattgacgaataatagatcttgcccgtgcagaaccatgatactccacaacatttaaatgaggtgcccatgatgcaaattcagccatccagttgggcatagtagaaagaggaaccaagacaagacatggcaagttaatcttatattcacaacatagggatgatagaaaagcacaggcagacacagtctttccaagacccatctcatcagcaaggataacattttttgacttgtaccagcatttgcgtagccagttcaatgcttccagttgatgagggaagagcatgcctccctggagttcttttggctgctcaaccagcatattaaactcttggtgttcccttggctttgcatggctacctcccttatccttatccaaagcctgggattcaaattttttgaactgagtgaccaaatgtgcatacttcaccattgtaggttcatctaatctttcccacgtgcattcgtcatatggaagggcacaccatttgatcaaagcctcttctatttcatctgttccgtactttgctttgtagttttctagtttcctttttgctaatgctttcagctcagattcagaaatccagctgttatggatattcgatttgccaacccatttaactaaaaactcataagtagttccgtcgtgctccttcaattcagtttcttgtattttcccatgcaatttactatcaggtgtatgttcttgtttagtgtggacttctgtgtcagctttggaaactggatgtttggtgtcattcttttcttctggaatatcagttactgtctcatattcaccatttactgaagctgttacatatgtctgtactgctccagcatccttaacagtgacgatttgatcagcggaacatgctgatgctgtattcatgatttcttttgcgttaagtgattccttgtgtccatgggatctaacattactctccttttgagcatcagaacaatccaaattattttccccaccatcgtttgctaattcatcagcacatgcatcctctgtcacattagtatcactattagaagactgaatttcttcatgaagtccttttaaaagggcttgactaggttctggtgcaccggatgcactaggaggggccatatcaatctgctctgatgaagcatgggcaggtgaaatgatttggcttgtctgaagtcgacagcctaggatgcgatcaacctgcagatccccctgagttgttattttgtctcctgcaccaccatgctccttttcagttatatgaacagcattctcagggtgctttttatcaacaaatttcactttcttttttcctttcttggtacttgatgcaggtgttcttccatccaacgattttctttttgggggcggcgattcgctgtgctcaagagaagtagatggttccattgaagaatcactgtccacatctgatgccaaatattggaccttttttgcttcggatctcttactgtctctgtgattgtgttgcttcttgttcttatatttctttggagataattccatgggatgcagatgtttcttcactttcaaagcacttccgtgtttctcctgtttctcttctgaagactttccaagtaaccctgactttgatgatgtggtatctgtagatagttccttggttgaacgcttcttcaaatgtaatatcaatggtttccttttctcaacttcattgtcttttgcacctggttcatcatccctaaatgcagcaccacgtgatgtgttaaaagaggctttgttttgtggagatggggatgggctatctgatgtggtgcttgtgcgcattctccttgttctttcacgtttagaggtgtcagcatcagcattgtctaagagcttcaagctaactttttttgtacgacatcttgggcattgccaatttccaggtggtgcacgcttgagaggaggattaagacattccaagtggtatgttcgtggacagctatcacagcacagcaaattgccaccgagatcacattctacacactcgtagaagtacctccctttgtaaccaccaacacaattagcctgcactagatacatccttgctactttacttccaaccctaacatcattcaaatgtttcat

SEQ ID NO: 21267 - DNA, 5085 bp, Oryza sativa
  Clone ID: TF_OsC25749_1
ctacagcacaggaccatgcccgggacgaaaccgcctgggatgaacacttttttttggtctttcttttttgtatcatctcacttcaaccggagcccaaccaagaataccaccagagctgctagatttctgtaacctgtgatcatttttcatgtttgttggagattgataccaagcttacttataaaagtgattatcagccattgtttttcttcttttttgtaagaatgggcaactaaaccataattcattatattgcaacttaaaaagatcatacatgtattgatgttgaactatatagatcattgctgagatgaactttcttaaaacatcccaactgaaatattcttctattagatcacaaaactgaccgacaaaattttctagactcttcctcttgcctcaagtttttttttcaatgtcagaagaatcttgtgtgtgtacatctgctaaaggtgccagcatctcctcagcaacccctggcatttcttttagactcggattcaaaactgtggtccacatcaggttccagcacttcattatttttttttcttcaaaaagaatttcaattgaacggtcttcccccatttttacatgtgcggcatgctagaagctgatatttccttggagcgatgctgctttaagtgacaacattgttcacttgaacaactacagcaaaggcccatgcccgggtggaaaacgactgggatgaacacctctttttggtctttcattgccgtatcgtctcatttcaaccggagcccaaccaagaataccagcagaactgctagattcctgtaacctctttccatcggccatgattggaggagcctcctccaaaggttggttatccaattgattgacgaggacctcccttggctttcgagctcttaccacgaagattggcaaattccttttgtagaagagcactagcacgattatccaagttcggtgcacgcggtaaaaacgtctctcgttcaccaagggttgctggtgcaattttcgctgtcaagctaagttttggatctaatcgtatcttctcccaatttccatagccataccaatgaattccaaccatcaatcttgcatcatcagtttcagtccaaccacagcttgctgaccactgtggcttttgtaaggtgcctggatccggtattgtctaactggatctttgtaacgtgcaatgcgccttgccaggaactgtagctcttccacacgggctatcaactcatgcgccttaactgctacaccaaaaaaatccaacactgtgcccttggcatccatattatttttaacagcatcttgacaaccctcaatgagtagagtaaacagctcaagctgttgatcaaccgaagactttgctattgcaccaccaacatcatccacgattaacccaatttggcttgggtttccaaattttttaaccgctcgaacaaatcgggtagcatctttctttgacaaatttccaaatgaccattctcgtacttgatgtgctgaaccatctatgagtggtaatgacacagctgtgtccattgttctgctagaacgcctccttggcttttcttgtgcatcgattcctcgccttttcctgttgctattcttatcaagttggtgatcttcaacatagctcttcttatttcttgcagcacgaggtgctaaagtctcctcaaccatatctgaagcatctggttgaattaatctgctccagaatgtggcatcatcctcaccactagaaaagttggcaacagaagtatagaatttaagcatgatgtctgaatcacaggtcatatggtagtgcacagaacatgccttgaatgcactaagaagttcatttccttcctccccttcaccaccctttgtttcaactttctcagctctctcgagaatttcatcaatgtccatgctttcaagcttcttcttggtctcttcatcagtcttatcttctttgaataactcttctgctccaaatctcaatatcgctgaaagttcattcttgtcaaacatggaaccacctttttttgattctttcttctcgagcctgccctcagcatttagcttctgaatcactaggtgatcaagaacctgtaaatcattttgcggattccagtctgaatcaaaaatgatcacggtatctgctgttgcaagattaataccaagcccaccagcacgtgtagacagaagaaaacagaagtcatcacttccaggagcattaaaatgctccatggcctggtgacgaagatctgctctcgtactgccatcaagcctctgaaactggaatcctcggagggatagatactcagcaaggatgtccaacatcctaaccatcaacagcttgtccaataacactaatttcccactactcataacaatgcgttcaactttattgcgatcaccaatgctatctccaccataaccatgatcagcactttcaaataaaaatgggtggttgcagcactttttcaactcaacaacgatatttaaaagcgagacctgattcccacgaactcctttgttgagattctggaaattccgctccaaaatccatttgtaatactgcttctgtagaggagacatatcaacacgaagaatccgctcaattttcggaggtaaagatttctccacatcttttataactcgtcttagaatatgaggcctcaattccttgtgaagatttgcaagctcagtttcattgaaggaactcaaatttttgtatctctcaacaaatatatccttgctgttgaatttagatggatcaaggaaatgaagtaacgcccagagctcttcaacgctgttttgcaatggggtcccggtgatgagaagcttattcttagtgctgaattccaaaagagtcgtatacagcgatgcttcacaattctttaatcgatgagcttcatcgaccataagatagttccatttgatcttggaaagggcagctttgtccttaagtatgacctcataagtagttatcaatgtatggaattttacatgtcgaccacccttcttatttgtaaaaaattcatgctgctggcagatctctctgctagcacgatttcccacataaaccacaacattcatgtcaggtagccatttccgaaattctttcgcccagtttgacaatgttgacagtggaacaaccacaagaaacggaccattaatttcttgagcattatgaaggaaacccagcatggagacagattgaatagtttttcccagacccatctcatcagcaagaataacattagtgtcatttctccacccattaacaaggaagtttaggccttcaagctggtaatcacgtagtttgcctccttttagccattctggttggtcgtcaagcctccgcaaactagctttgctttttttcctttggaaatcaactgttttcccgagtatagatgttgcagcttcacgggccttgtactcatcaatagcatcctgagcaaattcaatatctgtatctttttcccaggttgattctgcataaggaagtccttgccatttgactaaatattctggcaccaggtcatcgccatcaactttgctaaccctatcagcaaatatgcgttcaacctggctgtactgtttaataagatccagctccatttccttgcccacatcatgcacctcaacctcctcacgtgataacgatcgcttgtacctcagctcgtcagtaactcttttcatgtaatttagaacctttttaaatccactaacgttttggagctcagataatgtcttccactggcaatgtaagaatgattggcccttccattttatatagaattctacatcatcccatgattgatccacatctgatgtgaagctaatcacagtaggttgagttgattggccattcctcagtgcctcttcagcaacacccttaggttgatgccaaaggattctttcaattgtttccccttcttcctcttctgggtcctccttcaagaccttttgttgcttagctaacttttcctcactatcatcactttcttcactttcagcatatgaaatatttctagctgtcctcctccttccagaagttcgaacctcatgagaatcaacatttgagaaaacatccttgcggcctacagttttctgatgcaacttgtcgggtttttttgctcggtgactgatatcagtatcactgggagcatcagagtcttttcctgaagaatcttcatctgtaaaagacacccctcgtttgcgttgaacctgtacaggaagctttcttcccttggaggttttagttccaccaaccttaagtcgcttacattgcctcttattctcaacaaaatcatcttcatcatcatctgagagctcaagctcatcatcttcttcttcgtcggagttctcactatccacaaacttatccttatcggcagccttttcagtatcactttctggctcaaaatccacatcgtctggatcatcttcgtctgcgtcatcatcgtcttcatcatcattctcatcattgtactcgtcatcatcttcatcctcataagcattgtattttgtcggcttcttcttttgtctagaggagacagattctgctgcagccccagaagtagaacagcttgggcggcgcatcccaccacgaagcaatgaatcactctgctcctctccatcctgctcatagtagtcatcagagagcatttcctcagcaggcacctccccatgccctcggttcagctcatcatcctctccactagcatccatgtcgtcatgtgaactagccgccgacccatattccattcccctgttactggtcaattgctcttccttagccgtctgtgtgggtccacaatccttcaaaaagtttgtaccccatgggccagaaggcccatttattttccgggcattctgcacagatttattctccgaggagttcggacctgaccggccaccatcatattgctcctcatcactatgataggcatcctcagccttctcatttaagttccattgcctagagttcaagtcgacatccctgtccccaactgactcataggcagcttcatcctcagccttctcattcaggttgtaccctcctgaatcagccctgcttccagagttgctgaagaatgccat

SEQ ID NO: 21268 - DNA, 8425 bp, Oryza sativa
  Clone ID: TF_OsC7793_1
ttttgttttttttttttttttgtgtttttttttttaaacggcgaaacatgcaccagcatgggccactaagattaagcaatatacaaaatgcacccacatttccaactaaaaaaacactcacatttttgtaacaacagggttgacagactggatccaatgctacaacaggtcaactcattgacagtaaagccccttactgtcaatgagatagcagagacaatacccacatgtcagaacaaaaaaaatatcagcagcccatcatattatcttcagcaggaaaaggggtaacctcaacatttccagacccgtatcaacaaggtttgatatttgcaggaaaggtagactgattatacaagatggatattcaaattgatgttagcacccgtcatcccccaaaaaagaaaccccgacccactgtacttctattgatgtccgtctcttgctatcagaatactaaaggggttagatcgactataactcaaatcagttaactattgcactagtaacctacaatttgactgaaccttcctcactacgattcatcgtcagaaaggcacacaacctctgtgctggagaccgtccctctggcctcactagtcagcgcaagcctagctgttagccatgtattcagtgatgctgatgcagaagaacctgagggattgacacctgaaatttgagatccagcgtgctggcttccagcacctgcattcagtggacctgaggtcctgtgaacaaccgtgttcaatgacaggggtgccgtgaggctaggatttgaactagatgggagcacaaatggcagtagggatgctaggatagatggtcgttggtgctgatttccatgactcgtggcataaggtgacggcatcctaagctgctggagatgaggagagggagcatgcggttgtgccccagcagctctgtaggtgccatgtggcataggcattggtgtactactaaaaggtgatgatgacattgctctatacatattgccaggtaagattgactgcggttgggtagcctgtgatgatggttgaaccaccagtgaaggttgcacatatggtcctgatgaatgaagcacctgtggtcgaactgctgatgacaaggtaactggtgatgctgtgacttgctctgctacaatccttgcagatggttcctgagaagactgaaccagctgcccaattgtgggtctcgtggatcccccttgagctgcagataatggtaggaatttccttcgaaaattctcagccagtgattggtttataaagactttcctgtagatagtatcaagttctgcctccttctgagcgtaaaaagaatcttccttttgaagtaatgagtcatatttctgttttagcttctccatttcttggttatactccactaggagttgttttctcttttgttcatgaactttactaagaacattgctggtatgttttaatctttccagctcatttttgagaggttcgtcactaaatctttgataattaaacactaatggtgccactggaagaggctgggtgagctgttcagaacttagtgcagagttggactgaacacctatctgattcatgtcttcagagcgtattccttcaagttggacagtctgtattgtggatgatagatccagttggggctgcaaatcacaagtttctgtcgtgcaagatcgctgcactaagtttgctcttgtttctgcagatcgctcttgcattgaacctgatggtagttcagactgcctttcatgtgttgtttccatgcacaaagcacccgttggttctactcctgtctgcagatcccatgaaggcactacactttgatgggcagtagtaatacttcgtggcacaggaataccagacagatcagtcctttcaaatggagcatcctgtgttgaggttaatctctgtgtctcacattgcaaattctgagctgctgcagcactcaacataccttcttgatttgcctctgcaagttgatttggcactggggttgatgattgcattaaaggctgcaaatcttcagctgcagcaatgcacaatactgctcctggatactgaccctgcactgagtttggaggttgcatttctggctgtaaatcctgaattgctgagctcgacataccttcttgttccagctcttcagattgatcctgacctgaggttgatggctgcatttcaggctgaaattcctgagttgcctctaaacctacaggacttgcaattgaatgtcgtgaagtttctggactttgttgggcagggtggcttgtattttgttgtataggtatatttgattgacaagtctgagtttcaacttctgtcgaaactaccaaggcagctgtttcgtgaatgatgtaagttggagattctgagtgtgaaggctcttcggcaacaatgtcatcaactacaactccggtatcaagtaaatgttgttgagttgttgcaccttcctgcaagaaaacaactgctcgatctgattgacaatctgtttgacttatgttgttactttcaagtgaagcatcaaacaatgaggttgatggttgcaattcaggttggaaattctgagctggctgtgtggtaagcaaacctgttcgttctgcttctgcaggtggaagtggtgaaggtgctagattttgttgggcagacagatctgtgctctgttgggaagacatatttgatatatttccctgacttccaacctcactcaaaccttgacatataaccaggctttgtggagtagcaaagattggagattccaaatgggctcgaacatcacaaacagtgttactatcattagcatcaactatctctcgagcatctcctaaatggccacaggtttcacctctctgtgacagaactgtttccagctgatgttttgtttgactgtcgtcatcagggtgcatcctttggagtgaagtctccagcactgaggctgattgttgcctttcaggctgcacatctcgggctgtctccctgctcagggtacttgctggttctgcttctgcaggtggattttgtgaagatagtgaactttgtacgagtggtacacttatactctgccgttcaagcatacttgattgatcagtctgggtttcaacttccgtagacaccagcaaggcagctggtttgtgtgcagcagtataagattgtgtctctgagtcaagtggatctgcagcagcagtgtcatcaacttttgctgtaactccagcagtagcatcaactgaggttaaatgacaggaagtagaaccttcctgcaatgggctagttgatgtatctggttgatgaactgtttgattattattatctgggcacatccttgcagatggagaatccaatgttgaggtcgttgtttgcatttcaggttgcacatcccaagctgttactcccaaattttcagtcagttttgcttctgcaggtggctgctgtgaagtctcaacagtctgtgagccaggcaaggttgataaattagattgagtagccacttccttagaagctgggaaaatcgtgaggttttgtgtagaagcaaccattgttgactccaagttggcataaattccaatggcaggagaagttgcaactcccggcaatgtactaggattggcattgtccctctcaacattctcagtacttgtatattcactggccgaagattcctgattaattgaatcatcatttgaaggcctaatactcggtgatttagctttttgtaagccaatgccatcaggactatagcaggtgttgttttctggaaaatcaactacttctggtgctggttggccagcgaccatgaccacttcaacagaaccatttctcactgtctgtgcagaaatgggttctgatggaactacattccttaccagtgtatttaccattttcaatctatcatgacaaagctgctgacaatctgaaacagcgcttccactgacatgggaattgctactttgttccttcaaatggatgaattcttgcataacaaagtttgaatctggtagagcaatctgctgatcaaaggtgtgatctaattggcctgattttgcttccaaacaaagtttttccttcagctgtcgctcttcagcccatgtattagattgcagtgactcaagtttgctgtgctggagtctcatgtgctccagaaatgcatacatcagcatagtgaaccactgaacagtttgttttattgtgtcatttcgggtctctacatcagcatgacttctacaaatatgttccagaactaaattgcacactgttttcagtctggcagttttattttgtgtgtatttctctaactctgaaatctgagactgttgtttatcaaagatacggtattctcttacagagaaaacattgtcaattaagttgattcttttctccacaatgtcaggaagttcatcagttgaaaaatggcattccatgtgagttcctggaacagctatcagttcctgctcttctgaaaccatttgtgcagcaacaaatgagccttcttgaagtgcaccattcatgaaattatcatgaagatccattctctgcttagggaaaatgtggtcatttctcaagatattagaggtctcctgctgtgaaggtttggtcttttctactgatgttgattgacaattgctgccagttgcacctgctttctttggaaattttctctttaggctgtcatagaccaaccttgccagctcctcattgcactcgtattttaaccttttttcagcaagggcaagtgactctttatgatccaccttaaagttatgaatagaggcaactcgccaacacaaagctatgttcaacgcatgaaatatgtactttggctcctgaacaactacatgattattcaaaagatattcaaagaactgctcaaccagcaacgtaacattgtctacttcaatgagaacttgtcctgctattttcgctccattaaactgtattgtattcggtagttgtaacaccttaattaatttcgacaactcttgcttcatttgggcatgaagattcttgggtgtactcatcaggctttccgacccttcagattgaactgatttttgctgcgtgacatcaactggttgaagagcagggccagatgtagtacaaatatcaggcaatgcatcatcgttacttttgtcagatacaacttttgaagatgaacccataatctcaccaacctttctatgcttctttctggcttcattgatttcttcagccggagcattgacctcatccatggtctgggactttgtaactcttgattgcagtggctcagatatacagctcacatgaggggatcttccatccaataaatttaaccagaactcagctggattatcctcaagcacagagattccctccttttcacccatcagagtaatatttcttgaatatagttccccactcatattagctttgcttatggacttcctgtgtacttcagtgctgtcttcaacagttgtggataactttgttaagaactcaacgattacttcatcaataaagtgtctctccatttcagaacttttacttgcatggtcatcttgctggacctcatcaagtctactgaagagaaatgcagcaccccatctgagtaaggaatgttttaaactagtccttagatcttgtatgttgttatcaataacaatgccctgcctcgcaagaacaagactcttctcctcaactgtaaaaggagtgtacaagcgaaaaatgctcacacgctcaaattgtgactctatcttgatcttttgaagagccttcaagtcgtttagtgggttgttgtcagaaccatatatgatgatggcatcaatagatgaaagcttaatgcttgggaggcacgcacgattttcaatcagaaagacaaatctaccattagtcttgttgttgaacttatcaattgctgcctgtttccttgacaatactgcacgatattcaacacgttcatatgattctgggccaaatctgtgatgcataagatcttccaaaatatttcccattttgtttccacctgctctatcagactggaaaagaagaatgacccttaaactcttcttcttgatctcgttaagcattttgtcgagaaccagtagcttgccacttgcatgcaccaccgtatctatattttcagttacattgctattgttgctaagtgagcttcgcagaaattcattaacgatgtaagggtgatcgcagcactttttgagagacagataaatatcatgaagagctccaacgctatcagtttccatctctgaccggaggacggatgactttgaaagcaatatggaacagtacatctctaactgcggttgtgaaatgcaagatggaacccagtactccaaaaattttgaagaatctgttttacgctcatatgcaatatgatgtgtgaatcttgcttttgacatcacaagcgcatcatcagcattgacatagtcactataacctttatcttctgaattaagaaaagctagcaggttcatgtactcaggaacattatccttgattggggagcccaaaagcaccattctaaaatcagtagaaattttcttgagttgttcaaaatatttgaatgcagagttttcataataatcaactataacagcttcccagcgaatgcgctctatagtttcaatatcctctaggatagcatcaggatgggataagagaacttgtaacatcatgcagcgtctgttgtcatagaactccaggtcttgaattaatttgagagtatctttctgcccatcatacacaacaacattgataaatggtgccaagtgattgaactgaatctcccatgcagaaagagaagcaggagtcgtgacgatcagtaaaggttggcagacatcaggtaatacagtcaacgtgaacaagatggtttttgttacgtattccttatcatcaacaaggacagcaccatgagatttgcaccagaactcaagaagttgattgatagaaaacaaatgatcgttgtcaaaaccaggaggccactcgtctggtaatctctggagtttctgaaatgtcttatgcttaacctttgtttctacgggaatagatgattgcttagcagctttacggcggttctcatacttccttttaagttcatcagcctgaggagtacgcaaaaagcatgcagtttccagttcccatgttgcatgttcatagccaagatccctccatttcactaaccattcaacattacaatgctcaatgttagcacgacttgaacaaaaaaaatcatcagcttcttttgggggcataagtggccttttcctcaacaggtggtgtggctcagtccattccttcttccaatttgtcttttctttatgatccctcttattaaacaaggacagaagatcacaacctccaggggtgtcattgataacaccttccggaacccagcgattatggacatgtgccagattcttatacttcacaaggtactgcttgccattctgcattccctccttgacattccacagagactcaattccatcagcaacagagtgtattccaaacagcaacctcaggagacaaatattccagccaatgatccagacaagaaacatggtagcttcttttgcagccttctccatcacaggacctgaatcacaaacccgattaagatctcctggggtaccacaagcaacgcatatgttggaattgccctccatttcatcagatgcggtcaccttgaactgacttgaagctacttctttttgaatgctaaggggttcaccatctccatgtccactctcgggctcctcgtaatgaataggagggattggggcactttgcaatgacgatatagaattttgccttgaatgcccagtaggccgatctctaccttcaacttcaagtctactctcagcaactttgttttgtgggcatgtttcgatagatatatgttgatgtaccagtgttgctctctgccacattcccattggaagtattttccttgcccgctctgtggagcttgcttttttggatcgcttgaaaagtgatctgtaggattttgcggtcattcttttccgcttctttgataaactgctagtgcttccaaccccgctgctatgctcttctgcaacatccttagaactagcggtggtggtgctagaagatctggtgggagctcttgatgttgaagaatttgaagcattgttactagccctttttaacattccgacgcgtgctacctcggctacttcgtcttgttgtgtgccggaaagccttggggaacatctcctggaggtcggcatgtctggccctccacgcagaggagagcggagagaggccatagccctctggttcgcgccgtttgtgggtgcagagaattgtggatttccagaagtacgcgaacgggttgggtacccggtgcctgcgtttgccctggccgtactgcctccaccccttccatctctggatgttcctccgggctgagtcttccacat

SEQ ID NO: 21269 - DNA, 4459 bp, Oryza sativa
  Clone ID: TF_OsC18281_1
atgagcagcctggtggagcggctgcgggtgcggtcggagaagcggccgctgtacacgctcgatgagtccgacgatgacctcccgccgcgcggcgggggcgggaaggggagggatcggcacagcgacggccccaccgagcggatcgagcgggaggacgcggttagccctcttacggaaatggaaaagatattagactgtgaagaaacaaaacctgatgcttctgaagagactagttcttctgagtccggatcaaagaagaaacctgtcaaacgatatcttataaaatggaaaggaatatcacaccttcactgcacttgggtttcagaaagtgaatatttggaaactgccaagatatacccccggctgaaaactagactcaataacttccataagcaaatggattcaacggataagtctgatgatgactattctgcaattagacctgagtggactactgttgacaggatccttgctaccagaaaaagctctactggtgaaagggagtactatgtgaaatggaaggaactaacatacgacgaatgtacttgggaaaatgactccgacattgcagtctttcagcctcagattgaacgcttcaatgagattcagtccaggaggaagaagtctactgacaagtgcaagagtgtcactcgtgagatacgtcaatataaggagagcccgaagtttctctctggtgggacactacatccctaccagcttgaagggttaaacttcttacgctattcttggtaccataataaacgtgtaatacttggggacgagatgggtcttggtaaaacgatacagagtattgcctttttgggctctctatttgtggacaagcttggtcctcatctggtcgttgcacccctttcaaccttgcgaaattgggagcgtgaatttgcaacttgggcacctcaaatgaatgttgtaatgtattttggatctgcagcttctcgtgaaattattaggaagtatgaattttactaccccaaagagaaacctaagaagcttaagaaaaagaaatcatctccatctaatgaagacaagaaacaatcaagaataaaatttgatgtccttttgacatcttatgagatgatcaatatggattctactgttctaaaaaccatagaatgggaatgcatgattgtggatgaggggcatcgtttgaagaacaaagattccaagttgttcggtcaacttaaagagtatcatactaagcatcgtgttctcttaacgggaaccccagttcagaacaacctggatgaacttttcatgcttatgcacttccttgagggtgacagttttggtagtatagctgatctccaagaggaattcaaggacataaaccaggacaaacaagttgagaagctccatggaatgctgaagccgcatcttcttcggcgattcaagaaagatgttatgaaagaacttcctccgaaaaaggagctgattttacgtgttgagcttacaagcaaacaaaaagagtactataaagcaattctcaccaagaattatgaagtgttaactcgtcgtagtggtggacatgtttcacttattaatgttgtaatggaactacgcaaactttgttgccatgcattcatgacagatgaacccgaagagcctgccaattcagaagaagctttaagattttctgatgtcattaacattttaattccactaccagctttttattactttcaaacacatattgatgcagaggtactggagttctctgatatctcttgctgttatcttttcatttcacgtcttaacaaacacaatgccatatttgaagttgttgacatctggaggcttttagaatcttctggaaaaatggagctgcttgacaagatgatggtgaaactgaaagagcagggtcacagggttcttatttattcacagttccagcacatgttggacttacttgaggattatttaagctaccggaaatggagttatgagcgtattgatggaaaaataggtggtgctgagaggcagatacgaattgatcgcttcaatgctaaaaattctactaggttttgctttcttctttcaaccagagctggtggtcttggtataaatctggcaactgccgatactgtaattatttatgacagtgattggaatcctcatgctgatttacaagctatggcgagagcccatcgcttagggcagacaagcaaggttatgatatataggcttgttagtcgtggtacaattgaggagcggatgatgcaacttacaaagaaaaaaatggtattggagcacttagttgttgggcgtctcacgaaaggcactaatattgtccaggaggagttggatgatattattcggcatggctcaaaggaactttttgacgatgaaaatgatgaagccggaaaatcttgccaaatccattatgatgatgctgcgattgatagattattggaccgtgaccaagctgacggggaagagcctgtggaagatgaagaagaagacgaatttctaaaaggattcaaggttgctaactttgagtacatagatgaagctaaggctttagctgcaaaagaggaggaggcacgcaaaaaggccgaagctgaagctgcaaactctgacagagcaaatttttgggataaattattgaaggacagatacgatgtacaaaaagttgaagagcatactactatgggaaaaggaaaaaggagccgcaaacagatggctgctgctgatgaggacgacattaccggcctgcatgacatgagttctgaagatgatgattactcttatgatgatgatgtgtcagataacgacacaagtttacaatcaggccttgctgggaggaggggcccatattccaagaaaaaacaacgtagtaatgttgattcacttccattcatggagggcgaaggacgggctttgagagtttatgggttcaaccaaattcagcgaacacaattccttcaaacgcttatgagatatggttttcagaactacgattggaaggaatttactcctcgattgaaggggaaaagtgttgaggaaatccagagatatgctgaacttgtcatgatccatcttcttgaggacatcaatgactcaggatattatgcagatggcgtgccaaaggaaatgcgcacagatgagacattggtcaggctagccaacatatcacttgtggaagagaaggtggctgccatggaacaaggaaaaataacaaaactctttcccagctatttgttatatgaatttcctagcttagttggtggaagagtatggaaagcggaacaggatctactgttgctgaaagcattaataaagcatgggtatgcaaggtggcaatatatatcagatgacagagataatgggatttttgaggctgcacgacaagagctgaggcttcctactgctaatgaactgattagttctcactcaaacaatgagacaaacggaaatctggaaagcacacaagaaggccagtcgaacccaacgagcatgatccattacagggatacacagagaaagatagttgagtttattagaaagagataccatcttttggagagatgtttgaatcttgaatacgctgtgattaaaacaaaaacccctgttcctgatgatctcgctgaacaagattttcctggtggtcatagaccggccgttccagactacagtgaaatgctgagagaattgcctgtccttgaacctatttccaaagaagtggcgcctgaaggcacaactgatcagtcacaagtttcccatctttacaacaagatgtgctttgtccttgaagacagtgctgttcctgcactcaactcgcatttcggtgacaaggcagcttcctccggtttagccaatagcctccataagtttgaagctgtatgcgaagacgttagtcgcatcttgagatcccatgaaaatggtaccactcccaaagaggaagttatgctagatgcaagctccaaagagaccacgtctccaaaagatccagcaaccgaggtgccttcgtcagcttccaaagaagctacgcctccagtacaagatccagtcatagaggcagtgaaggaggagccacccactgttaaggcggaggacaaaatggaaatcgatagttaatttgtaggaatcataacgataatatcgaacctttttcgtctaatctaatcgctaaactggctgtagcttttaccatattacaagttgtaaactaaaaaatcactctaagctagtctcatcctgtagaggcctggacatctccaggcctgagatgaacgattaccatcaaatctgtcgtactaaaggttaccaggttttgctagctcctgccccgctgcatctgttaaatgtttaactcttcactgtcgaataggtcacttgactggtttgccatcaggatgattaggcccattgtaatgaccctactgctaaagctgtgttgctaattgtggcattgtgatgtgaaaaaaaaaaaaaaaaaaaa

SEQ ID NO: 21270 - DNA, 322 bp, Oryza sativa
  Clone ID: TF_uC-osflm202108f08b1
ttttatttagggtttctagggttttgggttgcggcggcgagtgggcgagggcgaggtctagatggcgtcggtgagggtgaaggggacagtgaagtggttctactccaccaaggggttcggcttcatcaccctcgacgacggtggataggatctcttagtccaccaattctcgctcaagttcgacggctaccgcaacctaaacgaccgatacttgcgcgtgttcttcgcttgatccggtaactacggccgttccaatgccgtggacgtcaccgagcctgtgggcggtgcgctcagcggcagatcccgtgccagctgaggaggt

SEQ ID NO: 21271 - DNA, 271 bp, Oryza sativa
  Clone ID: TF_LIB4370-046-R1-K1-B2
accgatctagggtttctagggttttgggttgcggcggcggcggcggcgagagggcgagggcgaggtcgagatggcgtcggagagggtgaaggggacggtgaagtggttcgacgccaccaaggggttcggcttcatcacccccgacgacggcggcgaggatctcttcgtccaccaatcctcgctcaagtccgacggctaccgcagcctcaacgacggcgacgtcgtcgagttctccgtcggatccggcaacgacggccgcaccaaggccgtg

SEQ ID NO: 21272 - DNA, 1710 bp, Oryza sativa
  Clone ID: TF_OsC50687_1
gcgcaggcatcgcgcggacggtgacgaggggaaaaaaaaatcaatcaaaccctaatcagatcagggagaggcgagggctagggtttcgactcctcggcgggcgatccatggcggcggcggcgaggcatcgggggacggtgaagtggttcaacgacaccaaggggttcggcttcatctcccccgacgacggcagcgaggatctcttcgtccaccagtcctccatcaaggccgacggcttccgctccctcgccgagggcgagcaggtcgagttcgccatctccgagagcgaggacggccgcaccaaggccgtcgacgtcaccggccccgacggatccttcgtcaagggcggcgccggcggcggcggcggtggcgggggaggcttcggatcgcgcggtgggggcggatctggcggtggcggccgcagctatggcggtagctggggcggggggaggagatccggcggtggtggacccggtgggggctgcttcaagtgtggggagtctggccacatggccagggactgcttcaacggcggcggtgtcggcgttggtggaggcggtggcggcggcggcggcgctggtggtggctgcttcaagtgcggcgagatgggccacatggctagggactgcttcaacagcggtggtggtggaggtggtggtggtggcggcggcggcggcggcgcctgctacaactgcggcgagaccggccacctcgcgagggactgctacaacggcggcggtggaggcggaggcgggcgattcggcggtggaggcgaccgctcctgctacaactgcggcgaggctggacacatcgcccgcgactgccacaagtgatggattcacaacaccatctcccccccccccctcctcttagatctcgcctaaatcttcatcactcctaagtcgaattattgctttagttttgccgccgatctgggtcacatggagagcgcgttgcctgctataaaggaaccgcttgccttttgtttttacctctttttctttttttgctattgggatttcggtttagttttaacttctgctgctgctgctcgtgtgatgatgcttttgctgctatgagttggtctggtcctctggttcaggttaagaagacgtgatgtctggattggttttgtgtgttgggcgaggagattgacaaaatctctctcctttttgtggtttccccgagatgaaaaagatgattattgtcggttactccttaatatataccaaattaaaaaataaataagcaccgggcggcccccgttgatctttatttacctttctactctatattttcttttttgtcgcgcccgctccccaattcaatccacattcgattgcacttattctctctacacgcccccgccttttaggcgtgtgcgttgagaaacaacgcggtaccaatatctcgcgcctaatctttgttgtaatcatcgggttcggtgtgggcgcgttatggtttgcgggtctatgtctgctctttctcattgccccctactattgcgccgggcaagcgtatcagtatatattattaatatatcatgttattaaaacaaatttacattatatttttattacccacacagaacctcctctgccgctcttttatgttgtcatgctgttgtcgactcacggatgacgccgaggggccgagctcccttcttgtgctcgttaattcttgagatacctcacattcaacatcacaccg

SEQ ID NO: 21273 - DNA, 928 bp, Oryza sativa
  Clone ID: TF_OsC951_11
atggcgtcggagagggtgaaggggacggtgaagtggttcgacgccaccaaggggttcggcttcatcacccccgacgacggcggcgaggatctcttcgtccaccaatcctcgctcatgccccgcggcttcccccgcctcaacgacggcgacgtcgtcgagttctccgtcggatccggcaacgacggccgcaccaaggccgtggacgtcaccgcgccggggggcggggcgctcaccggcggatcccgtcccagcggcggcggggaccgcggctacggcgggggcggaggcggcggccgctacggcggtgaccgcggctacggcggcggtggcggcggctacggcgggggcgaccgcggctacggaggcggcggcgggtacggcggcggcggcggcggaggcagccgcgcgtgctacaagtgcggcgaggagggccacatggccagggactgctcccagggaggaggcggcggtggtggctacggtggtggtggcggcggctaccgcggcggtggtggtggcggcggcggcggcgggtgctacaactgcggcgagaccggccacatcgctcgcgagtgccccagcaagacctactaggcgctgctcgcggcgtcagatccagctccctcccatgatgcgttttgctccccctccctcactgaatcaccgagcagcgggtgatcagttctatcttattagtagtcgtagatctcgttaggaaagctatggatctatcggttcgtcgtcgtcgtcgttctatgtaatgggatgggagtcttggagtggtttaatctttttgtttcgttgggtcggtttgagagacaagccatggatttgcactgtctgatctatctatgaatctatctattatgaaccgagaaaaaaaaaaaaaaaaaaaaaaagggcggcgctcgcgatctagaactagcaa

SEQ ID NO: 21274 - DNA, 687 bp, Oryza sativa
  Clone ID: TF_LIB4309-007-Q1-K1-F2
gatcctcacaacccccacaccacatgggctgagtagctagttagctcctcttctcttcccctcctacctccactcctactccattatccagcagttcgatcgatccatggctatctagcttctgatcttgatccctttcttcttctcatcgtccttgtttgttcttattcctagctacttagcgagatctatcgatcagttcagacctcttaattcctgtcctgatcaatcacgttctgtctgtatcctttgattcgtcgacaatcctagtacttcatggagcagtgttagttagctagcaaaagtagtactttcatcaggagtgtctatcggcaaatagctaggttttctggcttaacacgtactttcattaatttggaagaacagcaagacaaagaaactgattaagatcagcgagtaatcgatgatggcaggagctcccccgatgcatatctgcatggactccgactggctcaagggcatcgtccccgaggagcacgggatggggtcgtcgtcgccgtcggcggagctgatcgcgtgcccgcgggcgccgatgcaggcggcggcggcggcggccgaccgccggcttcgcccccagcacgaccagccgctcaagtgcccgcggtgcgagtcgacgcacaccaagttctgctactacaataactacagcctctcgcagccgcgcta

SEQ ID NO: 21275 - DNA, 1296 bp, Oryza sativa
  Clone ID: TF_OsC69565_1
tcactccctcgcgctcgcgctgcctcgcaggtccgccgccgcgccgctgccgacctgcggaggcgggtcgccgacacccagcacctccgtcgacgcgacgctgcggcctgtctgcgactcctcctccttttggcccagccggttccaccactgaaccagagcatgcacttccttcttcagctcatcttcttcctctttctcagtgcacttctcaaacttccatgcacacaccatcaccaacacaacgacgaagactgtggttgcactggagtaggaggtgtatcctccagcgaggtgatgatcgccatacatgccccttgggtagccttctctcttcgatgatggcatcgcatggtggagctctccaccgtcttcgccgccgccgctgccatggccgtcgccgtctaggcctagctggaacatccccggcattgccattgccggcggtggcgccgccatcgccgcctggtgatccatggcgtggaagaacgggaagctctgcatctgctgtagtctccattgctcgaggccggtggcggcgccgacggagtagcagccggccgcgtcgacgggcggtggcttgccggcggccgccgccatgccagagaaggtggagccgaggctcatggcgtcgaagtcggcgaggcggagcagcggcggcaggatggagaggttgccgcccagcatcgccgggagggcgggcgcgttgggcgtggcgcaggtggaggacgtcgtcgtcgtcgtcgtcgaccccgctggcgtcgagccggcggtggtggtggcggctgaggcggagcccgccgcggacgccggcttgggcttggcgcgcttggcgtggcggcggtagccgccgccgacggggacgttgcggagcgcgccgccgcgggtccagtagcggcggcaggcgcggcagaagtggcggggctgggagagggagtagttgttgaagtagcagaacttggtgttggtggagtcgcagcgcgggcacttgagccccggctccggcagcgggatcctcgccagccgcgccctctccgacatcgacatcggcttcgccggccccaccgcgccgcctccgccgccgccatcggcaagcgtgcccggaatcattgactgctgctgcagaagctcatggctattgccgtcgccgccgccgccgccgcctccacaaccggcggcgacctgatgatgctggtggtggccgtgagcatgttgctgctgctgctgctggttgtggttgttgttgttgttatcattccagctcgaggaatccaggaaggcaggggggaagatcat

SEQ ID NO: 21276 - DNA, 1703 bp, Oryza sativa
  unsure (1)..(1703): unsure at all n locations
  Clone ID: TF_OsC1630_4
ctgatctgcgctcgatcctttctcgaatcggtgcatgcaacaccggcgacatgtctacaattaagatctctcaccgggggcccggccgggtcgattttggcttctgctctctcttcttctggatcttgttgatgtgggtgtttcttggtcgatccttcttgtttaatctgcctgtgccttgatcttggcgcttgcttttcctctgatctatgcacggatcggccatattcttctcgctctgtgtgtatgtgggggctagggctagtgaagcccatggaagagatgctgatgggtgcaaatccaaatcctaatgggagctcaaatcagccaccgccaccgccgtcctcggcggccagcgcccagcggcctatcgccccaccggcggctggagcggccgccggcgcgggcgccgccggagctggggctggcacggagcgccgcgcgcggccgcagaaggagaaggcgctcaactgcccgcggtgcaactcgacgaacaccaagttctgctactacaacaactacagcctccagcagccgcgctacttctgcaagacgtgccgccgctactggacggagggcggctcgctccgcaacgtccccgtcggcggcggctcacggaagaacaagcgctcgtcgtcctcggtggtgccgtcggcggccgcgtcggcctccacctccgcggcggtgtccggctcggtccccgtggggctggcggccaagaacccgaagctgatgcacgagggagcgcaggacctcaacctagcgttcccgcaccaccacggccgcgccctgcagccgccggagttcacggcgttcccgagcttggagagcagcagcgtgtgcaaccccggaggcaacctggcggcggcgaacggcgccggtggcaggggcagcgtgggcgcgttctcggcgatggagttgctgaggagcaccggctgctacgttccgctgccgcagatggcgccgctagggatgccggcggagtacgcagctgcggggttccatctcggcgagttccgcatgccaccgccgccacagcagcagcagcagcaacaagctcagaccgtgctcggtttctccctggacacgcacggcgcgggtgcaggcggcggctccggggtgttcggcgcgtgcagcgctgggttgcaagagagcgcggcgggcaggttgctgttccccttcgaggacctgaagccggtggtgagcgccgcggctggcgacgcgaacagcggcggcgatcatcagtacgaccacggcaagaaccaaggtggtggcggcggcgtcatcggtggccatgaggccccagggttctggaatagcagcatgatcggcaacggcagcagcaatggcggcggcggcggcggttcttggtaaggtggtgcgagctgctactgcttgcccgccgccgccatgcatggctcatgcatgcacgcgtggtggtcagcagctagcagcatgtggagatagagaaacgagatagagacaaggggggttaataagcctgtggtgattagtgttacatatggcgttttgtttctcaaaaaaaaaaaaaaannnncggnntcangnnnnnnnnnnnnnnnngnnngnncaagngtgtgtggttaattatcggcttgggggctggctaactacagcaggatacacagagttttnaagggtggtgaacttggtgatattatacagctgctgatctattcacc

SEQ ID NO: 21277 - DNA, 2505 bp, Oryza sativa
  Clone ID: TF_OsC1630_7
ctacccatgatgtaattctgactgcgctctctttccacaagtttttttctgaccctgcccctgttgctgctcccaccgttcatttccaaggacaatgtccaacggatcccactccgattgaaatctctgagtctcatatgggcccatatatcccatctcccggttactgttcaagtttaacacgacgatggcagtgctaccgccgtcgctgtgggcctctccctgccccaaccacaggacattctcttctctctctcccttctgctcaagaaatccaccagctgctgcatcaggaggtggagctcgctcgtcgtcttcgtcttcgttgcgcttcgtctcctcaggtgcccggaggagcaagaattgttgggggggcagcgaggtagacgcagttggagagccctcttgcatggatgcagcccactggcaccaggggctagggctggtgaagcccatggaggagatgctgatggcagcgaacgcggccgccggcgcgaatccgaatccggcggcgacggcgccgtcgtcggtgactgggggcgcactgaggggcggcggcggcggcggcgcgccgccggtggcaggtggcgcgggggcgggtagcacggagcggcgggcgcggccgcagaaggagaaggcgctcaactgcccgcggtgcaactcgacgaacaccaagttctgctactacaacaactacagcctccagcagccgcgctacttctgcaagacgtgccggcgctactggacggagggcggctcgctccgcaacgtccccgtcggcggcggctcgcgcaagaacaagcgctcgtcgtcgtcggcggcatcggcgtcgcccgcgtccgcctccacggcgaattccgtcgtcacgagcgcgtccatgtccatgtccatggccagcacgggcggcggggcgtccaagaacccgaagctggtccacgagggcgcgcaggacttgaacctggcgttcccgcaccacggcgggctgcaggcgccgggggagttcccggcgttcccgagcctggagagcagcagcgtgtgcaaccccggtggcccaatggggaccaacggccggggcggcggcgcgctctccgcgatggagctgctccgaagcaccggctgctacatgccgctgcaggtgccgatgcagatgccagcggagtacgccacgccggggttcgcgctcggtgagttccgcgcgccgccgccgccgccacagtcgtcccagagcttgctcgggttctcgttggacgcgcacggctcggtgggcgggccatccgccgcggggttcggctccagcgcggggttgcaaggcgtgccggagagcacgggcaggttgctgttcccgttcgaggacttgaagccgacggtcagctctggcactggcggtggaggcgcaagcggcggcggcgccggcgtagacggcggccatcagtttgatcacggcaaggagcagcaggccggtggcggaggcggcggcccaggcgggcacgacacgccggggttctggaacggcatgatcggcggcggcagtggcacttcttggtaatgcggcggcggcggccatgcatgcatgcatggctcatgcaaaagcctccgcgctgtggtggcgtgggttcaaattggagataggcagtagagacgacgagggttttaataagaggttggcattggcgataatccatcactgattcactgttactccgtataaggtgttttgatctctcttcttcttctttcccggtgttgcatcatcatcttggtgttctttcttctcccttttgctgtctttcatgtgattgttgatcggctttggtgctcaacacaacaaccgagctcacatgattcctcaaaaggatcatgatgcatgatcgatctctttctgaattctgatcttccagttctctccattgatcactgttactactagtcatcgcttgatcgatgtgtggttagagagctgcatgcgtcagtgcagtactagactagtagagcatgggaagcttctttttaggctggcttcgagtccgatggcgtgtacgtacgtggtacacaggcatgcatgtggtgtgtagctcattggttttgcaggggcattgtgaagcgaaggatgaagggaaggactcggttggggaggaagaaagaaaaatggacccccatcaccatgcatgtatgtcaaacttagctacagtatgtttggtaacggcaatgcatcaagcttttggttgtagatgtagatcttgggaagggtttgcagctgatctatgactttgtgttgatccaaacagtagtgattccatccttttctagcttaacttgttattgttgttaacttctatgggatgtgtagaggtcatataaagttatagtagtagtagttgcaaaaggggtttttgagcgcatgtaatttaatttgtatagtactcctactatcttattgttatatttacagccaaactataatgcacatctttttgctccttgtttctgaaaaaaaaaaaaaaaaaa

SEQ ID NO: 21278 - DNA, 1320 bp, Oryza sativa
  Clone ID: TF_OsC4233_1
ttttgcttttcttttgtgtttttttttcttgttgctctgtttttttttttttagaaaatagcaggaccattgtatgaaaaaaaaaagcccaagccttgataggagttatacacatgaaaaacaacccaaacttggttgagttagcccctctcgagagtaaaacacggccactaatctcaaaaagctaagattaacgtcatcattttcaccatataccccacgcgcaatttactaattaatcggaaactgatgaaatcatcatcgggtgtagttggaaacccccacacccacctgagccgccgccgccgccgccgggcgagtgggctcatgggaggttgaggaacacggcggtcgggtccgggtcggcgaacccggcgccggccggccagtaggacgccatgtcgaacgccggcggcggccactcgaagtgcaggtccgggtcggccagactcttggtgatggacgggtagtcggagaagtcgaggccgagggtgacggcggcggagtccggctgcaggaggtccgtgaacgagtcctcctccacggccgggacgacgagctccgtggtgatctcgctcgtggtgtcaggcgccggcggtgtcgtcgtcgttgtggaagtcgtcgtcttcttctccgacgtagcttcggtcgtcgtcttggcggcggagtcagcggcggcttcggtgaggacgggggtggtggcggcgaggggctcgggagtcgtgacgcggcgcttcttcgacgtcttctggcgcttggcggcgggtgctgcggcggcggcggatgacgaggaagacgacgacgacgaagacgaggacttcttgcgcgtgccgccgccgacggggacgttgcggagcgtgccacccttggtccagtagcggcggcaacacttgcagaagtgccggggctgggaggtgttgtagttgttgtagtagcagaatttggtgtcccgcgactcgcaccgcgggcacgggtcaccctcccccgccgccgccgctgccgccgtcgcagccgggccagcggcggcagcagcagtcgcagccgaaccaggctgtggcgtcgcgggagccgccgcgtagcccttgggacggcgcaggtcgacggtggcgaactgctgcgccggccggcggccggtctccggctgctgctcctgcatgcgcggcggcgccgtggctgctctggtccctccgcgcgcgcgcgccggtggagtcgggaggaaccgaggagcgggggcaagcaaatcgtcgaacgggtggtgggcggttggcggaagcgggagtctcttatggtcgcagtcgccctcgtgccgaattcctgcag

SEQ ID NO: 21279 - DNA, 528 bp, Oryza sativa; identical to SEQ ID NO: 11688
  Clone ID: TF_OsC373348_1

SEQ ID NO: 21280 - DNA, 1116 bp, Oryza sativa; identical to SEQ ID NO: 11690
  Clone ID: TF_OsC340203_1

SEQ ID NO: 21281 - DNA, 1106 bp, Oryza sativa
  Clone ID: TF_OsC23687_1
gcccaccctcaagtggggatcgctatcacgcgcccacagaaactgcagattaagcggcagagattgtagatagcgcgaggttattaaggccagcagtctgaccgcgcgcggcatgcccttctgctgctgcaaccgaccaaatggctcctgcggttgcctcctccccgtcactcgtgctctccgccgccgccgccaccgcctccaacaagcgcccggccgattccgatgcctcgccgccgcaccagggagatcgcacggggcagcaggagaagaagcagcagcagctggagtgcccgcgctgccgatccaccaacaccaagttctgctactacaacaactacagcacgtcgcagccgcgccacttctgccgcgcctgccgccgctactggacgcacgggggcacgctccgcgacgtgccggtgggcggcgcctctcgccgcggcggcggcggcaagcgccgcagggtctccgccgacgccgacccttcctcggcgtcgccgccgccacccacgacttccaccacggacgcgtacgccgacctcccagccggcttcccgttcctcagtgacggcgccttcctgccgcagttcggcctcgccggcgttgcgccggccgcgttctcttgggcatcggctgtccctgacttgtacaactgcgggatcgcgccgtgggacgatggaacggcggtcaccggcgcggcgtgggacaacttcgccgacatcgccggccttgatctcagctggccgccgccgggtaactgacgaacagtacacagctggtcgctcgtgttttggggggctccggttttagcaaagcagcctcaagtagtgcgttcttcgatcggtatgcaggtagtgtgttcttcgatcggtatgaagtatattttgctgagctagggattatgatataattattgggaatgtaattaagcagctcaattatccaacgtggtgtttgcagttttcttctctcaccaatttcatacgcttgcacaatgatgtggtgattatcattgggatcagtgaatcgtgatctgtagctggaagatgtgtttacgtatgtgcagtgttaatgacaataataagagtttgttgccatcaaaaaaa

SEQ ID NO: 21282 - DNA, 1482 bp, Oryza sativa; identical to SEQ ID NO: 11695
  Clone ID: TF_OsC265407_1

SEQ ID NO: 21283 - DNA, 1907 bp, Oryza sativa
  Clone ID: TF_OsC50405_1
gccacgcgtccgaaagatttcaagaaatccaaccaaaaatctcgcgctctcctatcctcgcgctccgcatgcctcctcctccttcggcgccgcatgagcgcctccgggttggcgttggcctgtcgtctccgggaggagtaatgcagagtgcggcggggaagtccgaaacggagtttgttcgttttggagcatgggggagtgcaaggtgggaggaggaggcggatgcggagtctgcttgatcaagctgttcggggagaccatccccgtgccagagcccggcgcctgcgcccgtggcgatggttgataaggaccttcaacacagtggcagcagcacgactgaaccgaaaactcaagagaacaccgttcaagactccacaagtccacctccgcagccagaggtcgtcgacaccgaggactcttcagctgataagaactcatcagagaatcagcagcagcagggcgatacggccaaccagaaggagaagctgaagaagcctgacaagatcctgccgtgcccccggtgtagcagcatggacaccaagttctgctactacaacaactacaacatcaaccagccgcgccacttctgcaagaactgccagaggtactggacagcgggtggtgccatgcgcaacgtgcctgtgggtgcaggccgacgcaagagcaagagcgtatcggccgcttcccatttcctccagagggtcagggctgctctgcccggtgatcctcctctctatgccccagtgaagactaatggcaccgttctcagcttcggctccgacctgtccaccttagacctcacagaacaaatgaagcatctaaaagataagtttatcccaacaaccggtatcaagaacaccgacgagatgccagtcggtttgtgtgctgaaggattgtcgaaaacagaagaatcgaaccaaacgaacctaaaggagaaagtttcagcagatagatctccaaatgttgcacaacacccatgcatgaacggaggagccatgtggccatttggcgtggcaccaccacctgcttattacacttcaagcattgcaattccattctatccagctgcagcagctgctgttgctgcatactggggctgcatggttccaggagcttggaacgctccatggccaccgcagtcccaatcccaatcggtttcatcatcaagtgctgcttctccagtatccacaatgaccaactgcttcagattaggaaagcaccctagagatggtgatgaggaactggatagcaagggtaatggcaaggtgtgggtgccgaagacggttcggatcgacgatgtcgacgaggtggccaggagctctatctggtcgcttattgggatcaagggtgacaaggtgggagcagatcatggcagaggatgcaagcttgcaaaggtttttgagtcaaaggatgaggcaaaggcatcaactcacacagcgatcagcagcttgccattcatgcaggggaacccggctgccctaacacgctcggtgaccttccaagagggatcttgacttgaacaacgccttggaaatttttatgctgccttctgctgctataaagacatagcgtgatacagctgaaattttgtacattagaggattgtaaagtaggtatgggagatggagtgtcagggtgtataacttaacatagctacaagcaagcccagtagctgtattagataacttgtacatagctatgtgggtttgagaaagatagggagagcaagttccccttataatatgtagataaataatataatgatttgaatatttagatcaaaaggaaaaaaaataacaataaaaaaaaaataaaaaaaaaatgtctgactccagggggggccccctgccccactgtagcactggaaatgtgatacttttctgcaataaaaaaaaaaaaaaaaaaaa

SEQ ID NO: 21284 - DNA, 1338 bp, Oryza sativa
  Clone ID: TF_OsC1634_3
tttttttttttttttttttttttttataaatgtctcctttatttattattgatattaccatccagtatgcatgtatacactccccaatttatccatgcaagttctataacaaaacacacactgacacacatgtaaggtgtatagatagtctacagcttgcaagaacatgagttatatgtgttccgatgtatctatgtcctttttcttccatcgggcggccggcttgctaggcgagttcggcaaggtcatcatgcagtgcggcgtttccgaggggacacaggacaaggcgcagggcttcgtcgtggcccgggagaaggttgaaccggaggaggaggaggaggaggagcagcgtgtcccggctgctgctacgtcggggcagcgcgcgtcgatcaagcgggaggccgcggaccgcgacgaggagcaacggcaagggggcggggacgcggcggggcagccgacgcagcggcggttgcaggactcggccgaggcgcgtgcggccgccgcggcgccgctgccgtgcccgcggtgccggagccgtgacaccaagttctgctacttcaacaactacaacgtcaaccagccgcgccacttctgcaaggcctgccaccgctactggacggccggcggcgcgctccgcaacgtccccgtcggcgccggccgccgcaagaaccgtcccctgggccccctcgcggtcgcccaccataaccaccaccaccgcgcggccgccggcttcgtcctcggcttccccaacccgtcctccccaacctccccgtcgccggggatcacgaacacagatcgactcccgaccgcgttcttcctctacaccgaccggtggccgaccccggagagccgccgcgttcggaaccttccatggggggatcttgaagaccatcttggaagagattttcttttatttgcctgcagcctatctgctggcttcttgaacttgaagcactgaagttaggtggtcctagacaatgctctatttttttttttctcagtcacagcatgggtattctatctccatttgggggaagtgtatgacatagctacttgtggagatatagttgtaaccataggtagcatgtaaatactatttagaaaatagctgtttaaatggatatagctagtatttggtttggagccaggagataagtaaggcccctggttttgtagataaataagaatcattagatggaatatatggcttgaggtatttcatttcttcatcaatctcctttaatagttttctaaggttgcgggtgtaatgtaagaatggaagtgatgaggttgcggaggcaagttgcgaactccgtgcaaaaaaaaaaaaaaaaaaaa

SEQ ID NO: 21285 - DNA, 1282 bp, Oryza sativa
  Clone ID: TF_OsC1630_5
atggctaagctagcttcatgcatgactgcatcgatctattcaacagctataaatccgaggaacaaactaaacagaaataataagggcatcgtccccgaggagcacgggatggggtcgtcgtcgccgtcggcggagctgatcgcgtgcccgcgggcgccgatgcaggcggcggcggcggcggccgaccgccggcttcgcccccagcacgaccagccgctcaagtgcccgcggtgcgagtcgacgcacaccaagttctgctactacaataactacagcctctcgcagccgcgctacttctgcaagacgtgccgccgctactggaccaagggcggctcgctccggaacgtccccgtcggcggcggctgccgcaagaacaagcgcgcgccgcccaagaaggccgccgcccacgcccagcccgcggtggcggtggcggcggcgctgcaaggccgccacatggagaccggactccacctgtccttctccgggatgcagcatcatcttgcgccgccgccgccggcggcggccaccgcggccgacccgctctgcagccttggactatttgactggaagcagtacgaccccgtcttcgccggctccggtggcggcggctcccccgtggcggcgctggagagcgctggtggctcggaggcgcagttcatgggtgctggcatgatgggcattggcggcggcggcgtcgcggagtaccatgcgctgagcgcgctccggttcgcggcagggctcggcgatcacctggcgctgccgttcggcgcggtgcgggcggagcacgacgccgtcgaggtgaagccggtggcggcggagaggctgctgtcgctcgagtggtgcggcgaggcgagccgcacggcggcgccggagagctccattagctcgctgggcgggctgggactgtggagcggcatgatcggcggcgggcaccatcaccatggctcctccgctgccatctgaggcgaagcaagctagcatgcatgcaatgcgaaggacacgtgatcgaacgccgcgagccgctgcaatctgtgcaagaaggaaaggattagcggtttgctaatagcattaacaaagtatgactacgtagaattgtttggctttaatttctttgctgctgttttccatcttctcccccactggtaatctcctacttattttcgtcgttttgtctttgtatttcccaactattccaagtcctggtgatgttctgctgttgttccagctcatgcatattgtcgtgcatggttctgttaaacacgatgctggcttgctagagatt

SEQ ID NO: 21286 - DNA, 1212 bp, Oryza sativa; identical to SEQ ID NO: 11694
  Clone ID: TF_OsC66169_1

SEQ ID NO: 21287 - DNA, 1627 bp, Oryza sativa
  Clone ID: TF_OsC197627_1
ccgggctgcaggaatcggcacgaggcaacaccatcatctgatccatttccacaaagcttctgaaagccaacacatacctcactgccttgccttcttctcagcttcaagaagccttttgagcttgtgatttctacatcatccatccatttcatcaccatgatccaagaactccttggagggacaaccatggaccagctcaagggcgccagcgctctgaaccacgcctccctgccggtggtgctgcagcctatcgtgtccaacccgtcgcccacgtcgtcgtcgtcgacgtcgtcgcgctcgtcggcgcaggcgacgcagcagaggtcgtcgtcggcgacctcgtcgccgcacgggcaggggcagggtggcggcgcggcggagcaggcgccgctgcggtgcccgcggtgcaactcgtcgaacaccaagttctgctactacaacaactacaacctcacccagccgcgccacttctgcaagacgtgccgccggtactggaccaagggcggcgcgctccgcaacgtccccatcggcggcgggtgccgcaagccgcgccccatgccggcgccggtcgccaagccgcccatgtcttgcaaggccgcgccgccgctcggcctcggcggcgggccagtgtcctgggcctccgggcagcaggccgccaccgcgcacctcatggcgctgctcaacagcgccaggggagtgcagggccacggcggcagcaatgtccaccggcttcttgggctggacaccatgggtcacctccagatcctgccaggcgctcccaatggcgccggcgccggcacggcggcgtcgctctggccacagtccgcgccgcggccggtcactccaccgccgccgcacatggactcccagctcggcatggggacgctgggccaccacgacgtgctgtcgagcctcggcctcaagctgccctcgtcggcgtcgtcctcgccggcggcgagctactacagcgaccagctgcacgcggtggtgagcaacgcggggcgcccccaggcgccgtacgacgtcgccaccgcgtccctcccttgcaccaccgcggtgacctcactcccgtcggcgctgtcgagcgtctccgccgccgcgccgaccagcaacacggtcgggatggacctgccacccgtgtcgctcgccgcgccggagatgcagtactggaatggcccggcggcgatgtcggtgccgtggccggacttgcccactcccaacggcgcgttcccatgagatagacgacggcgacgacgtcgtctcatgcaagcatgacattactagctagtgtagctctcgatcggtttagctttaatcatcatcgatcttgtgtggtttcggttaatcagtgtgaggactctgaggggtttaatcaagggtgttttagttactggtgttttggctagtccgtgggcgccggccgccgcccctttttttctgtttacttattattaggtttttacctagggtttggtggtaactgggtatagtgtttaagtcgtgatcaatgcatagatggggttgtactatgagatgtgtacgtgtgttgtcggtttcgttcaggttgatccatgtatggatgtaaggtttacattccctgcaaaaaaaaaaaaaaaaaaaaaaaaaa

SEQ ID NO: 21288 - DNA, 979 bp, Oryza sativa
  Clone ID: TF_OsC4233_2
ccttgcaaacttaagtgataataaatcttgtagctcagatttaataattacatagttcgttcatcttcctcctaagttagcatttggattggaaaataaactagaatctgatgaaactgagatggagcagaggtgaaatcaagaacttgatcgataaaacttggaagttttttgctaaccatcctctcgttcgtccgggagaggcttgtcatggcaggttaaggaacagtgatggatcggtgtcggcgaacacgccggttggccagtacggcccgaggtcgcagcccgacggccactcgaacgggctcgtgtccaggtgctccttcccgccgccgccgccgtcggcgacgccgagcccgagcgccaccgccggctgtgtcgctgccgccgcggtgaggtcttccggggctttcttggttgtggcttctggtgccgtcggtgcggctacgtcggcagcgtcggcggtggtgggcggcggcggcgcaggcacgggctgaggagggggcggagagacgcggcggcgcttggagttcttggagcgcttggggctcttggctggcgaagaaggcgacgacgacgatgaggcggcggcggcggcggcggaggaggaggaagtcgagctcttgcgggagccgccgccgacggggacgttgcggagggagccgcccttggtccagtagcggcggcacgacttgcagaagtgccgcggctgcgacgtgttgtagttgttgtagtagcagaacttggtgtcccgcgactcgcaccgcgggcacgggtcgcccacgccggctgccgcctcctccgccgccggcgtcagctgcgccgccgccgggtaccccttcggccggcggaggtccacgcccgcgaactgcggcgccggccgtcgccccgcctcctgcatgcgcgcccgcagaaaagctcggacgaacacgcgcgcgcgctctctcgtcggtgcagtgcaggcgagcggacgcgtggg

SEQ ID NO: 21289 - DNA, 1002 bp, Oryza sativa
  Clone ID: TF_OsC191412_1
atgctgccgtacgcgccgcggccgccgtcgctgctggtggatcgccggtacaagcagggcgccgaggcggcgcccaactgcccgcgctgcgactcgcccaacaccaagttctgctactacaacaactacagcctcagccagccgcgctacttctgcaagggatgccgccggtactggaccaagggcggctcgctccgcaacgtccccgtcggcggcggctgccgcaagaaccgccgcgggaagtcctcgtcgtcggcgcggtcggcggccgacgccgtctcgagcggccgcgacgcggcgttcggccaccggttccccggcccggtccggcctgacatggtcctggaaggcatggtcgggaacccggcgaaccccggccaggcgatgcccgacgtcgccgccgcggcggacggctcgaccatcgacctcgcaatgctgtacgccaagtttctgaaccacccgccgaccgacgccgggctcggcgccgtcacgccggagtcgggagggcacgtcgacgaggcgttcgacacgttcagcgcgtccagcgatctgagccccggcatcctggcggcggcgtcggcgcagttcgacccgaaccaggacgggttcggcgagtggtccagtccagcgagcggcaacgacccgacgagtactgcaaccaccgcaaccacctccatgctgtgcacggacgcgagcgtgcaagccgcgctcggcgagctcaacttcgccatggatcagagctgcttcgactcgctaggtttgcccacggacgtcgccggcgccggcagcctgtcgtcgtggtgctcgatcgtgccgagcttgtcgacatgggaggagcccaagtacgactcgttggattcgtttcccgacgacgccatgagcctccatgagtgcatgatcggcgctcctgatcatgattggagcgtggattgccaaggattggaggctctttacatgccataaatatatatacgattaaaattttttcttctaaaaaaaaaa

SEQ ID NO: 21290 - DNA, 2812 bp, Oryza sativa
  unsure (1)..(2812): unsure at all n locations
  Clone ID: TF_OsC8761_1
gcaagagttcttgtaaaaatgccaggacaggtgatggaagctgcgctgcagcagctgccggcgtccatggcgtcgggatcgctcctgctgcctcccgcctgcctccagcatccgcttccggcggcggcggcggcgtcaggcggcgtgggagggagtagcagggagcagtgcccgcggtgcgcgtcgcacgacaccaagttctgctactacaacaactacaacacgtcgcagccgcgccacttctgccgcgcctgccgccgctactggacgctcggcggctccctccgcaacgtccccatcggcggctccacccgcaagcgcccccgcccccccgtgcgccgcccgcccgtccacttcaccgccgccgccgccgccgccgncgncgntgcaccgnctcatcaccatcatcatcatcacggcgggccgctcacgccgccgccggcgacctcttcttcctcgcagcaggcgggcctgctcggctcgctgttcgcgctcggcgcggcgcagcttccgcaccgccgcctcgccatcgccattcccctcgcttccctcctcctcccgacaagcgccgccatgctccagcctccgattccccagaccaagaaacgggaggatggtgggggtgcggaggagggcgtccggattcgaggccttccctcccctacctggtaaggtgttcgtcgaggaggcaattggagctgaatatggggaaggttttgagacatttaggatggatggaccactcaaggtcgatgtggattatctgaacgaaaaattgcaagaatgcttccttcaaaggataagacatgctatgaagccagatgaagcatgtgggcttattttctcatgggacaacgtaattgctgatacagactcactaaagttggatgcctggagacagcttgctttggaagaagattctcagtggtatattgtctgcaaggtttgtgtttacctcactgccagggatgctaccttgatattgctaataaatttatttcatgcagggaaggatatcccaaatgctggtcatgtccaaaagagtattcttcatggtgctgccgaccatgtgcttagaaaggttttatgttgggcaaaagatgaaagtcaaatggaaagactgaaggcacggcttatagagttatactacgaaaatctcttcaaacttgatacaccagtaaatggattgcgggaatggttggatgctgtccagacagcaggcatcccttgtgctgtcgcatcgtccctggataggagatgcatgattgaagctttggatcgaatggaactaagcaaatacttcaaggcaattgtgactgacgaggatgatatggagtcaatagcacataggttcctctcagctgctatgaaggcatgcttctgctccgcttcaaaatatttagctgttttcaggatatactgctcacatgtttgtcaaacgtttctcttagaggcgtaaccgctgctcacaactgataccatgatggcagttgcactcattggtgctcatcctgcgtatgagctggtacaggctgatctcgccatcgcaaaagtacagggagctctcggtcatcacatcgcaaaatacagtgagctctcggttatcaatctcagaaggttgtttgcacataaggggttaagtttcatggacttgcagaagcagatcatcgagagatataggcaagagctggaacttgctgaacagcttgagcaaatattccagaggtcgcctcctagcaggctagtctttttgcaatgggagatttgctctggtccagcaaaaagtatctcgagacggcggattcggcgagatgtggagatcgaatctgtcgccgacgactctgccaattctgtccagaacatcaggctggtgattgacatcggcgacaggacgatccaggtccctctcaatggccacaccgtcgcgcagaacatcggccgtcaggctgccgccgccgtcgccggcgattcgtcagccggcggtgtcagtgagaaagccggtggcggcggcgaggagtggctgcaagaacaggacggcttgttgagcatgcgcgggtggctgatggcggtggccacgctgttcgccgccatggcgttccaggcggcgctgcagccgccggggtggatgccgaggccgcgcgactggttcgcggcgctgctcgccgccgacccggcggcggccgccgtcacgagggaccaggccgggaaggcgatgctgtacctgatcgtcaacacctgcaccttcgccacgtcgctcgccgtgctcctgatgctgctcgccgtgggcgacgccggcggcggcggcggcggatgcgcgtcgaggagggtcaccgcgaggctgatcgccaacatgatgacggccgtggcgctgttcgccgcggcgacgttcgcgctctgcgccgccgacgactaccggctcatggcgttcgtcggcaccgtcgtcgccgtgtacgccgccgtcaccgtcgtgttcgtcaggtgcaaccttgctctgccgttccggagaggcggcggcggcggcggccatggttgttgtagctgggtgtcaagattgtaagtcacctcccaagaggaagctgacagtagacaccatcttctaatgaattctttacctcccaatactgaaaaagagagaaaagaaaatagcaccatgcatcctccctactgtgctgtgtatatagcattccatgttggttagattacatagaaagctgatgttagatgatctgttgttgcatacctccattctggatgtactagatgtaaactgatgtttaaccattttaatcatgataaatactaccagtctacc

SEQ ID NO: 21291 - DNA, 522 bp, Oryza sativa
  unsure (1)..(522): unsure at all n locations
  Clone ID: TF_LIB4309-022-R1-K1-F5
gctcaccacttcacctctctctctctttcttctccctgtaacctcccaattcaaaaacaattataaaccaaacttgattaatatatatttctttatcatcatctcttcgaaatgcaagatattcatgatttctccatgaacggagttggtggtgggggagaggagaagaggaaggtttttnnntggangaatcggnggnggaggaggtggtgatcgaaggatgagagctcatnagaacaatatacttaaccatcatcaatctctcaagtgtcctcgttgtaattctcttaacacaaagttctgttactacaacaattacaatctttctcagcctcgtcacttttgcaagaactgtcgtcgttactggactaaaggtggtgttctccgtaacgttcccgtcggaggtggttgccggaaagctaaacgttcgaaaaccaaacaggttccgtcgtcgtcttcagccgacaaaccaacgacgacgccngatgatcatcacggggaggagaaatcgagtccaggatc

SEQ ID NO: 21292 - DNA, 1449 bp, Oryza sativa
  Clone ID: TF_OsC1633_1
gcccctccttccttgatggtcttggagctccaccgcggtggcggccgctctagaacgggccgctctactgggcgcccggcctgcgggggtggagctagctcgatctcgccgcgcgcgctcagctcgtcgacaaggcagcgtgcacccaccaagatagcgggatgatccagtgagcgcgtggaggcggtgtttgattctagattgttctagaaccgaacgagcgagcttagctagctagctagctgctgctgcttcgatcgatcggtcgttgcctcatgcaggagttccagtccatcccggggctcgccgggcggctgttcggcggcgcggcggcggctgacatccggcgcgcgcaggcgcagcagggcccggcgtcgcggtgcggcgggataccgtcgccggaggcggtgaagtgcccgcggtgcgagtcgaccaacaccaagttctgctactacaacaactacaacctctcgcagccgcgccacttctgcaagagctgccgccggtactggaccaagggcggcgtcctccgcaacgtccccgtcggcggcggctgccgcaagaccaagcgtagcggcagctcgtccgctgcgtcctcggccccgtcgacgccgacggcggcaactgacaacgccaagaaccagcggcgcgcctcggcgtcgtccccacgatccagtagcggcggtagcggcaacacgagccccacggccgccgcggcgacgaccccgacgacaccggccacgccgtcgtcgaacaccatcgccgtcataaaccacgcgacgacgacgacgacgacgacgaaccccttcccgacagacgtgccacctccggcgccgattttcgccgaccaagcggcagcgctcgcgtcactgttcgcccctcctccgccgccgcctctcccggtgttcagcttcgcagcgcaggcgaagaccgaggacgggattgcctccgttctactcgccggacagacgacggcgcccactgccgccaccgttgccgacatgacgccgttcacgtcgctggacgcggggatcttcgagctcggcgacgtgccgccggcggcgtactggaacgccgggagctgctggacggacgtcccggacccgaatgtctacctaccctagctcggtgtagttactcatcacgatcaccttgattaagtctttgattaagctgtggttaaaacgcttcttaaggacgaccactagctaccactagtatgtcttttactactacattcatctactctactgttctccctgtaagtttttttcttcttttccttgtcttctctagctgcacttctgctgctgcaaaggtacgtgtaactgtccaagaaagctaacatttgtgtatctactgcacgcgtgaaaaaaaaaatctgaattggatcgatcattgttgcaaaaaaaaaaaaaaaacagaacgcccagcttattcccttagtga

SEQ ID NO: 21293 - DNA, 246 bp, Oryza sativa
  Clone ID: TF_LIB3434-040-P1-K1-B11
gagaaggtgatccagcccgacggacagcggggcgtggaagagagcgcggcggcgcaagcgccacctcatccgcatccgcctgcgccgccggtgatggaggcggcggcggcggcggcggggacgtcgcagactctgcaggcggcgggcggtggcggtggcggaggagggggaggagggggagagccgctgccgtgcccgcggagcgggagcagggagaccaagttctgctactgtaacaactacgac

SEQ ID NO: 21294 - DNA, 1676 bp, Oryza sativa
  Clone ID: TF_OsC1630_1
gttgcgcgcggtgggcttgagggtggcggcggggtaggaggggagcgggggctgtggtggcgagcggcaatgcggccggcgctcctcctcttcttcatcgtttcgcttagcttttctttcttcttcgtcgtctcggttcactcctccgttcgatcgactttgcttgtttcaagcaagctagatctctcaccaacaggaggtgatcaatggcgagcggcggcgcattatccccggtggaggagaagcccacggtggtgaagacgaccaaggcggagcagcacgaggaggaggcggcggtggcggtgaagagcgcggcggagatgatgaagaagagcagcccgtgctgcccccggtgcaactccatcaagaccaagttctgctactacaacaactacagcatggcgcagccgcgctacttctgccgcgagtgccgccgctactggacccagggcggctccctccgcaacgtccccgtcggcggcggctgccgcaagagcaagcgctcgtcggcctcgtcggcgtcggcgtcggcggcgtctcctcctgctcctgcggtgggcgccgcgccaccggtggtgccggcgctgtcgtcggcgatcagcaagctgctgcagtcggagcccatggcggcgccgtgcgcggacttccccaacgtgctcccgaccttcgtgtccaccgggttcgagctccccgccgccgccggcgaccgcctctcgctggggtcgttcggggcgttcggcaacctgtcggcggcggtggcggctcccggcggtggtggtgggtcgtcgacgaccacgtcgttcatggacatgctgaggggagttggagggcttttcgacggcgtcggcaacagccatcagatgggcggcaatggcggcggcggaggcagctactacgcgcctctcatcaccggcgccggcaatggcatgctgatgccgccgccgccgctgccgccattttctggttctctgatgcagcatgggatgcaggggctgttcgccaatcatgcgatgggaggaggtggtggtggagtgatgaacgccggcgaggacggcagcgtgatggcggggctgggaggaggccagtggccgccggcgcttggtggtgcagacgagcagcagggcggcggcgacggtggcgaagctgtgatgacgaaggacaccggcggcggcgcatcgtcgtcggcgtcgaggccggactacttctacggctggaacagcgccgccggcggcgtcgtcgctggaggcggcatcggcggcaacgccgccgctgccaccggagcaacgccatggcagggcctcatcgacagcagctcggccatgatgtaagctcaatcaaatcaaccatgccaaggttggagagagatctcatccagaagttgttgctagcttcttggaatgatttttcttcagcttcatcgatcgctttagttcgttttttatccgtggatcaaattagttcgctctttggaaaaattcgtcgaaacagttttaaattttgctagacaaatgaatgtcgtcgtcgtcatcgtcgctcgtttacctgtaattagcttggagttggggttgtttgattgacctcatggaaccatgcaaaaggttctcatgtttaaggggagttaattaaatgtacatcattggtcgtgacattgcttaattgccgttggtttgtttctt

SEQ ID NO: 21295 - DNA, 2093 bp, Oryza sativa
  Clone ID: TF_OsC44472_1
gtcggatctctctctctctgtctctctccctctctctctcgcccatgtaccatctccatggacgacctcgccgccgcctcccctcctcacccgccgccgccgccgccggaatcccacgtgcctccgcccccgcagacgccggagaaggattcatgtgaggatacaggagacatgaggatcagtgaagaaaagccatgcacagatcaggagttagatgctgatcagatgaatagttctagctttaatagttccagcgagtgtgagaatcaaacacctagcaatgatgaaatgactggatcagagtccaaatctgaggcagctcaaacagagggtggtggatcgagtgaagagaaggtcctgaagaagccagacaagatcctgccttgtcctcgttgcaacagcatggatacaaagttctgctactacaacaactacaacattaaccagccaagacatttttgcaagagttgtcagagatattggacggcaggtggaagcatgaggaacctccctgttggtgctggtaggcgcaagagtaagagctccactgcaaattaccgcagtatattaatcacgggcagcaatctagctgctcctgctggagatgctcccctctatcaactctctataaaaggagatcaaacagcaacggcagttaaatttgcacctgattccccactctgtaattccatggcctctgtgctgaaaattggagagcagagtaagaatgccaagcctacctcaacagcacaacccagaaatggagaaacccagacctgcccggcttcaggaacaacttcagatagtccccggaatgaaccagttaatggagcagttagtgggcatcaaaatggaattgttgggcatagtggagtccctcccatgcatcccataccatgcttccctggtcctccttttgtgtacccatggagtccagcatggaatggcattcctgccatggcaccaccggtatgcacagcaccagctgaaccagcaaattcttcagacaatggaagcacagctagtgttcagtggagcatgccaccagtgatgccggtaccaggatactttccggtaattccatcttcagtttggcccttcatttctccctggccaaatggtgcatggagctcgccatggattcaacctaattgcagcgtgtcagcttcatctcctacaagcactagtacatgttcagacaacggctctcctgtcctaggaaagcactccagggactccaaaccgcaaggagatgacaaggcagagaaaaacttgtggattccgaaaacgcttcggatcgatgatcctgacgaagctgcaaagagctcaatctggacaacccttggcattgaacctggtgaccgtagcatgttcagatcattccagtcgaaacctgaaagcagggagcagatatccggtgctgcacgagtcctgcaggcgaatccagcagctctatctcgatctcaatctttccaggagacaacgtgatgtatattgaagaaatcgtgtgacaattgtagaacatgttactactataatttaagcaagtgctacagcctgaaggatgattggcgatgtaggcgctgctgcaaacatggaggcagcgtgatctgtactattgaaacctgaagagtactattcttgacatttttctataatttgcctgtggagcatgcaccagtctactgggttcatgatcaggctgtcagcatatgttttgttgtacaataataataattgttaatagctttgcctaaaggatactgatagtattctgctgatccttcagctctgtgatcaatggcccatatatttacctgacaagtttcagaaaggaaaaaaaaaaagatctgctgcctgacaagaggttcaactccgaagaaatggttagcatttttgtactgcgtctgcgtgatgttaccttgttgctttctttggttctctaatgatcccttagttacctctatgatgacttgcattagttgaagtacctctgtccttttgttcggctgtgttgcctttatactagcatctgtgtagaatgtagaccgaagtctcaagctttcctttttgattcagtacgcttattgtgg

SEQ ID NO: 21296 - DNA, 1459 bp, Oryza sativa
  Clone ID: TF_OsC161689_1
ttaacatgaaccatctagaccgggcatgtcatcttgcagccacccgttccagtactgcacgccgccgccgccgcagttcgcgtccggcgccgccgtcgacgccgctccgaccgcgccgccgacatcgccggtggcggcctgaggtggagccgcgaacgccgccatttgctgccacgcggtcaggtcgatgctgtagccgcctccgccaccggcggtagccggcgccatcagcatctgcctcaggagatcggggaacgacgacgacgtcggcggcgccgccgccggcgcgacgacatgggcagaagccgccgtcgaggctgtggcgccggccttgcctccgccggcggcgcgcttgctgttcttgcggccgccgccgacggggacgtcgcggagcgtgccgccctccgtccagtggcggcggcacgccttgcagaggtaccgcggctgcgtgcggctgtagttgttgtagtagcagaacttggtgttcgccgagccgcaccgcgggcactgcctcggcggcggcctcggcagcggcgggtgcccggcgtgcctgccaccctgcctcggcgccgccgccgcgttcaccgcctcgacgccgccgccgccaattccgccattggcagcagcggcgtatccctgcccctgcacgccaagatcgtcgtcgaacaccatcagctcatcgtcaagatcagtcaaccatcgagctaatccgtgacgtaccatgagaaggggaggaggaggaggaggaggcctaggcggggtcaggtaagagaggggcgacgaagcggaagaggaagaagagcccaggaacggcgacgacatggctcccgcgacgccgcggcgagggccagggtagcttcttgccggcggcggagacgacgacgacgagctgcgcctgcgcgcgcttgctccgcgccggggacgacgacgacgacgacgacgaggagtagtagtagtcgtaccacggtgaacccctgcgcatgtcggaccggtgagccgccgccgccgccgatcgaacactctccttcttcttcctccccccaaccagctgctgctgctcttctctcctctcccctcccctcccacctgtcctcccctctcccctcccaccggtggcagtggtggcgcaccctggcgcggtggccggagggaggggggagggcagtggcggtggcggctgctgctcctggctatggctcccctccctccctcccagatctggcccgaggaggaaggggggagggcggtggccagcggcgctctcctccctcccttctagatccagccggaagaggggaaccggccggcggcggcagtagcagtggaggcggcatgagggcgaaggtggcggccaccagaggcacggcggcgcacgacaactaggaggagagtcggcggcaccgctccccttcctccgtccctccctcccaaatccggccagatgaggggagccggccat

SEQ ID NO: 21297 - DNA, 957 bp, Oryza sativa
  Clone ID: TF_OsC69565_2
tcacagtatatttccagacgttgacaagtcaaacgccggcaggtcggaccacccgccgccgccgccgccgggagcagcactgccgccggcaccatcaccaccgccacggtggccgccgccgcctccccagaactgcaagcttccacggagaccgaggaactcaatcggcgagctcgccgtcgtcgttgccgcagacggtggtgggtggttgtcgatgtcgtccatcttcaccgaggccatctgcgtgatgagcccggcggagccggcgacgctggcggcgttggccggcatgtcgccgccaaggccgcccgccgcgacgtcgccaaatggatacgataccccggcggcggtggacatcagcggcggtggatggactgcggcgttggatcgggctaagaacgggaagtgcgggaggcgctgccgttcgagcccgaggccgtcgccgccgccgccgccgccgagctggtagtcgacggcggcagccgcgtgcagcgagctgagctccggaaaccctaacctcgacgcgccaccaccaccaccaccaccgatgatactaccatggccaccgccgccgccgccatcaaacccgaaagggagctgcagctgcgcatgcggcggcgccatgacgccgccggcgacggcggcggcgggcttcttggagttagagggcttggttccgcgcttgttgcggcggaagccgccgccgacggggacgttgcggagggcgccgccgcgggtccagtagcggcggcaagccttgcagaagtggcggggctgggtgagggagtagttgttgaagtagcagaacttggtgttggtggagtcgcagcgcggacacttgagccccggctccggctgcgggatcttcgccatcctggcgcgctccgccatcgacaccggccgcgccgaggaggcgccgccgccaccactcaccggaaggatcccggcggcggccat

SEQ ID NO: 21298 - DNA, 1784 bp, Oryza sativa
  Clone ID: TF_OsC7030_1
cagacagtgacagtcctcagttcattgaccttcacgaccgctcgtccggtaaccaaaacacataagctcagcttcagctcagtctcctccatggagcccaagtcttcttcttcctcacactatctgcagccatctgcaacattgccatcaacaagaagaaactcattccaaggagtgggagctgaagctggaggaggaggaggaggcatgaacccattcgggcccacattcagtgacccactctgcagcctcaacctcaaggagacctcagagttcgtgaggtcatccttccccatggctaccatggcgaggagcaacagcagcaacggcgccaccggcaatggcggccatggctaccaccgcgagacctccacggcctcttcatcctcttcctcctcggcctcagctcagaggaggcgagccgagcagcagcagcagcaggtgccagctactccagggcggccattgctgttcttcaattcctcgagccctgcacatcaccagctcgtctccgcgaggaggtcggtgccttccaagtgggaggatgcggagaagtgggtgaggcaggcgtcgtccgaccaccatggcggccatcaccaccaccatggcaagggctccaagcttcaggaggagaagagggcgtcggcggtgaggaggtcggtggatgctgacgtcactgctcttgctctctacactgctcctgctgcagaagtgttcctcaaagacaagttcactgacaatgtggagccctccaaggagagcttcgtgttccggagctcctactgcgagccaacaaagaacacggcggcgcaggcggtggccgccggcaacggcatcgaccaccggcgtgacatcggcacggagatgactccgctgggcagctccaccacctcgaggtgccacacgccgatcaagagcacctcgccggcgaggcacaacacgccggcgagccggtcgggccccctggtgccgtacgccggcggtggcggcggcgccggccaggacatctcggacctcgccgactgccacttcgccaagctggacctcggcgcgcagttcgacgccatgctcatcaactggagctccaaggaggaggaggaggaggaggtgtccaagagcttgaggcacttcgaggccagcgtcgccgccgtcggcgagaagcgcggcggcgccggcgactgccggtgggaggacgatgacagggccaagagctgcataaggtatcagagggaagaggcaaagattcaagcttggatcaacctggagagtgccaaggctgaagcacagtccagaaagctagaggtgaagattcagaagatgagatcaaacctggaggagaagctgatgaggaggatgacgaccgtgcaccggcgcgccgaggagtggagagcgacggcgcaggcgcagcacctccagcagctgaagcgcgccgccgagcaagtccggcgggccaaggccaccagccaccatcaccaccaccaccacctcgccggcagcaacgcctcctgcggctgcttcccctgcaatggcagcaacaacatcatcagtggcaacctcctgaactactattagatatgatcagctagccgccatggaagaaggatcaagaatgccaatttgttcgggagatcaacgggttcttgttgattgtagtggatgtttgggacgtgtgaagatggagatgtgggagataatggtgtcatgtgtatcaaaaaactctgatttttcaaggtgatatataccagattgctgaatgccaaatgtcatgaaaaaaaaaaaaaaaa

SEQ ID NO: 21299 - DNA, 1318 bp, Oryza sativa
  Clone ID: TF_OsC200145_1
caacattcatggctgctctattcaaagctgtggcatggagtacgagaggatacacaaagttcagatgggagtgatgtctccaaccaagctgaggatgaagctgctgggatcccatggcggcagcatcggcagggttgacgaggcaaagaagtcgccgcgagcgtcgccggcgaggctcgacgccgacgaggacgacgacgaccaccccaagaacagcctcctgccccaagaactcgacgaagattatcccaaggaccagtcggattcttctcgctcgcgctccgacgcgagccatgggagagctggcaatggctacgacagcggcggcttcgagttctacagggaggagaggccgccgccaccgccgccggcggcggtggcggtggtcggcgggacgttcttcaggcaggtgccgtcaaagtggaacgacgccgagaagtggctcgccgggagacacgtcgtgcactccaacccaatcttctccaagaaggccgccgccgcagcagcggccgtgtccggccgcgttgcgccggaggcctcggcgtcgtcgtcgccgccgtcggtggcgagcaggcagcgccagcagaagaggctccgcgtgtcgtcggaggcggcggcggtgtcgatgcgggacgtggggacggagatgacgccgatggcgagcaaggagcagtcgcggagcggcacgcccgccggcgccgccacgccgtcgctgagtccgctctgctcggtgccgacgagcccgaggggcgccgcgtccgcgtcgtcggcgtcgtcggagcgggagctccagatcaggacgcgccgcgagatcgccgcgctcgggctgcagctgggcaagatgaacatcgcgtcgtgggccagcaaggacgacgacgacgagctcccccgcgcctcgccggagaagagaccgagaccgagaccgagacctcactccggcgacggcggcggcgaggccaagaaaagggagttcgaggcgcgcgccatggcgtggcaggagacgcacaagtgcaagctcgcgttgaggtttcagaggaaggaggtgaagattcaggaatgggagagctgccagaaggccaaattcgaagccaagatgaggcacgcagaggtgcaggcagagcagatgaaggcgagggcgaagcagaagctgagcaggaggctgtcggcgttgagccacaaggcggaggggaagcaggcgagggtggaggctcgccggagccggcaggcggcgcggctggcccgccaggtgcaccgcatccgggagaccggcgccgcgccgtcgcgcctccgccgctgctgcagctggctgttcctctga

SEQ ID NO: 21300 - DNA, 855 bp, Oryza sativa
  Clone ID: TF_OsC75556_1
gaacctcgcatccatccatggccaccaccgccctctgatccgatcgatactgatcagccagtagctatgctgggttcggaccagctcgagcaccgcccggcgccgtcggctccccgcgccgagccggacgatgtcgccgacgacgtggaggtggaggcgttccgggacatccacccggagccgtcgcctccgcatctaccgccgccgccgctcaggcagccgtcgtgggacgccgcgagccaccgctcgctgtcgtcctccggcgcgggcggcggcggcgacgtcgagctgttcgccaccatgagccgcgagttcaccgccatggtggcggccgggtcgtcgtccgcgcccagccccgacgttcccggcgacgcccccgccgccgccgacctgaacctgctgcagctggcgcgcatcggcgagaacgagccggcggccgaggcgaacgcgctcgccatcgtgccggcggcggcgggcagcggcccgccggcgccggtggagcaggtgaagaaggaggaggtggaggcgaaggtggcggcgtggcaggcggaggaggtggccaagatcaacaacaagttcaagcgcgaggaggtcgtcatcaatggctgggagagccagcaagtcgacaaggccaccgcctggctcgccaagatcgagaggaagctggaggaggagcgggcgaaggcgacggagaaggctcgcaacgaggcggcggcggcgcggcggaaggcggaggagcggcgggcgtcggcggaggcgcggcgcgggaggaagacggcagaggtgctcgaccgtgccaacttctgcaaggccgccggcagggtgccatccaagcgctccttcttctccttctaa

SEQ ID NO: 21301 - DNA, 1404 bp, Oryza sativa
  Clone ID: TF_OsC44865_1
tttttttttttttttttttttttttttttgtttttttttttttttttttttttagtgtcgaactgaatgtttgcaagatttgagcaaacaaaccatttatgccgtatggataatacaagccaggggaaaaacaagggccactctgtgatcacaagcagcagagggcaacagcagcaacagcaaatatacaacttgttttaaaatcttttttacaattaggttctcggatgcgcacagctaagcaaacatcacacgaagaacggcagctagattaatccagcacacaaaaggcactgaaagaaacagagcagcagcagatcgatcaagatcgaaggtttgcagaggctggctgcaggaagctagaagaaggatcgcttggtaggcaccctcccaacagccttcatgaagttggcgagctcgagcaccttggcgagcttgaggcctctcttcgcctccgccgacgccctcttctcctccgccttgcgccgcgccttcgcgatgtcgttctgcgtcctctccagcgccttggcgcgctgctcgtccagctttctctcgatcttttggtgccttgccaaggctatctcgatcttcttgagccatgcggatgctttctcgacctgctcggtctcccacccgttgatgacaacctcctccctcttgaaccggttgttgatcttggccacctccgccgtctgccacgccgacaccttcgtctccacctcctccttcttcacctgcctcgcctccaccggcggcgccggcgatggccctgccgcggggacaacctccagctgggacgccctgctcctggccggcgtggcgatcgggtggctgtccggcacaattgccagcgggttggtctcctccagctcgtcctcgccgatgctggtgagctggtcaccgccgttgttgccgtcgttggggccagtctgcatggtcgtcccggcggcgaccatggccgtgaactcccggctcatcgtcatgaactgctcctcggacgacacggaccggtggctgctggccgtgtcccacgagtacgcggcggacccgagccgcgtgggtggcgtcgtcgtcgtcgtcggcgacggcggcgtcagagggtggatgtcgcggtacgtggtgacgacggtgacctcctcgtcgtcgcctgcagcgacatcgtcggcggcggtggcgggcgccgacagctgtagcgaaacctccggctccggctgcggcggcggcgcgtgctgctcatgcaacatgtgctacccgcgcggcggcgatggcggtggtcgtcgtggaggctccgccgccgtgcatccgaagcgccgccgtggttgctgctggcgagctgaggtggtgcgtcgtgtcatggaggatctgcgcgcgtattatcctgcagcccgggggatccactagttt

SEQ ID NO: 21302 - DNA, 3250 bp, Oryza sativa
  Clone ID: TF_OsC1311_1
gctttaatacgagacctttttctcaggaacacgctgtcaccttacctccacgctcccctcccgcggcagctgaacagagacgagctcaccccacagtcccccacttatcccactcaccaccacctccagtttttgtcctgacaccagctaacagttaaaccggttgctgttattagtacgcgccaccacgacgcccacgcacattatcccttcgtgcaaaagcctatcaacagctaagccaaacagggtcaggagccggagccgtccgggagagggaacactcgagcgatccgtccgtccgcccgcccgtcgtcgtcgcgcgccatggctgaggaggaggccaagaaggtggaggtggaggtcaccgaggccccacgcgtccgcttataggtgatccccaggcgtcggcacccgccgcacgctttcttgcataagaactcccccccctcctcgctccccgccgccgccgccgttttcttggagaggagaaatccgtaggctcagaggatttttggtagtcttgtttcgtgatattcgtgaagagggggggagctaaggggggattcgtaagatcagaattggatcacgcgggggcgcgctcgggatcgggggttccaaacacagcttcttcgttgaatttaagtggatgtactaatggagtcaaagggtggcaaaaagaagtctagcagtagtcgttccttgatgtatgaagctccccttggctacagcattgaggacgttcgacctgccggaggcgtgaagaagttccagtctgctgcttactccaactgcgcgaagaagccatcctgatagccctttcggcttctccatcctagtagtttaggatttcttgcaattccattttggcacttttcttctgacctatttctctggctgctgcttcctgataatcgaccagttctctagtcttgctccctgcactcctccctcctccatctccggcacagtgttctgaccaacctgctccaatgggtgtcttgtctgctgctgaccctcccccagtctcagcaattgggtttgagggctatgagaagcgccttgagatcactttctctgaggcacctgtctttgctgaccctgatggtcggggtttgcgcgccctctccagggcccagattgactctgttctggatcttgcacggtgcaccattgtgtccgagctgtccaacaaggactttgactcctatgtcctctctgagtccagcctgtttatctattctgataagattgtgattaagacctgtgggactacaaagctcctgctcacaattccaaggattcttgagcttgctgaagggctgtctatgccacttgctgctgtgaagtactcccgtgggatgttcatcttccccagtgcacagcctgctccccacaggagcttctctgaggaagttgctgtcctcaaccgctactttggccatctgaaatctggtggtaatgcttatgtgattggagatccagcaaagcctggccagaagtggcatatctactatgctactcagcacccggagcaacctatggttacccttgaaatgtgcatgaccggactggacaaggagaaagcttcagtctttttcaagacttctgctgatggtcacacatcatgtgctaaggaaatgacaaaactctcgggcatctctgacattatcccagagatggagatctgtgactttgacttcgaaccctgcggctactccatgaatgcaatccatggctcagcgttttctaccattcatgtgacccctgaggatggcttcagctacgccagttatgaggtcgtgggcttcgacgcctctactcttgcttatggcgacctggtgaagagggtcctcaggtgctttggcccttcggagttctctgttgctgttaccatctttggtgggcatggtcatgctggaacatgggcaaaggagctcaatgctgatgcttacaaatgcaacaacatggtagagcaggagctgccctgtggtggcctcctcatctaccagagcttcgacgctactgaagacgtacctgttgctgttgggtcgcccaaatctgttctgcactgcttcgaggctgagaatatggtgaaccctgctcctgttaaggaaggtaaactgggcaatcttctcccctggggagaggatgcgttggaggagaatgatggagtgtttgatgagtaagatgggacttctggtgacgattcgctgctttgttttcattccgtggcatttttatctgttgaggttgtcgtttggttattctgtgaagcagccagccaggctattagtattttcgcttgtaagcatgtgttctgatcttgggacgtatgcttggtctaaataataatggtgaactaaaagctctaggtggtcagctgcgtctgccacaatgagcatgcgtcgggagaaatgttgtcaaaacatatgaataagtatttgcgggaaatttcctttgccttctgctaaaaaaaaaaaaaaaaaaaaaaaataaaatttatacccgtcggggtctaaaaaagttctgcttgggactagatagtatgaaaacgattttcgacctcagcccccacgcgtccgcatgggaggaaaatgagaccgcaaaagctgagaacaaggcttcgaagaagctatctgctattctttcctgggagaacacaaagaaagcaaacatagaagctcaactgaagaagattgaggagcaactggaaaagaagaaggctgaatatgcagagaagatgaagaacaaagtcgcgatcgtccacaaggaagctgaggagaagagagcaatggtcgaggcaaagcgcggcgaggaagtcctaaaggccgaggagatggcagccaagtaccgtgccaccggccatgctcccaagaaactcatcgggtgctttggggcctaaagaaattttcgattcacaacgagcaaacgtgaaagtgttcatcagtggttgctttgcttctttcaccctcccaagtgcgtagtgtgtttgttggtgcaagaaaggtcgtgcctggtgtgtaaagtctggtgttgctgtatataacatattactcccaagacagatatgtttggtgctgtacatgtttgatgcttgacaggcaacattcttatgtgtagttaagaagccacattgttattgttattgacagtaagctgtttgttcttttactggtgtctgagtttgtcttgttttgattggccttcattggattcactagtagctgacgggatctttgtgcatgttagt

SEQ ID NO: 21303 - DNA, 1519 bp, Oryza sativa
  Clone ID: TF_OsC349_2
acacaaaacaggtagctccatatcttgttcatattgacatacacaatccttgatgatgacaaaaaacaaattacaggcagctcttgtccccctcaccataagctataaggggcagagcaccatccaacttatgctatttacttgttctgtctgtccctcccaactttgcaatacccttatcaagcacaagaaagtaaagagaaaaagaaaaaaaagagaggatatgatgacagtacatcatacatgtggatacaacactaaaacgagagttccacacagcaaccacatcacagcactgatccctgcgtgtgaagcgaagcggtgaacgatcagccgccggcgccggcgacgacgacgacggcgacggcggcgagcaaagcagagaggaggaggaggaggggaagagggtggcgcggtcgctcagaagaaggagcgcttggatggcgccctccccacggccctcatgaagttggcgagctccagcacgcgcgccaccttggtgcccctcttcgcctccgccgacgcccgcttctcctccgccttccgccgcgccttcgccacctcgttctgcgccttctccatcgccttggccctcttctcctccagcttcctctcgtacttcttgagccaggcgttggccttctcgacctggtcgccctcccagccattgatgacgacctcctcgcgcttgaagcggttgttgaccttggcgacctcggcgatctgccacgcggcgatcttggactccacctcctccttcttcacctgccccaccgacacctcgtcgccgtggccgccgcccgccgacgacacgtcgccgggggcggggagcgcgaggtgggcgcggcgaggggacgggatggggttgctgtccgggacgatggcgagcgggttcgtctcctcgagctcatcctccccgatcctccccagcgcgtcgtccaccccggcgcggctggagtcgccgccgttcgcggctgcggcggcggcggcgttggcgttggctgctgcggcgaccatggccgagaactccctgctcatagtagggaagagctcacttggggcggtgtcgctccccacggagcggatcgacgtgtgcctgctccccgccgcggactcccacgactccctcctccgccggtggtacgacgacgacggctggctcggcgtcggcgtcggcggcgggctcagcgcgtggatgtccctgaactccggctcctcgagctcctcctccaccaccacctcctcctccctctcctcacccccgctgcttctgacgacgatctcccggccggtgctgatgacaatctcccggtcgtcggcgccgcggctgctgctgctgctaccactagccgccgtttgttcactcaacatgtgtcgccgccgtgggtgaggtcgtcgtcgccgtcgccgccgccgccgccgctagtgctcagccactagcacacacgcgtaaccatcggcgtcttgctcttcttcctcctcttcgcttctccgagctgagctgcggacgcgtgggcgc

SEQ ID NO: 21304 - DNA, 391 bp, Oryza sativa
  Clone ID: TF_LIB3432-006-P1-K1-C11
cccacgcgtccgcccacgcgtccgcggacgcgtgggggctgccaaggacgtcgccgaggagaaggccgtcatccccgcccccgcgccgccggccgaggaggagaagcctcccgtcgacgactccaaggcgctggccatcgtcgagaaggttgcagatgaacctcctgccgagaaacctgctcaagggggctctaatgacagagatgttgctcttgcaagggtggaaactgagaagaggaactcattgatcaaagcatgggaggaaaatgagaagacaaaagctgagaacaaggcttcgaaaaagctatctgctattctttcctgggagaacacaaagaaagccaacattgaaactcaacttaagaaaattgaggggcaactggtaaagaaa

SEQ ID NO: 21305 - DNA, 612 bp, Oryza sativa; identical to SEQ ID NO: 11712
  Clone ID: TF_OsC339202_1

SEQ ID NO: 21306 - DNA, 391 bp, Oryza sativa
  unsure (1)..(391): unsure at all n locations
  Clone ID: TF_LIB3474-009-P1-K1-H6
ggcgtcatccagatgtggctctagcaagggtggagactgagaagaggaactcattgatcaaagcatgggaggaaaatgagaagacggaagctgagaacaaggcttcgaagaagctatctgctattctttcctgggagaacacaaagaaagcaaacatagaagctcaactgaagaagattgaggtatacagctgtttctgttatttttgttttccttctgaaagatatagtttccaattagcacactacttaaaggttaccaacattctttcttatcaatgatgatgaatggactacacgtgtacacagccttgactaattaactggtaacagttatagggaaagctgtaccttaactataggactacacatgtcatactngtatcatgtat

SEQ ID NO: 21307 - DNA, 535 bp, Oryza sativa
  Clone ID: TF_OsC84854_2
cctagaagttctaccatgaggcaatgtcggccaccttcttgaccgccttgttgtcggccttggccttttcgttctcctcccacgccttgatcagcgatatcctcttctccgtggcgaccgtcgtcaggagagcgtctctttcgtgtgagccacctgttgctgcagctttctcagcatcatcgacgacggtcatggccttcgactcctccggcgccggcacggcggccctctcctcggcgatgtccttggtcggctccggcgccggcgccggcggcgccacctccgccatctccaacaactcagccaaagaagctatctgcacgagttctctgacgacgtagcaaatatatcaaggaacaaatgagagaagcacacgaactgcttctacttcttgttcttctttgttttttaacaggagctggctggatggcgactgattagcccaggttggttgggagaagatcggacgcgtgggcggacgcgtgggcggacgcgtgggcggacgcgtgggcggacgcgtgggcggacgcgtggg

SEQ ID NO: 21308 - DNA, 1794 bp, Oryza sativa
  Clone ID: TF_OsC92114_1
ggagagagagagaactagtctcgagttttttttttttttttttttttttgcacagaaaaaggcaagaagcttgcatcttatatactgctccatagttacttacaagtgactcgtcttcttctgacttatatctactgaaaccaatcaaaagacaatattctacaagatcacggtaaaaacagatgatggcgcttcaagtcttgcgagacatagtgaggagagctttttgcttgcttcagttgcttgagcttagctacgctactacgagcaccagttccagcagccaatggaggacggcatcctgccggttctcctgatgtggtctgcctgctccgccgtctttgcagccgcacggctccgtttcagctccgccgcggcccgcttctcgtcggcagtgtgtctcgccgatgcgagctggctcatcagcttgtcctgcgcacgggctcgcatcctttccacgtcgacctcaatttttctcatttcagcttcgatttttgctctctgatgatcttcccatgcttggatcttaatctcttctcgtttaaatcttgctaaatatttagccttctctgcctcctcccacgctgctgcacgaatttctgttaccttctgtgtagattggtccatgggcactcctttaagcgaaagtgatgcatctttttcctcttccttgttgcttgcccatgcagcaatgttggttttaccaagctgagtgccgaggagcattatctccctcctagtcttcatttgcaattcttgttcacttaattccacgttgctacattcaccatggccaataacagcaccgattgcattggggcctattgtttttcgtggagtagttgggcgagaacaatctggactcgttgctctcaccggtgttcctgttcgggatggctcctggctcgcaataggggtcatttctgtacccatgtctctcattgacactgatcggactgttggtgggggaggtatgcatgttgtcgcgctctgaagcgtggcagatgaatcatggcgactaaaagtaacagctgaatcagctactgtaatttcttcagcaagtgcagactttgcacaagtctcaacttctggatatggatcaggtggggcccaattcaccgctttttgccacccaatttcccttttctcttggcttggatcaaccctcttagtatctatctcctctgtggcctccaacacaaccttcgtagccggcagcctcccgccaccaaagctagttttttccatcttcctctgtggcactccaccagccctaccaggacggtttgttgtcgggctggcgatccatttctgggcatcgtcccactttgatggtgcaggctttgagaatggaggaacgattgccgccgtcacagaccgagcagaggcccctcgctccttatggaactcaaagtttgaagccacactctcagagtcacaggagtcctcctcaggcacccttactcgtgaacccatggagtgggtgtcacgcgatcggtgcccactccctgtctccaacgaggatgaagattctgagatggtgctcaccacatctacatccttgtattcttcgcacatgctacctcctctgcgcgcatcggagtcggcgtcggatctgacagaggacttgggcaccgcgccgtactcgtcgtccacctccccggcgtccccctcctcctcctcctcctgccccttccgccgcttctccacccccagcaacatcgcgcgcagccgcttcggcgagaacccaccgccctgggtggggaacggcttctcgatgcgctcgtactccat

SEQ ID NO: 21309 - DNA, 1090 bp, Oryza sativa
  Clone ID: TF_OsC84854_1
tttttttttttttttttttttttttttttttttttttttttttttttttttttaaaacatctctatttttttttttttttttttttttttaatgtcaaatgggtaagcctcttatacatgagtactagccaagtaccacaggcacaaaaatgttacaatttcaccgccgaatccgaataaagaccccaaaacatcatgtctgtacataataaatgttccctttttcacatgagactgcaatagctgccctgtacatgaaattaaacgaaaacaaacaactgagaaaatacatccaaccactagctatctgaacttgacaccggtacactcacactgtcgcacacacatttacaacaacgacgacgacgacgacgatcaatggagatgaccgagaagagattcaaccgaagagcaacttcttgggcggctctcccttggcgcggtactttgctgcggcctcctcggccttcaccacctcctcccctcgccgcgcctccgtcgccgctcgcttctcctccgccgccctgtgcaccttcgccacgccgttcatcaacttctccacctgctccgccttcttcctctccaggtactcttggtacttcttaatctcggcctcgatctcggccaccttggagttctcccatgaggcgatgtcggccaacttcttggccgccttgttgtcggccttggccttttcgttctcctcccacgccttgatcagcgatatcctcttctccgtggcgaccgtcgtcaggagagcgtctctttcgtgtgagccacctgttgctgcagctttctcagcatcatcgacgacggtcatggccttcgactcctccggcgccggcacggcggccctctcctcggcgatgtccttggtcggctccggcgccggcgccggcggcgccacctccgccatctccaacaactccgcacgcgtgggtcggcggtgtcctcctccccgtggcgtccctcgcctggtgtccgcctcggccgtgtcggcctcctcccgcgcctgcttccgcggcatcctcttctccgtggcgaccgtcgtcaggagagcgtctgatgaacacgtagaaagacccgtccg

SEQ ID NO: 21310 - DNA, 752 bp, Oryza sativa
  unsure (1)..(752): unsure at all n locations
  Clone ID: TF_jC-osleLIB3474039a12a1
ttnnantaattttttttttttttttttttttttttctttttttttttttgttttnaaaaaaaacaaacagctttctgttaataacaataaccatggggctttttaactccccctaaaaatgttgcctgtcaagccttaaacatgttccgcccccaacatttttgttttgggagtaattttttttattccgcaacccccgatttttccccccaggccccaccttttttggcccaacaaacccccttcccccttgggggggggaaagaagccaacccccccctggtgaaccctttcccgtttgcttgttgggaatcgaaaatttttttaggccccaaaacaccccattatttttttgggaacatggccgggggccccgtacttgggtgccatttccttggcctttaggactttcttgcccccctttgcctcaaccattggttttttttcctcaactttcttggggaccaacgcgccttttgtctttattttttttggcaattccaccttttttttttttcaagggctcctcaattttctttagatgagcctctatgtttgctttttttgggctccccccacgaaaaaatagcaaatatcttttttcaacccccgggcccaccttttggcttttcattttccccccagccttttatcaaagaggtccttttttttaatttccccccctttgcaagaaaccaccatttttttttttttttaaaaaccccccttttagcgcaggtttttttttgggg

SEQ ID NO: 21311 - DNA, 1441 bp, Oryza sativa
  Clone ID: TF_OsC151462_1
atgcttctcggactagagaaaaatcagcacaacggggaggacacatcgcctgaggccaacgattccggcgagctggacgaccagagtaagtccactaccccagaaatggtgttgcacagctcaatcattctcatttacggattcaccatatcgttaattccctcaacatggggcatggagtgctctactcccaccgaagtgtcgagcaacagtggccacggatcaataaaccgagcccaagacgacgaccgcttcggatcccagggcggctcttgggtcccgccgctggagcagaagcccgaggcagtgacggcactgatcccgccgctctctaggccaacgcggtcgatttgggatgatgcggagaagtggatttctagccccacggcgaaccgcggtggccgtgtggggagtgcagctggggctgcgccgaagaaatcggcgctggcatttcctgaacatgtaagccggcctccagccgttgctaaggtggttgctgaggtccccatcaacactggaaccttggtgaagaattcagttgctctcgcacagcctatttcatttaatcctgcacaaagtgcttcgatagttgatgaaccagctcctgcagttaggtctgtttcgatgagagacatgggcacagaaatgactcctattgccagccaggagccctctcggactgggactcctattatagcttctagtccaacctcctctcggacaccaacaccacaacgtaatgcagaaatcagtattggtgaatttggtccaaataagatggaaatgtctgaggaggaactacaaatgaatacaagaaaggaaatcatggatcttggccaacggctgggaaagacaactatagctgcatgggctagcaaggaagagaaatctacaacaagtttcgcaaatgtcataaccgacaaggctgtagaaatcgacagagaggctcgtgctgcagattgggaggaggcagagaaagcaaaatatcttgcaaggtttcagagggaagaggtaaagattcaagcttgggaaaaccaccagaaagcaaaaattgaagctgaaatgaagaggatggaggcaaagatagagatcaagagagctcgcgagcaggacaggctttcgagcaagttggcagctgcaaggcacaaggcagaggcgaggagggaggccgctgagtccaggaagaaccaagaagcagcaagaactgaagagcaggcggctcagatccggaaaaccgggcacataccttcctcaatctcctgctggtgctggtgcctgtgattcttcactctgccatgatcatctgttatttgggtagaagaaaaatacttgctccttgcacgaccatgtccaatattcgctactggttggttcatcgttcagtgatcgatgccaatgagtcgccatttttgtccaaaaaacctgcagcccggggatccac

SEQ ID NO: 21312 - DNA, 410 bp, Oryza sativa
  unsure (1)..(410): unsure at all n locations
  Clone ID: TF_8954457
actggaaaagaagaaagctgaatatgccgagaacatgaagaacaaagtcgcgatcgtccncnagggaanctgangagaaganagcnatggtcgaggcnnaacgcggcgaggaaatccttnaggccgaggagatggcagccnnnttncgtgccnccggccatgctccccanaaactcatcnggtgctttggggcctaaaaaaattttcgattcccaacgancanacgtgaaantgttcntccctggttgctttgcttctttcaccccccccnatgcgtantgtgtttgttngtgcnanaaaagtcctgcccggtgtgtttantctggtgttgctgtttataacatattactccccnacacatatgtttggggccntncatgtttgatgcntgacangcgaccttcctatgt

SEQ ID NO: 21313 - DNA, 1013 bp, Oryza sativa
  Clone ID: TF_OsC1311_2
acatcatccctccgcgcaaaagcctatcaacagctaagccaaacagggtcaggagccggagccgtccgggagagggaacactcgagcgatccgtccgtccgcccgcccgtcgtcgtcgcgcgccatggctgaggaggaggccaagaaggtggaggtggaggtcaccgaggcgccacccgccgctgccgctgccgcggagacggagccggctgccaaggacgtcgccgaggagaaggccgtcatccccgcccccgcgccgccggccgaggaggagaagcctcccgtcgacgactccaaggcgctggccatcgtcgagaaggttgcagatgaacctcctgccgagaaacctgctcaagggggctctaatgacagagatgttgctcttgcaagggtggaaactgagaagaggaactcattgatcaaagcatgggaggaaaatgagaagacaaaagctgagaacaaggcttcgaagaagctatctgctattctttcctgggagaacacaaagaaagcaaacatagaagctcaactgaagaagattgaggagcaactggaaaagaagaaggctgaatatgcagagaagatgaagaacaaagtcgcgatcgtccacaaggaagctgaggagaagagagcaatggtcgaggcaaagcgcggcgaggaagtcctaaaggccgaggagatggcagccaagtaccgtgccaccggccatgctcccaagaaactcatcgggtgctttggggcctaaagaaattttcgattcacaacgagcaaacgtgaaagtgttcatcagtggttgctttgcttctttcaccctcccaagtgcgtagtgtgtttgttggtgcaagaaaggtcgtgcctggtgtgtaaagtctgccgcccctgtatataacatattactcccaagacagatatgtttggtgctgtacatgtttgatgcttgacaggcaacattcttatgtgtagttaagaagccacattgttattgttattgacagtaagctgtttgttctttt

SEQ ID NO: 21314 - DNA, 1894 bp, Oryza sativa
  Clone ID: TF_OsC299804_1
atggagtatgaaaggattcacaaggttcaggctggtgcactttctccgacaaagctaaggatgaagcttctgggaactcacaatcgtgtgagggtcatcagcaacagctcatcacggacatcaccttcgaagaacactgaaccatcgcaagcacagaacagactattagtttgtgatgttcttgaagaagtttcaggcagctctgatggatccaaatgctcctcagcaatcaacaaaactgaagctttagagaaggatccaccattggacatcaacaaggttgaggacatgaccaaaagttcagttcagcaacctgcatcaagcaactcaagcatgatacatccagttcgaaccatagaagaagagagtaatgactgtgatagtggtattgacaatgctagtaccagtagtttcgagttccatggaggagagaaaacagcagcgcagaatccaacatcaggatatttctcgagacagacttcctccaagtggaatgatgctgagaaatggattgttaataagcaaaatgttcaacaaaatatctctaagggcgcaccacagaaccagagtgcacagcagatgaattcagctgcaggcaggggttttattgtgcccaaaatttcaaaccgaaacataattcctcgccccatgcagaacatgaaaagaccgagtccagcttcttccgcttctcgaagcatattagagaggttatcttttggttcacatcaaccaaagttggttaggcatgcagatgtctgtacagttaataatgctggtgtcacctcagagtatcaaacaaaggcaaccgataacagttcatcaattgaaataaggccctacaaagatcccaaagctattcctgcagttcattcggtgtccgtgagagatgtgggcacagaaatgactcccataccgagtcaggatccttcaaggacaggaactccacttggatcaatgacaccaactcgtagcccaaattgctctataccatcaactcctgtaggaggacggtcaacagcatcaccaggagatgacaacacagatgatggaccatatttcaacagaaaaggtggcacaaatgaaatatcagacgatgaaatgagattgaagacaaggaaagaaattgccgccctgggtatacaactaggaaagatgaacattgctacatgggctagcaaagaggagctagaactagtctctgcatccccaagcattgctgatttggagcggatgaagaaagaatatgcagctcgtgcagcagcatatgaagaagcagaaaattttaagcatacagcaagattcaagaaggaagagttgaagattgaagcatgggagagccttcaaaaagcaaaaatagaatctgaaatgaagagaatagaggaacatgcagagaaattgcgaagcgaagccatggcgaagatggctgaaaagctagaaatgacacggcgtttagctgaagagaaacgagcctcagccaatgcaaggatgaaccaacaagcagcaaaggcggttcacaaggctgagctgattcgccagacaggacgagttccagggtcatgtatcctatgctgcagtggttgcttctgtcaacactagtgtatgcttgacaattagggagttaaatatggtcgtgaaaaatctaaaccccatgttctataatcagcattccttggttttagtatggaaaggaatgtctgatactttgattaggtattcagatgtacaaattcttgcttgtcataaaagtcaatccaatgcttacatttgcttggtcggctactcggttaaagaacacttggttgttgccctccggcccctcgcgctggaaaaaaaaaaaaaaaaaactcgagactagttctctctctctctctctcctcgtgccgaattcctgcag

SEQ ID NO: 21315 - DNA, 971 bp, Oryza sativa
  Clone ID: TF_OsC102438_1
tgcttagctagctgtttgttttggcgataccatttgcattgcttgcccagcatcgtcgtcgtcgtcgtcgggagcaaggaggaggagagaccatcgatcttgattgatttgaagctagatggcggaggaggcgaagaaggtggaggtgaccaaggacatcgccgaagagaaggcagtggtgccgctgccgacgccgccggccaccgagcacgacgactccaaggccatcgtcctcgtcaaggaagctgaggctacaggaggttcagctgaaagagatgcttatctcgcaaaaattgtgtcggagaagagattggtactgatcaatgcctgggaggaaagcgagaaagctagagcagagaacagggcggccaagaagctgtcatacatcacttcatgggagaatgcaaagaaagcagagatggaggctgagctgaaaaggatcgagcaagaactggagaagaagaaggcggcgtacgaagagaagctgaagaacaagctggcattgctgcacaagacggcggaggagaagagggcgctcaccacggcgaagcgtggcgaggagctgatcatggcggaggagatggccgccaagtaccgtgcaaagggcgaggctccgacgaagctgttcgggctcttgaaagcctgagagaaatcatgaggagttcatcatacatatatgctgggatttggtgttgttgattagtctgtgaacttacagaaatttgtatatgtgcaatgcatggcatccgtgtttgcgtcgtgtgtatgtcgtctaattgaagggccatttggtttgtattttgtcagttgggtggtttgatttctggtgcgttttgtaaaggaattgtgtatatgcataggggagtgcaggcaggggatgatggattatgaatacgcttattctttcatgaagatttgttagtaaaaaaaaaaaaaataattgttgtatttttttcaaaaaaaaaaaaaaa

SEQ ID NO: 21316 - DNA, 3286 bp, Oryza sativa
  unsure (1)..(3286): unsure at all n locations
  Clone ID: TF_OsC9553_1
atgccgcccaagaggaagcgcggtggcgggaggccgcgcaaggccccggaggacgccgccgccaaggaaaacggtgagaagacaaacaaggaggaggaaacgcaggcttctcctgaggagaatggcgcagggcagactcaggcctcgagaaccgcaagaaagcgcaggaagggtcctgttgctgatccctcttcgactgaacttccacccaggaagctcagggacaggcggaacgttccagcggtagactacaaggagaataagcacacaaaaaagatggatggaacttcaaccatgtgccatcagtgccaaaggaaggacagtggaagagttgtgaggtgccggaatggtgctgaaaaaaacaggaggcacagatattgtgtcaagtgcatcaaacgctggtacccgcatctaacagaggacgattttgagaactgctgtccagtttgtcacaataactgcaattgtaagacttgtctgcggacaaatgtaataaataagggtgacaaggagtttgccgatggtaagaacaaaattaaatactctctgcgtattgcacgctttttgctcccttggttgaaacaacttcaccaagagcagatgctagagaaaagtgttgaggccacaattaaagggatcgatgtaactgacttggaggttcctcaagctcagtttaataatgatgagcggatttactgtgataactgcagaacatccattgttgacttccacagaagttgtaaaagtggtcactatgatctctgcctcagctgctgccaggagttgcgtcaaggtcttactactggtactgttgtcacttgtgacacagctgttgatgtacctgaaatagaaggcaaggaaggtttgcaagagggaagtagtcatagcagtgctgtaggtcaaggggcttctgatcaacagaatgacaggttgataggtagtgcagctccttcagaggattgcactcctagtttgatatggagggcaaaaagcaacggaagcataccatgcccacctaatgcaggtggttgcggggattgtcttctcgaacttaggtgtttgtttaaggagaactttatttctgatttactggataaagtcaattcagtggtcaataaggaaacagagcaggagttgggaggctctagatgttcctgcttcactgaatccggtgaagtgaacaatgaaacatcacggaaatcagcttgcagagaggactccaatgataactacatatattgtccaactgctagagaagttcaaagtggagctttagatcattttcagcagcattggttgaatggtcagccagtcattgttcgtgacgtgcttgagctaacttctggactgagctgggagccaatggttatgtggcgggccttacgggaaaagagagacaagaaagagcatgaacggctctcagttatagctcttgattgtctgacatggtttgagtttatgtaccaccaggatgtgttggtggtgccagtttcatatctggggttcaacagcaccattgaaactactttatatttcaaactggttgatataaatattcacatgttttttgaggggtattcccgtggagctgttggttcggaggatttgcctgtgctacttaagcttaaagattggccacaacatagttcctttgaggagcgcctgccgcggcatggtgctgagttcatgtctgcactaccatttcgtgagtatacagatccaaaatctggtccccttaatctggcagtgaagcttccaaaacatgttaaaaagccagatcttggtccaaagacatacattgcttatggtgtcgcccaagagttgggaataggtgattctgttacgaagatccattgcgacatgtctgatgcggttaatattctcatgcatactgatgaggtagaactcaaagctgaaaggattacagcaatagagaaaaagaaagagagcttacgtaaagatggcaagaatcttcatgttctgcgaccagaccatgacgatgatacatcaatagctctcagtgaatcaactgaagtgccaagatctcgaggacttgaaaatggctcaagcattaagcagccagcaccaaatgttgctgtaatggaccagggaggtgttcatacagatatggtagctgatgaagctgagggaaacttgagtctgtctaatgggcaatcacccaatcaaagtgatgcacataatatggatattactttctccaagggggaaacagaccattctatctgcacaattaatgggggagaggagatgggcaatggctttgggagggaagataaatgtaaatcttctcatggtgtaggatcatctgaatcttctgattgtcaaagacgcagtaggcgacgtgatgcttgctcttccagtgcaacaggggaaataaacgaaaccagcatggagactaacaaatttaccatatctattgagcccaaagatgatcacccatttgttgagggaaatcagacagagggtggtgcattgtgggatatcttccgacgtgaagatgtcagcaaattgcatgattatctgatgaagcatgcagaagagtttagacattataattatgaaacagtcaaacaggtttctcatcctattcacgatcaatgcttttatctaacaaatgagcacaagagaaagctcaaggaagaacatggaattgagccttggacatttgaacagaaacttggtgaggctgtgtttatcccagcaggatgtccccaccaagtcagaaatttgaagtcatgtataaaggttgcacttgactttgtttctccggaaaatgtgcaagagtgcatcaggctgacagaagaatttcgcttgcttccgaagggtcatagggtgaatgaagataaactagaggttaagaagatagctctatatgcacttgatcaagccattgacgatatcacaggcaaaagttgcaatgaaaggacaaaggatgaaggggaagaggaggcgtctgccccaagtgttagttaacctgcagaggaaaatcaccaaaattagcctgcacaaggcncatgtgctggagtccaatatgcatgatttctgcggaggcatggtttgtagtttagaaaacggttcttctcgtgatagnggtgatggctagtggatttttttgcagcagggtttgtgggagctggntatcattntagctctgtaccatcatatacggagacgatagctntaactcaggacggnntgattttgntacttcatattgagttgtatgggagtttacccttgatttgatagcagagatgaagggggg

SEQ ID NO: 21317 - DNA, 448 bp, Oryza sativa
  Clone ID: TF_LIB3433-031-P1-K1-B2
catgctggagctcattgtacttcagacaaccaaggatacattgacaggagtggattcaaacgcaaagattcagactgttcagaccaacagaaaactggtggcgctttgtgggatattttccgaagagaagattctgagaagttacaagattatcttcggaagcatgcctcagaatttcggcacatacactgcaatccagtgaaaaatgtttctcacccaattcatgaccagactttctatttaactgtggagcataagagaaagctcaaggaagaacacggtgttgaaccatggacattcgagcagaagctaggcgatgcagttttcattcctgctggatgtccacaccaagtgagaaatttaaagtcttgcatcaaggttgctctagactttgtttcccctgaaaatgttggtgagtgtgttaagctgaccggagagtttagacgtc

SEQ ID NO: 21318 - DNA, 2754 bp, Oryza sativa
  Clone ID: TF_OsC160889_1
ctggcggcggaggaggtggacgccgcgacgatcgacggatccggcgaggcggcgaagcggaagagtggtaagcagaggggatcgggcgccaaggggaggcgccgggacggcgaccgggctgtccgcccgccggcgatgaggccggatgaagaagggcgcggtgttgcgacgaggcccggggcgctctgggaaaggaagccgccggccaacgccttcaacgcgccagacgatgatgaggatgtcgagaaaactgatcaacttctagagcctctcaacaagcccaaaagacgtgatgcagggaagaagaaaagacccagaaaaaagaaagtagatcaagagaacatcaaaacccacaggcataacgcaaatgcagtaaaaggcaagatgttagtcaatgataaggtttcgaagactgaaaagaagcaaagggaagaaaatgttgacaggtatcctgatttgcctgaaaatgaatttgctgcaaaatgcccttattgtcgcaagaattgtaattgcaaggcatgcctgcgaatgagaggtgtcgaagagcctccaagaaaggaaatttctaaagaaaatcagattcgttatgcctgtcatgtgttacgcttgttgcgtccttggctgatagaactgcgacaggagcagatggcagagaaggaattagaggctaagatacaaggtgtttcagttgatcaaataaaggtggaacaagctgagcttcgcaaaggtgagatccctggaggagaagaggtggaaattttggatcctgaagaaagagacaaggattatgcttttggtaagattctgtcagatggtgagaaccaaagggactctttgaagtgtcgcagcgacacccaaaacagtgagtcaaacaaaggcatggcttctgacgaaaaccaaaagaaggctctgttactttggaaagcaaacagtaatggtagcataccttgcccacgaaaggaaaaggaagactgcagtttttcatctctagatctgaaatgcttgtttccagagaagttgctccctgaattagaagatagatctgagaaggtcttctggagtgaaacatttgcaaaagaactaggtagaacaagtgagctgtgcccttgttttgatcactcaggcaagataagaagtgacagcaagaaattacgtcaggctgcaaatagggaggactcgagtgataactacttatactgtccggtggccactgatatccaggacgctgacctgttgcactttcagatgcattgggcaaagggcgaaccagttgttgtttcagacactcttaagctaacttctggtcttagctgggagccgatggttatgtggcgggcagtacgagaacgaaccaaagggaaggcagaagatgagcagtttgctgtgagggcagtagattgcctcgactggtgtgaggtggaaattaacatacacatgttttttatgggatatacaaggggcagaactcatcccaggacctactggcctgagatgcttaagctaaaggactggcccccttctagctcatttgatcagcgattgcctcgccatggtgctgaatttatcagtgcattgccatttccggagtatactgatccacgatatggtccgctaaatcttgcagtgaagcttcctggtggtgtcctgaagccagatcttgggccaaaaacttacattgcctatggattttctgaagagttgggcaggggtgactctgtaaccaaacttcactgtgacatgtctgatgcagtaaacatcttaacacacacagcggaagtgccctgtgagacttatgatgctgttcagattaaaaacacgcagaaaaagatgaaaatgcaagatgacatggaaatatatgggatgatagaatcaggcagtgaactcaagccatcagcatgcccagttgaattggggaacaaagctgttggtgaagcaccaaaggcctcatgcagcaaagaaaatgttcataccttgaaagacaagtctaatggttggtggagaaaatatacttttggtttggatataaacgcttcaccacctgatgatgctggaggtgatgccagggatgaagcattgtcctatgaatctgtggtacatagtgatgtagctcagtgtccaaaccataaccatgagaccaataattctgatgatgcacgtattggagctcagagatgtcaaaagaaagctaaaggtcgtcctccgaagacaggttcaggggtatcagagcaccaggaaagtggtggtgctttgtgggatattttccgaagagaggactctgagaaattacaagacttccttaggaagcatgcgccagaatttcggcacatccactgcaatccagtgaaacaggttattcatccaattcatgatcaagctttctatttaactgcggagcataaaagaaagctgaaggaagaatatggtgttgaaccttggacctttgaacaaaagcttggcgaagcagttttgattcctgccggatgtcctcaccaagtcaggaatttgaagtcctgcatcaaggttgcactggactttgtttcccccgagaatgttggtgagtgtgttaggctgaccaaggaatttagacgacttccatcttcccacagggctaaagaagataagctagagatcaagaagatggctttccatgctctgaatgaagttctaaactttctggatcctccttcctcagaagggtcgaaagaagcggcggagaagcctcgaagggggcgtggtcgcccaagaaaacactag

SEQ ID NO: 21319 - DNA, 3202 bp, Oryza sativa
  Clone ID: TF_OsC145726_1
gcacgagggagagaactagtctcgagtttttttttttttttttttttttgctttggttggtgactagttctctttcgagaaaatgcacattcaccatgataaaacagtgccaatctccagaatacagattgctcactgtaacaagttcaacatgttaagcaaagttacttaataacagtcaacagatgtaaaatttctcccagaagcggcagaagaattagttgtatcaaagtgacagtctctaagcaacccagtaaatctcattctgacaatctaatgctaaataattgctccacgtttattctgtttacatgagctcagccgttagtcctagtccaattccaatatacaggtgagggcttatgctatctgataacaattagaatgtgtcattgtgttcctttcatatgacaccatgtaatacatgtacaattgctatatctaatttaaatggagtatctcagctgcatggtacattccgttgtttggtgactctagccaagttctcagaaaccgcctgagttagattctgatcctcgaatttaaggtctagattaaacttgggatcgagggttattctctgaatttctctgacagcagaactagctgcatataaagagatttttccaatctcgagcatcttcagttttgcatcatgatcatttggtaggcagcgaatctcctgggccattcgggccgactcccccaaactttccggtgacaggaaatcaagagccaattgaaccgtagactggagatttttcacttggaatgggcagccagcaggaacaaatacagcctcaccgatatgttgttggaatgtccagggttcaattccatattgatccttcagtatccttttatgatacttgttgagatatatagattgttcataaataggattcttaacctgactactagctgccagttcttcccagttagcagttaaatattcattcagctttgaaatatcctgcctgcggaacacatcccaaacagaaccagcctgacttctttctgaaccattaacttttggttcctctgaatgtgacgagcaagataactcagttgaagagccttcgaaaccacaattaagtttggcatctgaagacttctcttgtaatcgcaaggcagacgcatgcgctctttcatcaaactttgagcttacatggtcaggtgattgttcccccatatccacattcaaattttgaacaggtgcatgagcatttacatgcattgtcattccattggcaatcttttcagatcgctcaggttgtagcctctttggacatacgtcatgccctttggctgtatgcattagcatatgcaccacatcagccatgttaatcattagatttgtcactgaatcacctttaccagcttcttgatgtcttccatatgcaattaacagcttcaagccaacttcaggttgtagggtgtctgggggcaatttagcagaaagatttaggagcccccacctggaatgtataaaatcaactaatggaaaattgacaataaattctggtctttggcatagcagaaactcctccaatacactgggtgggggccactctttcaatttcagcatcatcaattccccatcttcccccttgtgaccatctgaataacctttgataaactgtttcagctcaatatccacctctgcttggtttgagcaatccacagctttgacaatgacatcgtcatccacttcttcatccatgatttcctggattcctcgccaaatatttagtgggtcccagcttgatgacagagaaggctcaaacgcattcctgataactacaggttctccttttatccagtgtttacgaaaatgaataataccttcagatttcaagtcctctaatacaggagagaacacacagaaccgatcaataccaccattatttgaacatgttgagacaccaaagttacgatgaccagttaactctaatgttctgccatcattgcaggatgagcatccattctcaagaacatgtactttacaaccattgaccatttcctcagaattttttacaagcttactaatccagtttattttgaatattcgccttaacactaacttcgaggagccacaaccaccagcctcatgaggcccacaagtaatgcttccatcattattgactctccatgtagggaataaagatctaatgtcaatattttttatgtcccttcgttgtgggactgacttatcatttgcactttctgcagatggttccattcttgctcttttattcgaagtatctttacttctatctaccacacgaccttcagcatattctcctcttgcaacactggtcctagatcgccttatgtctcgacaacagtcaagacataagtcatacaaacaccttgggcagtgtcggtgataatcaaatactggcactttgcagaagtcactgcgaggataatttgaggtatcacagcacatttgctcatcaggattgaccttcgccctgattatatctgtcctaagtccataagcttttgtatcaacaccaatttcgaaacattgatcagaataaatctgctttaatactggaaggacagatgccagaatgctatgaagatattccaacttatctacagcagatatctcctgaacccttgcctttcgaacatcatcaattgggatatcagagtaccatctcgagatgcagttggtgcagtacccccttctgtcgcagcttgtacaacaaatggtattagcgaccctccggcactgatggcaggttgcggccgctgccgcccccgccgccgagctgcaggcaaccagccccgccgagcccctcccgaccagctccgccgcggtgcgcgcgccggcagcattgcccatgggcagcccgtggaccggctgcctcctccgtggcggcggcggcggcggcggcagcgccggctccgccacgtacaccggctcccccgcgaccctgccgtagatgggcctcgcgaccgccatccgcgcaggcggggtcgtgccccgcgcggcggaggcggaggcggaggacctgcggagggaggcccggagcgcggaggaggcggcgcgcttcttggcctggacgtagtgcttctcgcagacggtcttgtcgggcatggagggcgcgctgcatcgccactgcttgccgtcggagcgcttgcaccgcagctcctccggcacggcggccgccgccgccgccgcctccat

SEQ ID NO: 21320 - DNA, 2876 bp, Oryza sativa
  Clone ID: TF_OsC98891_1
atgggattaagcgattatgatctaatgggggtggcggtaccagggacgggtgttggtggaccccatcctgaagcccttaaagaaaggatgctttgtaacctctgggaggtgtatactttagctcagagaaatcgaaaatttaatgaacttctgaatgatgaagcgataatgatgaagccttcaaaagaatcgaagaaaagaggtgcaggaaagaaacaagaggaagaagagaataataccatatccattgaggatgaaatgtgtgatgcgaacaataagaaggggaagaagatgctcactggggaaaatgctttgatgtgccaccagtgtcaaagaaatgacaaagggagggtgatttggtgtaaatcatgcaacaataagcgcttctgtgagccatgcatgaaacgatggtacccaggtttgtcagaagttgattttgctgcaaaatgcccatattgtagaaagaactgtaattgcaaggcatgcctaagaatgataggagttgaaaagccccctgaaaagaagatttctgaggaaaatcaacgacgttatgcttttcgtattgtagacttgttgcttccttggttgaaagaacttcaacaggagcagatgaaggagaaggaattagagggtagattacaaggtattggaggattttctaactgcctatttacatttttatttgcaggtgtttctatggatgaagtaaagttggaacaagctgattgtgatatggatgagcgtgtttattgtgataggtgcaaaacttcgatagttgattttcatagaagctgcaaggcttgttcgtatgacttgtgccttgcatgctgctgggagcttcgcaaaggtgagattccaggaggagaagaggcaaagagtgtgcagtgggaagagagaggtcagaagtatgatacactgcaatccagtgaaaaatgtttctcacccaattcatgaccagactttctattgacccccagtactgaaacttgcaatgacatggctgttgctggggacccaaataaccctttgttactgtggaagggtaacagtgatggtactagctggatgtccacaccaagtgagaaatttaaagtcttgcatcaaggttgctctagactctgtttcccctgaaaatgttggtgagtgtgttaagctgaccggagagtagttattaagagagaagcatttgataaagcaataaacgaaacaagtgatcagtgcccttgcttttatcacacaagcaagataagaacaaatgctactcgagaggcagcaaacagaaagggctcaagtgataactacttgtactgtccagatgccaataatatccaggaggatgacctgtcgcctgaagagtggggaagaccaacccattgatgaatccatagaagaaaggaagcctgaatagcgagggagatctaaacggtgatctgaagattgaagagggcattgcgagagaagaaaaccaatggtgatgttgaagatgagcactttgctgttaaggcagtggattgccttgattggaatgaggtggaaattatatcgctctgggatagaattaaggtttcgacagttcaagaatcacctcagacatcatcatggtgtcgattttgttcatatgtggggtgattgtccttcactaaaatgatgtgattgtttgttgctgatagtggcaattgacttggattgccatttcccgagtatactgatccacgatatggcccgctaaatcttgctgtcaggcttcctgctggtgtactgaagcctgatcttgggccaaaaacttatattgcttatggatgttatgaagagttaggcaggggtgactctgtgaccaagcttcattgcgacatgtctgatgcggtaaatatcttgatgcacacagctgaagtgtcctatgacactgaacagcttgacaagatagcaaaaattaaaatgaaaatgagagaacaagatcttcatgaactgtttggggtttcagaatcaggcgccaagggtaaagctgatgatgaagcatcgaaaatctcatgtaacatggaaaacaaacacacctctaaccaaagtactaagggtttggacattaatgctttaccacctgatgattctggaagtgatattggggataaaccatcattttgtcaatctgaggtttctcacccaattcatgaccagactttctatttaactgtggagcataagagaaagctcaaggaagaacacggtgttgaaccatggacattcgagcagaagctaggcgatgcagttttcattcctgctggatgtccacaccaatcttgcatcaaggttgctctagactttgtttcccctgaaaatgttggtgagtgtgttaagctgaccggagagtttagacgtcttccatctgatcacagggctaaagaagataaactagagattaagaagattgctctcaatgctcttaaagaagtcgtaaatttcttagatcctttaccaaaagggtcaaagaacagggatgaagtggtagaagtgaccaaaccaaaaaggaaatacggtaaccgaagaggtgacctgaagagtggggaagaccaacccattgatgaatccatagaagaaaggaagcctaaaaagcgagggagatctaaacggtgatctgaagattgaagatcctgtccaacaatgaaccagtagatgactagatgagaagcctaaaaaaccattaatgctcttttgattattcagaggcccaaatgattgggctgatatcgctctgggatagacttaagtttcgacagttcaagaatcacctcagacatcaccatggtgtcgattttgttcatatgtggggtgattgccttcactaaaatgatgtgactgtttgttgctgatagtggccattg

SEQ ID NO: 21321 - DNA, 1300 bp, Oryza sativa
  Clone ID: TF_OsC80971_1
cggacgcgttggcggacgcgtgggcacgtgcgcgcgaacggagctcgtttcttctccccccctacctctgccccacgttggctcgcgtccgcggcccatctccaccgtccgatcccgagccgatggcggcggagcccccggcggacggccgcgatcccccggcggacgatggcgccgccggcgacggcgcggtggagtccgcggcggcggaggcgctcctgagcgcggcgtcggagcagctgacgctcgtgtaccagggggaggtctacgtcttcgaccccgtcccgccccaaaaggtcgcgccctttttcaccccttccaaaatttttttccatcgcgtccgtttggttcttccctttcgccctttcggtagctccgtgcctatctttggtgaatttgagaatagggttcaggctgttctattggtacttggagggtctgacatgcctcctggtttagtaagcatggctgtacctaccacattcgatgaaaagagtacaactgtggctgccagaagagttgcttccttaatgaggtttcgtgagaagaggaaggaaagatgttttgataagaaaataagatacagtgttcgtaaggaggttgctcaaaagatgaaacgacgtaaaggccagtttgctggaagggcagactttggtgatggttcatgttcttctgcaccatgcggctccacagccaatggcgaggatgatcatatccgagaaacgcattgccaaaattgtggcatcagctcaaggcttactccagcaatgcgtcgtgggccagctggtccaaggtccctctgtaatgcctgtggcctaatgtgggcaaacaagggcaccctaagaagtcctttgaatgcccccaaaatgactgtgcagcatcctgctgatctgagtaaaacgggtgatacagatgacagcaaagcaaatctgtgtgctgagcataatcaaaccactatgaaaactgacactgagatggtgccagagcaggagcagaaggcagacgtgttgccaccaaccaaagaagaagatagcatggctacctcgtgacaaaatgttcagacgcttgtgtataattgatacgtaggttatttttcaggaactcctgactttaggatggtacataaggcaacagaactaacaaagatcagctccgttgcgaacgatgcagacgcatcggcgcgccatatttatcaaatccatgtgttgttgtacaccctacccactcattctgtacgatttgaacacagatctgagtaatacaatccgttttgatcggttgtcaactatagtaaaaaaaa

SEQ ID NO: 21322 - DNA, 4357 bp, Oryza sativa
  Clone ID: TF_OsC32958_1
atgactatgatgacgcctcccccgctcgagccggaggaggacgagatgctcgtgcctcaccaggagctcgtcgctgctgacgccgcccagcccatggaagtggttgcgcaaacggaggcagctagcacggcggagagccagccagctgaggacccgcagacgtcgcggttcacgtggacgatcgagaacttcacccggatcaatgcgaagaagcactactcggatgcgtttgtcgttggcgggtacaaatggcgtgtgctcattttccctaaggggaacaacgtggaccatttctccatgtacttggatgttgccgactctgctaacctcccatatggttggagccgatatgctcagtttagcttggccgttgtcaaccagatccaacagaagtatacgatacgcaaagatactcagcatcaatttaatgcacgtgagagtgattggggtttcacatcttttatgcctttgagtgagctctatgatccaagtagaggataccttgtcgatgatactgttgttgtggaggctgaggttgctgtccgcaaaatggttgattattggacatatgattcaaaaaaagaaacaggttacgttggcctgaagaaccaaggagctacctgttacatgaactctctactacagacactataccatataccatacttcaggaaggctgtgtatcatatgccaaccaccgaaaatgatatgccatctgggagtattccgttggcattgcagagccttttctacaagctccagtatagtgacaatagtgtagccaccaaagagctgaccaaatcttttggatgggacacatatgattccttcatgcaacatgatgtacaagagctcaacagagttctctgtgagaaacttgaagataagatgaaggtgacaaatctgagaactgtcgtagagggaacgattgaaaagttattcgaaggtcaccacatcaattatatagagtgtataaatgttgactataaatccaacaggaaggagtccttttatgaccttcaacttgatgttaaaggttgtcgtgatgtgtatgcatcgtttgataaatatgttgaagttgagcgcctcgaaggtgataataagtatcatgcagagaatcatggtttacaggatgcgaaaaagggtgttctgttccttgatttccccccagttttgcaacttcaactgaagcgttttgagtacgactatatgagagataccatggttaagattaatgaccgctatgaattccctttgcaacttgatttggatagagatgatggaaaatatcttgctccagatgcagatagaagtataagaaacctttatgctcttcacaggtataaatttgatgatgagcgtgtaactaaagaagatactaagaaggcccttgaagagcaatacgggggtgaggaagagttgcctcaaataaatcctggtttcaacaacgctccatttaaattcacaaagtattcaaatgcctacatgcttgtctacatccgtgagagtgataaggacaaaataatgtgtaatgttgatgagaaggacattgctgagcatttaagggtaaggttgaagaaagaacaagaagagaaagaacacaaaaagaaagagaaggctgaagctcatctttataccatcataaaggtggctcgagatgagaatttgaaggagcaaattggcaaggatatatattttgacctggtggaccatgaaaaagttcgtagcttccgaattcagaagcagttactgtttaccactttcaaggaggaagttgcaaaggagtatggcatccctgtacaatttcagcgcttctggttgtgggctaagaggcagaaccacacatacaggcctaatcgtccattgagtcctcatgaagaaacacaatctgtgggacaactgagggaggtatcgaataaggcacacaatgctgagctgaagttgtttttggaagtagaacttggcccggatttgcggcctctccctccacctgagaagagcaaggaagatattcttctgttcttcaaactctataatcccgaaaaggaagaactctgttttgtggggaggctcttcgtaaaggccttgggtaaaccctcagaaatcttgaccaaactaaatgaaatggctggatttgtgccaaatgaagaaattgagctctacgaggcaagagctaaattcatgatgctatatttatgggataatctagtatatgtcactccattgaggtgtgctctaggaggaaattaaatttgagccaaatgtgatgtgtgaacatattgacaaaaaagccactttccgtgctagtcagcttgaagatggggacatcatctgtttccaaaaatcacctatacctgatagtgacactcaaatgcgttatccagatgtcccttcgtatctggagtatgttcataataggcaggttgtgcactttcggttattggagaaaccaaaggatgatgacttttctttggaattgtcaaaacttcatacctatgatgatgttgttgagagagttgcccgtcagcttggtgtggatgatccagcgaaaattcgtctaacatcccataactgctattcgcagcagcctaaaccgcaacctatcagatatcggggagtggagcatcttttggacatgctcattcattataatcagacatcagacatattgtattatgaggtgttggatattccactgccagaattgcagggcctgaaaaccctgaaagttgcattccaccatgctacaaaggatgaggttgtgattcacagtatcaggcttccaaagaatagcaccattgcagacgtgattaatgatttgaaaacaaaggttgaactatccagtcccagtgctgaattgcgcttgttagaggtcttttaccacaagatatataagatttttccactccatgagaagatagagaatattaatgatcagtactggacactacgtgctgaggagattccagaggaggagaaaaatctcggtccaaatgatcggttaattcatgtttatcacttcatgaaagaccctcttcagaatcagcagattcagaactttggagatcctttttatcttgctatccgtgaaggtgagactttagcagaagtaaaggagcgcatacagaaaaaactccaagtccctgatgaggaattctgcaagtggaaattcgctttcatatccatgaaccggccagattacctccaagattcagatgttgtatctgcccgtttccagaggagagatgtctatggagcctgggagcagtatcttggtttggagcatgctgatactgcaccaaaaagggcctacacagccaatcagaaaaaattaaccagaattactgccgcagttagtgcggcgctgggttccgtgatagtaatagctgatgaaatttttgcatcaacttatatattgacaatattgtccaaaaaattatatctcatgtcgcgtataaaatttggagtcacgcgttcgatattcttctctcgtcactacgatctcaacaaagctccagtccacttaacactgcaactcccaacctcaccaatggacaacccgacgccgtcgtcgagctccggcggtggcggcgccgccgccgccgccaatgccagctccgacgagcaccgcaagacgtcgccggcgacggccgctgatttcttcgacgaggagcacaccttcgacgatatcctgctcccggtggacttgttcgacttcacgcacggactcgacgccggcgacggctgttacgtagacgatcaggctgcgattgggcagaagccgctgtcgccggcgccggagccggcggcagagcagcagccgtcgccggcgccggagcacggcgacgatgagcggctggtgatgtactaccaaggacaggagtacatcttcgaccccgtgcagccgcagaagattgaaaatatcttccaccatctgaatggacaggagatgattccacagagcatcaggccacaacccactaacctggtaagacccatcactgttcccgaggacttcgacaggtttgctgcgctgacgcggtatagggagaaaaagaggaacatcaagttcatcaagaaggcggattacagtgcccgaaaggaagtcgctttgcggatgaaacgcagcaaagggaaatttgcacctagggttcagacctctgaaaattccttggcacacagaaaggggataactttctgcaccaactgtggtgaaagcagcgacgccacacccatgatgcgccatgctcccaatggaaccaaatcattttgcaatgcttgtgggttgatgtgggcgaactcgagaaaaataagaaagatcagaaacccaacttccggggagcaagaagatcaataa

SEQ ID NO: 21323 - DNA, 888 bp, Oryza sativa; identical to SEQ ID NO: 11732
  Clone ID: TF_OsC297303_1

SEQ ID NO: 21324 - DNA, 629 bp, Oryza sativa
  Clone ID: TF_OsC353595_1
atactactatggtcgccgccgctcgtcgtcaaccacagaggtggcatggccgccgccttgtactccggcatcagccgcccagacatgaacctcaagccacacgcgttgcagagggtcttgggacccaggggacccgtcagcagctacgacgttttctccgacgcgcagtgcatgcaccgccacgtacacgccggcctccatgcccaccttcacccccgcggggccggggctcttcttgccgcggctgccgctggagccgttcagccttgtggccgacagctttttagaggacgggaagtcggacgacgggcgggacgatgacagcgacgactaaaatgtcggatgtgggccaagggtgtgccacgcagcggcggtcgcggccgtcgcgcatgacctcttgctatgcgcgccgcgcccaggcgctgccgtgagacagctgtcttgaccaggccagttgccgccaccgttgttggccgcggaagcaggcgccgctgccgccgccattgcggcatgtgcagacgactagtaatcgagctcggcagcttccttggtctgaacccatcggtgtcgtacagctaaaaccgcgaagtcacgatatcctatagcaaattttggggctgcaggaattc

SEQ ID NO: 21325 - DNA, 1076 bp, Oryza sativa
  Clone ID: TF_OsC179266_1
ctcctcctctctgaatgtctactatctacatgagccagctacctgctactctccctctaatggagggggatcaggatcaggggctctacccagccttccatagagcaaaggaccctcctatcttgttccctttcatgatcgacagcgccgtcgagcaccaagggcaaatctatggagatcagggcttgaggaggcagcaggttttgggtgaatccaatcaacagttcaatgatcacatgatgatgggcggatcagatgtcttcctcacaccgtctccgttccgaccaaccatccaaagcatcggcagcgacatgatccagcgatcatcttatgatccatacgatatcgagagtaacaacaagcagcatgccaatggatcaaccagcaagtggatgtcgacgccgccaatgaagatgaggatcataaggaagggggcggcaaccgatcctgagggcggggcggtgagaaagccaaggagaagagcacaagcgcaccaggatgagagccagcaacaactgcagcaagctttgggtgtcgttagagtgtgctcggactgcaacaccaccaagacccccttgtggagaagtggtccttgtggccccaagtccctttgcaacgcgtgtggcatcaggcaaaggaaggcgcggcgggcgatggccgctgctgccaacggcggagcggcggtggcgccggcaaagagcgtggccgcggcgccggtgaacaataagccggcggcgaagaaggagaagagggcggcggacgtcgaccggtcgctgccgttcaagaaacggtgcaagatggtcgatcacgttgctgctgccgtcgctgccaccaagcccacggctgctggagaagtagtggccgccgctccgaaggaccaagatcacgtcatcgtcgtcggtggcgagaacgccgccgccacctccatgccggcacagaacccgatatccaaggcggcggcgaccgccgctgccgccgccgcctctccggcgttcttccacggcctccctcgcgacgagatcaccgacgccgccatgctgctcatgaccctatcctgtggcctcgtccacagctag

SEQ ID NO: 21326 - DNA, 1672 bp, Oryza sativa
  Clone ID: TF_OsC25297_1
tttttggtgttttttttttttttttataccaacagaattgattgatctctctcatagaggaggaagaacttgcaagggaggtaggtaccaacaaattaattaacaaaaaagcattgaaaaatatctggaataaggcaaaaaagagaaaaaaagggagaggaaataaacaagagaaagggagacgggagaatttcgcaaaaggatctaagcccgcgcgtctgtgctgtgcatgcatccatccatgcatgcgatgtgatgcgtagctgcgcctgcatggctcgctctggacgccgcgtgcgccgcttgatcagcacacgccgtagtcgcggaacatgagctccggcctcccggtcgccgcggcggatcccgcggcggcggcggcggcggctgctgctgcggccgcggcggcgtcgcggtggctgccgcggatgatgaggagctccttctggcggcgcagctccatgaccttgcggtgggagttggagtgctgcgtcagcacgaacgtggggctcgccgccggcctgtactccggcatcagccgcccggacttgaacctcacgccgcacgcgttgcacagggtcttggggcccaggggccccgtccgccactgcggcgtcttctccgacgcgcagtgcgtgcaccgccgcacgccggcctccatgcccacctccgcccccgcggggccggggctcttcttgccgcggctgccgcctcctgagccgttcggcctcgcggtgcccgatggcttgttcgaggacgggaagtcggacgacgagcacgacgacgacggcgacgactgggacggcgggcgcgggacgagggagtgccacgcggcggcggccgcggccgtcgcgcgcgacctcttgctacgggcgccgcggccaggcgccgccgtgaggcagctgtcttggccggccgagctgccgccgccgttgttggccgcggaagcagccgccgccgccattgcggcgtgcgcggacgactggtaattcggcatgtcggagtaggagtcgtcgacgaacttggatagccactccagctcggcagcgtcctcggtgggtatgtagaagtcgtcggcgaaggagagcatcgacgtctggtgatctgacgacgtggccgacggcgtggcgcccgacggctcgcccatgccgccgatgtggtggtggtggtggtgcccgtggtcacctgcggcggcggcggcagcggaggccgggaagaagtcgtgggcgccgggagtgttggagaggtcgaggaggtcgtcgacgcgcatggcgtcgcccatcgccgcctgatgaggcatcccgtagtaatggtggtggtggtggtgcgcggcggagtacccgccgccgccgcctcctccgccgtggtggcccatcatcggcgcggcggcgatgccaccggaggcgttgtggtacgtgctcatccccatgccgaggtcgacgcccatggccatttcccactccgacgccatcgcgagctagccactgccttggccgtacgtaccacacggtcacgttctgaattggcaagaagctggttgtcactggagttcccttgaaacgggcagtgcaactaccgcccgtttgatgcagtacgagctagagctatctatctttttgccactagctaagtgagtgtagtgatgactgatgagagggccggctccctgcag

SEQ ID NO: 21327 - DNA, 660 bp, Oryza sativa; identical to SEQ ID NO: 11745
  Clone ID: TF_OsC154673_1

SEQ ID NO: 21328 - DNA, 1475 bp, Oryza sativa
  Clone ID: TF_OsC84482_1
ggcacgagggagagagagagagagaactagtctcgagtttttttttttttttttttttttttttggttgttttttttttttttttttttttttttttttttttttttgcaagacaatggtgggataacaaaggtagcaaccacccattggtattaaactgatgatctccaacaactagcagattaatttctcaagttaaaaaacggctagagctaacaaagagttcatgacgcctaactagattctgctttcgttttctcagcatctaaggctgagagcccctaaaagctcaatgcagcagattgagatgtgattatcagctcacttctacgaccaaggagcccgcctaaaattcaatgagacagattaagatgttcttcactatcagcttacttctacaactgaagagttcctaaaactaaacgcaacagatcgagacgttcccgaccaccagttcacttccttgggtgtggaacagaattcctcagctgcatgaccttcttatgagaattggagtgtatgtcactcacaaaagttggactattagcaggcctgtattccggcagcagcctgccagacttgaacctcacaccgcaagcattgcatagcgtcttaggccccaagggaccggtcctccactgtggcgtcttgtaggacaagcaatgggtgcacctcttcattggctcctccgatagcagctcatcattcacataaacagccttcttgatcttcttcttatctcgccgctttcctatgtcctgttctttgtcaatctcttggccatagcgcttcttggaactggtggtgtgcccattcctcgcctcaatcctcagacgacaagcatcgcaggtaggccctgatggaccatcccaccactgtggtgattggctggacaaacaatagctacaagtgatcaccagttgctcctgctggaattgcattcctgcactcattttgtaattctcttcctcctcttgttcttgctcttggacaagttcttcatctttgtccttcttggggaggataagctcactctctgctagccagtccttatgatcgagcaggagtagcggtggctcgacaaacagcgtgatacaatgttggtcatcagtgtcgcttatgacagatgccaggctccttttcttttttcttgcattggtagatgagcgtggtggtaactttggttttgcagcaccttgacttgccattgtaataggcggtagttctgcagagacagggtttgtgcaggatgcagaggttgacaagcagtcctctacatagacagagagccactctatgccacttctatcactttccgtggcgggctggtgcgggaacaactcctccagcgaggaggcggccgcattcggcgggtgcacatccatgcccagcgacgaggaggagcagccgcacggttgaggagagagaaagaggagagagagagagagagagagaagcggaggaagaagaggggt

SEQ ID NO: 21329 - DNA, 930 bp, Oryza sativa
  Clone ID: TF_OsC86749_1
ccaccgcaccacgacggccgcccccgcgtcgccgcccgagtagcccgtatctggacgcccggccacaagccgccctcgtcgtcgcccgacatctacctcgtcaggaggacaccgaagctgccggtgacgcggcctccccgtaccaagcaagctccgcccacagcgcccgcgcccgcgcctccgccgccgccgccgcagccggcgtcgccgaagacgaagacgaaggcgaaggcgaagaagccgaagaggaagagaagctgcgtgcactgcggctcgacggagacgccgcagtggcgggaggggccgacggggcgcggcacgctgtgcaacgcgtgcggcgtgcggtacaggcaagggaggctgctgccggagtaccgccccaaggggagccccaccttctcgccgtccgtgcacgccgccaaccaccgccaggtgctcgagctccgccgccagcagcggcagagcaccaacccctccactccaccgccgccgccggtgtccgccgccgagccaatccccgacgagcaaaaagaagaggtggtaagcgtgccagtcgccgccgccgcgcccgccaccgacggcggcgcggcgagctcgctggacgcgctgctgctcgacgggccgtcggcgccgctcatcgtggacggcgacgatttcttggttagttaggtagccagaaaaaaaaaagaggaataatttcagctgagaatgagatgaggaataccaatttttcgtttgatttttcaggaaaaacagttttcccacctgacattgtgattcaacgtcgatcctgggaaaaatctttgcgtgaaatttagctagttttgctgcccagatgaactagttctggtgcttggtagctgatgaagttgaaaccggttttaatggatcaagggggatggatgttcaatgccaaaaaaaaaaaaaaaa

SEQ ID NO: 21330 - DNA, 2737 bp, Oryza sativa
  Clone ID: TF_OsC45687_1
cggcacgagggtagtactacatacacctcctcttatagccccggggttgaattccaccgacccgcggcacgcatccttttttctccatccccctccttccgttcttccatttacctccacctatatagcactccggaattgcgccatctctctgccttaggagtacagtgaagtgctctccatataattgcagtggtgcaaggcaggcagcaactttcttcttcttcctcctatcataatctgctcatccttttcctcctctggagcaaccatgtccatgcagaaggtgtactagatatatagagttagttcgcagctgctccctacttacataaacaaacgcattcagatagccagcttcttgatcggcaacagcagctagttagagtgcaacaagaggtagcagagacaattttttttggcaaggcaagcaaaagctgatcgaggagagcgatcgagcaggtgttgatcgatcggtgcgaggaaacagagacaattttcccacacagattgtgatttggtagcagcagcaatggcgggcgttggattcgtggaggacatgctgcgggagcagagcctcctggaggcgacctgcggcgacctcttcgaccacatcgacgacctgctcgacttccccaaggaggagtcggccgccgacgtgctcctgctcgacgcgccggcgccagggagcccgctgtcctcgcgcatcatcggcggccacgccaccatggcggcggcgccgccaccgccgccgcagatgatggcgctccccccgccgccggcccccgcgaaggacgacgcgtcggcgctgttcgacgcggccggcgcgctcggcgccgaggtgttcgaccgcaaggacgcccacattggcccgtgtgatgagctggacatggacatggcgcagctggagtggctgtcggggctgttcgacgatggaaccatcccgcacgagccgagttttccgggcgtcaactgcgcggcgccgatcaaggcgtcggcgctgacggcgaacgccggcgtcgtgctgccggacaaggcggaggaggcgctgttccgcagctccagccccatctccgtgctggagcacagcggcttcaacgtggcaaccaatgggggctcctcctcgtcgtcctcctcgtcggcgtcctcctcgtcggagtcgttctccggcagcggccgcgcgtggtccgcgcccgtgtcgccgcgcccggagccgcccgtgctcgtcatcccggcgcgcgcgcgcagcaaacggtctaggccgtccgcgttcccggctgtccgcggcgcgccggcggcgacggagaccaccatcctggtgccgacgccaatgtactcgtccacctcgtcgcactcggatcccgagagcattgccgagtccaacccgcacccgccgccgatgaagaagaagaagaaggccaagaagccggccgctccggccgccgcctctgacgccgaggccgacgccgacgcggcggacgccgactacgaggaaggcggcgcgctcgcgctcccgccgggcaccgtgcggcggtgcacgcattgccagatcgagaagacgccgcagtggcgcgcgggcccgctcggccccaagacgctctgcaacgcgtgcggcgtccgctacaagtccggccgcctcttcccggagtaccgcccggcggcgagccccaccttcatgccgtccatccattccaactcccacaagaaggtggtggagatgcgccagaaggcaacccggaccgccgacccgtcctgcgacctcctgcagtacatccgccgccgggattaatctcccggcggcggcggcggcgtcgtcggaggacggttggtcgtcggtctcagtcccccttagctatatatgtatacatgttagtatgtatgcatgcatgcttgcttcagtcgtcagtgcgtcgtcttcctcgtcatcaccatcaccatggacatggacatggacagcagtgtgatcatcagcagcattgccctcctgaagccatcatccatcatcgatcaccgcccgctctgcggcggctgccatcggcaccagcatcagcatcatcatcaatccatggatcgatcgccggggtcatactggcgttagtgcagctagggcttttcttggggttttatttttttcctttttgtctattgattaattggttccccttaaaaagatgattttttggttttgtatagaggtgggtgagagagagagaggaggaggccacgcagaaaatagatgaatcaccgtggttgttgcattgcagatttgcagttgcttgcaaaattaggtaggtgagaaggagagctaaaccagcagcagagggagacagatttagagaggaaaactttgcagctagtcagtcagtcaattaggaggaggaaaatgagatgtgttttttttaaggggggtgatgaggaggtggagtttgttggtttgctaattagaagtttcttcttgctagtagctactcaggggggacatccatcatagtttatattggagcttgatgtactgaactccgaaaaattctttttgcagttcatctatgtctagggattgataagtgttatttggtttctatactagcaattactttgtagcaattaattatatatctctatatgccttttttctgtttctcctgccttgttggttggtggtgcctccctctgtacaagttgtgatcatccaatttgaggagatatattcctttatgctctgaaaaaaaaaaaaaaa

SEQ ID NO: 21331 - DNA, 1240 bp, Oryza sativa
  Clone ID: TF_OsC98722_1
tggatcctcgcggttcccctccacgcgctccccgcttccctcctccattttgagatctaaatccaaatccctccccctttttcttctcaccctcaccacctcatcctccaccaccaccattccctcttcttctcctcctccttgcttctcccgccccttaacccctactgctccctcccagtagccggtgctaaccctagcttgctagctagattgctctctctggtagtagtagatccgtggagtggagatctgcccgcggatcgagcggcggcggcagagcaccagccgtgtctgcggcgcggtgtgcgcgggtgttgcggagcggcggctaagcggaggtgtgggaggagggggagtgctgcggcttccggggtgttagatccgccgatcctggcgccggagatggattcctcgtcggtcgagaaggggagtgggtcgatagatccggacgagcgcacggcctccggcgagcccaaggcgtgcaccgactgccacaccaccaagactccgctctggcgcggcggcccctccggccccaagtcgctgtgcaacgcgtgcgggatccggtaccggaagaagagacgggaggcgctggggctcgacgccggcgagggcggcgcggagcggcaggagaagaagaagagcaagagggagagaggggaggaggtgaccatggagctccgcatggtggggttcgggaaggaggtggtcctgaagcagcggcggcggatgcggcggaggagacgcctcggcgaggaggagaaggcggccatcctcctcatggccctctcctccggagtcatctacgcctgaaccaccaccctacctacctacccacctagcaacagcaagagagagagaagcagaggaaaggaggcagccatgggaaagagtgatttgcttgcttaacatgcatgatctcaaccgggagagactagacagatctctacccttttttttcttctcccctgcttagtttttccagctaattagttcgatcaaagtggaagccaagttaataatgatgatgatgatgtagtagctgctgttcttcctgttactgttacttgttcttgcctagctgtaatgttactagtagtgtttttagtagagcgtgtaacgttgcaatgtaagaaagagcttatgatccatcttctttctcttgttctttgcaagagattagctcctggatctgcaccaagtaatgcagtttttcagctgaaaaaaaaaaaaaaaa

SEQ ID NO: 21332 - DNA, 1341 bp, Oryza sativa
  unsure (1)..(1341): unsure at all n locations
  Clone ID: TF_OsC144448_1
atgccgtcctacgcgcaccaccacagttctctgggggatgacgaggaggagaacgggcgtttcttgagcctgtgtttgcttggtttctggaattttgggaatttatggtttttgctgtgtgtgtatgtgggtgccttttggacggagaaggatgggaagatggacgcgctgaaaagtagttgccggtcggaggaggcggccgacgagggggcggccgcggcgccgtcggcgtgggggatggttgagagggacgggttctccgtcgaggagttgctcgacctcgaggagatctgcgaggatgggaagatggacgcgctgaaaagtagttgccggtcggaggaggcggccgacgagggggaggaaaagtcgaaggacgactcccagccgtcgtccgtcgtaacgtacgagcttgtggcgcccccgccgccgcctccggagctgcttgacggaaaaggacgccgccgaggagaacgagcaggcgctggccctcgtcgccgcgccagaggaggaaaagtcgaaggacgactcccagccgtcgtccgtcgtaacgtacgagcttgtggcgcccccgccgccgcctccggagattgttgacctcctcaggacggagcttaccgcgcgctgccacccgcgtcctatccggtgcggactccgaccatctgcgcgctgtcaacggaggcgctggtgccggtgaaggcgaaacgcagcaagcgctctcgggccacggcgtggtctctctcgggggcaccgcctttctcggactccacgtcatcctcgtccacaaccaccacctcctcgtgctcctcgtcggcttcgttctcgtcgttctcgccgctcctcaagtttgagtggcacccgctcggcggcacgtcggacctcccggacgatcaccttctgccgccggggaagaagtccaagcacggtaagaacggcaagaacaagcctaagaagcgtggccgcaagccgaagcagctcccaccacatccctcgggcgcggcggcgtcggcccccgcgccgggcgaccggcgctgtagccactgcggcgtgcagaagaccccgcagtggcgcgcggggccggagggcgccaagacgctctgcaacgcgtgcggcgtccgctacaagtccggccggctcctccccgagtaccgcccggcgtgcagccccaccttcgtgagcgccatccactccaactcccaccgcaaggtgctcgagatgaggcgcaagaaggaggtcggctccggactcctcaccgccgccgccgccgcagcgcccgccgtggcgtcgttctaggtacngcccggcgtgcagcccaccttcgtnagcncnatccactccaacttc

SEQ ID NO: 21333 - DNA, 2005 bp, Oryza sativa
  unsure (1)..(2005): unsure at all n locations
  Clone ID: TF_OsC54448_1
ggttttccccccgtcgcgccgcgcccctgcccctcgccactccttccgtatcgctcttgcggagcccccccgccgaccgctctctcgccctccctcccctcccctcctcctcgtcgtcctccaatccgctctccaccgcgaacgcttcccaattaaaccctactctctctctctctctctctctctctccgccctcacgttatctccgcctccttctccacgcacgcacagaagagaaaaagaaaatcatgaaagaataagcattagcaaaaggtgaggtagaaaggagaggagatatagacgaattcggttttcaagaactgcgtggtggtgaagtagggatcgatggaggtggcggcggcggactacgccggcggggtccgtgtcaagaaggaggccggaggctgcggcggcagcggggacatgttcctcgtcgatgacctcctcgacctgccgtgcgacgaggaggaggaggagacggggttgtgcggggcgtacggcggcggcggcgccggcctgggagcgggcgtcgtcggaggtggcggggatgaccgcgcggccgggaacgcgtcggccgactcgtcgacggtgacggccgtcgacagctgcagcaactcattctccggcctcgccgacggggacttctccggcgggctgtgcgagccgtatgaacaactcgcggagctggaatgggtgtccacctacatgggcgaggagaccttgcccacggaggatctccggaagcttcagctcatctccggcatccccgccgcgccgcgcgcgccgcccgctctggccgtctccgcggtgcagctgccggcaggaggcgccggcgcgctgcccacggaggcgcccgtgccggggaaggcgcggagcaagcggtcccgcgtcgcgccgtgcagctggtcgtcgcgcctgatggtcctgccgccgccgccggcgtcgccgccgtccccggcgtcggcggtcatctcgccgtccgagtcgggcaccgcggcgccggcattcccggccaagaaggcggcgaagtccgccaagaagaaggacgggccgtcccccgcgccggcgccgaacgcggccgcgcaggcggcggcggaggggaggaggtgcctccactgcgagacggacaagacgccgcagtggaggacggggcccatgggtcccaagacgctgtgcaacgcgtgcggggtgcggtacaagtccgggcggctcgtgccggagtaccggccggcggcgagcccgacgttcgtggtgtccaagcactccaactcccaccgcaaggtggtggagctgcggcgccagaaggagatgcagctcctgcaccaccaccagcagccgccgccgcacgtgggcgcgggcggcggcggcgccgccggagggctgctccacgtgacgagcccgctgctgttcgacgggccgacgtcgtcggcgccgctcttcgccggcgcggacgaattcctgatccataaccgcataagcccggactaccggcgccaggctacctaggaaactattcattagcccaggaataattcagcgataaaaacagctaatttttttttgtcctgcaaaccgcattttgggtactctttatttctcagcttcttaagtttcttttttctttnnttgagaattttagtgtttttcccccttagaagcagactctgaggagtttctttcgtagcacatttttttttcttttgattnttgnatgcaggactcttagaagaagaggaacaggagcagttttcattgtttcnncnanaannnnnntntnnnnnnnnnnnnnnnnnctcttgaggggggcccggacccaattcgccctttatgagtgtttaccgccctacatggccgtgttttacacgtgggaatggaaaacctgcgttcccactaatggcttgagaaaatcccttttcagatggtaattacaaaggccgaccatgcctttccaaatgccccctaattggatggaacccctttacgcctttaaacgggggggttgtct

SEQ ID NO: 21334 - DNA, 1422 bp, Oryza sativa
  Clone ID: TF_OsC54448_2
tcctccccttccgtctctccgcgctccagctgcacgccaattaaaccctactcctcttgcgttgcgttatctgcggttccgtctcccactactcgcgcacacgtagaaacggaaggagaaacaaacaaaaggcgccgagtaacgcagatagagagttgtttccgcaccgagcgcgtccgcggcagtgtgtgtgtgtagcggtagcgcacgcgcggctcgcgggcgcgccggttgcaccagctgtgcgttgcggcgacgatggaggtgacggccgagttcggcggcgcctactacggcggcgcggcgggccgcgagaagaaggcgctgcagcaggggtgcggggaccacttcgccgtggacgacctcctcgtgttgccctacggcgaggaggatgaaacaacaagggagggtgaggccaccggcggtaaggaggaggctgccggctttgggaacgcgtcggcggactcgtcgaccataacggccctggatagctgcagcaattccttcggcctagccgacggcgacttccccggcgagctgtgcgagccgtacgatcaactcgcggagctggaatggctatccaactatatgaacgagggagacgacgcattcgccaccgaggacctccagaagctgcagctcatctccggcatcccctccggtgggttctcgacggcgagcgtcccgtcggctcaagctcaagctgcgtcggcggctgcctccatggcagtgcagcccggcggcttcctgccggaggcccctgtccccgccaaggcacgaagcaagcgctcccgcgctgcgcctggcaactggtcgtcccgcctgctcgtgctgccgccgcctccggcctccccgccgtccccggcatccatggccatctcgccggcggagtctggcgtgtcggcgcatgcgttccctattaagaagccgtcgaagccggctaagaagaaagacgcgccggcgccaccggcgcaggcgcagctctcgagcgtgccggtgcactcgggcggctcggcgccagcggccgcggccggggaagggaggcggtgcctgcactgcgagactgacaagacgccacagtggaggacggggccgatggggcccaagacactgtgcaacgcgtgcggggtgcggtacaagtccgggcgactggtgccggagtaccggccggcggcgagccccaccttcatggtatcgaagcactccaactcccaccgcaaggtgctggagctgcgccggcagaaggagatgcaccagcagacgccgcatcatcaccagccgcaggtggccgccgccggtggagtggggagcctaatgcacatgcagagctccatgctgttcgacggagtgtcgcccgtcgtgagcggcgacgacttcttgatccaccaccacctaaggacagacttccggccgcccatctag

SEQ ID NO: 21335 - DNA, 2679 bp, Oryza sativa
  Clone ID: TF_OsC155692_1
atgtcgctccggccgagcgagcggatggggatccgccagaagggctacaaggcgtcgatggacgcggcggaggggcggcggcggcgggaggacatcaccgtgatactccgcaaggccgaccgcgatcgcgccctcaaggagaagaggcggcgccccacggccaccgccgccgccgaggggttgccgcaggcggcgcactcgtcggccatcgagaagaagttggagagcctgccgatgatggtgcaggggttgtactcggatgacagcagcatgcagttggagtcgaccacgcagttcaggaagctgctctctgtcgaccattgtcctccaattgatgaggtgattagatctggagtgctccctcgctttgtggaattcctcaccagggaggagtacccccagctccagtttgaggcagcatgggctctcaccaatattgcttcaggaacagcagccaacacaatggcagttattgaacatggtgctgtgcccatctttgtgaagctcctcagctcaccaagagaggatgctgtctgggccctgggaaatgtggctggggattccacaaaatgccgtaacctggttcttatgcatggtgcaatgttaccgctactgcagcagctcaatgagcatgctaaactctcgatgctgaggaacagtgcctggaccctttctaacttctgccgtggcaagccgcagcctgacttcaagcatgttgaacctgcgcttccagtgctgcgggagctcatcctctctcaagatgaggagatcctaacggactcatgttgggcactctcttacctgtcagatggttctaatgacaatatacaagctgtgattgaaactggcgtgtgtgattggcttgttgagctccttagccatccttcacctgtggtgctcattcctgctctccgcacggttggcaacattgtaactggggatgatgcgcagacccagagtaaattaaccaaaactgcagatactggacaaaattatttgcaaaactacggatttaatccacaatactatggaaccacagatttagtgctgactttaagcatgtgtattgttggtcatccccaagcacttccctgtcttttcaatcttttgacaacaactcaaaagaaaagcgtcaagagagaagcttgctggacaatctccaacatcacagctggaactaaagagcagattcaggctgtgatcgattcaaacataattgctcctctattgcatctgttgcaacatgctgagtttgatgtcaaaaaggaggctgtttgggcaatttctaatgccacatctggtgggacattcaatcagatagagtatcttgttagtcagggttgcatcaagccgctttgtgatttacttgttcaccaagattccaaaacagtgttaacttgtttggaggcccttgataatatcttgagggttggggaggctaagaagaacttgggggcttgtaatatgaacatatttgtgccgatggttgatgaagctgatggcttggacaaaattgaggatctccagaaccatgacaatgttgagatatataataaggcagtttatgtgcttgagtcatactgggtgcaggaggatgaccaacagccctttcttattccatctgtatctgaatctgaatctgacaatgaaatgtttcagtttggcagtttcggtaaagtttcggtgaagtgcccgatttggatggaaatgcaccgtagctgtctgttcagggggctttccagaatcggagagtcaagttatccgagtcatggtttggtcctgctaacttgttatgaggcagcagtcaggcggttggttcatatggattatggttctccacacaagggggtgggtactggaaattggtcggtcggggaagggcatactcttgcttgtgttgtcgggttagctatttctttcgccttccttccactagcgagaacacggttgcccgtgctcctttattcacaacctccatgaacaaaccggaagcaagaactagagaaaaaatacgaacgattctcttctccaaccaacgctgtgttaatccggatgggctccaccgatcggaaggtggtggggatcggcgtggcggaggaagggaggaggagctgcgtcgaatgccgcgccaccaccacgcccatgtggcgcagcggcccgaccggccccaggtctctatgcaacgcttgcggaatccggtaccggaagaagaggaggcaggatcttgggctggacctgaaccagccacagaagcaggagcatggtgaggtaatacctgaagtaaaagacagtaacagcaacagcaacaactgcaacagtgggagtggaaatagcagcagcaacttgcaggttgttccgaaaaggaggcttctgatgggtgtggaggaggctgcattgttgctaatgacattgtcgtccccatctgcatccacattgctacatggctgacaatatcctgctcacccccaatcgccaaatgtccatagtacatactacatacaaagcacacaccaccaatggttccagatcatacatggctttttggttaatcaaggatcaaataggggcacgggcccttatctgaaaaacatgatgatgataatggcataatccgagggcagggatttgtggcaatctgtgacttcctttcgtctttttcgtccctttccatcgttatca

SEQ ID NO: 21336 - DNA, 2202 bp, Oryza sativa
  Clone ID: TF_OsC52874_1
tttctttcccctctcctcctctcctctaccttctctctaaaagactggatacagaacaaaaaaaagggaaaaaacagaaagaaaggaaagaaagaagaacacctaccaagcaagtcttggtctttgagttcatgggctgtggaattgttcccaggaatcccctctggctctgaaaagattcacaccgagcaacagttctttgatttttttccccctttgttttgctgaagaattgcttgtacagaactgcttctttcctgtttccgcttggttttccggtgtttattttgttggaattttcttgggccctttcttcttcgcttgtggaggcgaggggagaagagaggcatgggaaagcaaggaccttgccgtcattgcggagtcaccagtactcctctctggagaaatgggccaccagataagccagtgctctgcaatgcatgtggctcaagatggagaactaagggttcgctgacgaattacacaccaatgcatgctcgggatgatattgatgctgaggaacctagagctagcaagctgaaacctccaacattgaagctgaaggaacagaagcaactgaagaaaaatccaagccacatcacaatggagaatggaccattttctgatcaaaacttccgtaagatgggagatcctgacctaagtaatcgatctggttctggatcagcactatcatactcagagagttgtgccccctatggcactgctgatgcaagtgaaatgactgcttcagcacaatcacatgcttgggaatcacttgtgccatcaaagagaaggagttgtgtcactcggcctaagccttcacaaatggaaaaacttgcaaaggatcttaattccataatgcatgaagagcagctactttacctttcaggatcctcagaggaggatctaatttaccatagtgcaactcctgtggattcctttgagatgggatatggaagtatgcttctcagaccaaattcaaaatcactggaggaagaatcagaagcaagctctattcctgctgataataagtcatatattactagtgaatcttactcagggtcggtctcatttgtatatagtgaaagcaaggcaacaagcaaccaaaatgttataactgaacagccaaagaagtttctggtgcaaacatcagataatgctagaagggctaatctccatactgaaaatcaggatactctggagaatgcaaactcacctttagtttccctacatatggagggaaaagacagtgaagaaacaagagtaaagaccagtgcttcaaatcgccttacaaagtccaccatgaatcctctgaaaaggcctcatgacacccacttccaaagctccgtagaactaagaggaaccatgaggagtcctaaaagagtttctaaatatggtgatgctatgggtctaaagtgccaagcgtcgtttatgccgaaaccaggcaatggcaaagatttagcctgcagtgacagagcacttaacttattcatgttacccccggataaactatccatgctggttcctcctcagtatgccaacactgattctgatcaagacctgttgctggatgttcctcttaatgctcggcacccagaggccgagcttctttgccagccatctcaactgagctcagtagcccacagctccacctcagaggctgggaatgccggaggagaggggcgccttaagcagccctagttccagttccagttaacaagcaacttaggaacaggaagtagctgtagtttactttagtttccctggatcatggttccctttatttaccggccactgatggggcgttctgcggtttgttcatgctcttatcgtcgtcgccctggtttactaggcaatgtgcgtctgccaagttggcaaaaattgtgtgttcagctaacacttctagctgtgcttttggagtagacttgtgcttgtttgtagcatatggcttttggagaaggtatataactcaacatggctgtatggaaaagaggtaatctccttatgggtaaaatgaaaaaggaaagaaagatggaagttattaggagttcatgtttgtgttgcaatcagtgttggggtttgctcacttctttttacaattgagcaccatggtgtcttgatggcaggtcatcttgaacaagaaatttgagattggtgatatcattgatgaatggtatgtacagttgtacataaacttggttc

SEQ ID NO: 21337 - DNA, 324 bp, Oryza sativa
  Clone ID: TF_uC-osflcyp057d06b1
tttttgatcagaggaaggtcggcctccctatgcgtttgaatgccatcactgtggggtaaatgcaaaggctacacctatgatgcgtcgtggacctgatgggccaagaacattatgcaatgcctgtggcctcatgtgggcaaacaaggggatgttgagggacctatcaaaagcacctcccacacctattcaagttgtggcattagttaatgatggtaatggaagtgctgctgctcctaccaccgagctagaaattcctgcaccagccactgtcaatggccacgaatcatcaacgtgagtatagcgatgtttgtcttgtggaggatc

SEQ ID NO: 21338 - DNA, 1338 bp, Oryza sativa
  Clone ID: TF_OsC51531_1
atgtcccaccacgacggcagcaagccctaccagccacgccggggccccgagcgcccccctcctccggccccggcggacgatgcggcggcgcacgtcgcgcccacggtcgaccacctcgccgcggtggccgccgaggccgaggcgatggcccgcttcgaggaggagcaccgcgccctgggggcggaggaggagtatgaggaggaggaggatgagttggaggaggaggaggaggagatggaggaggatgaggacgcgcaacatcatgagggggtgggcggcgaggtggctgtcccgatggacgcggaggccgccgcgcagctggacccgcacggcgggatgctcgccgcctccggcgctgtccagcccatggcgtccaaccaactcaccctctcgttccagggcgaggtctacgtcttcgactctgtctcccctgacaaggttcaagcagtgctcttgctactcggtggaagggagctgaacccaggtttgggctctggagcatcgtcatctgcgccatacagtaagaggttgaattttccacaccgggtggcatctttgatgcggttcagagaaaagcggaaggagcgcaactttgataagaagatccggtattctgttcggaaggaagttgcacttaggatgcagcgcaatagaggtcagtttacatcttcaaaaccaaagggtgatgaagcaacatcggaattgacagcttcagatggctccccaaactggggatcagtggaaggtcggcctccctctgctgctgaatgccatcactgtggtataaatgcaaaggctacacctatgatgcgtcgtggacctgatgggccaagaacattatgcaatgcctgtggcctcatgtgggcaaacaaggttaaaatgccaagttcaaggtgtcatgccaacttggggatgttgagggacctatcaaaagcacctcccacacctattcaagttgtggcatcagttaatgatggtccatttttaagcagttgctgaagctcctacccccgagcaagaaattccggcaccagccactgtcaatggccacgaatcaccaacgtgagtataccaatgtttgtcctgtggaggatcgcgaacatcatgccggcattatatccatgtagtttaactgtctgtactataacttgatgagaacctgttaggtacctaggccatttctttaccatcatttagggtttgaatgttgttctgcatatgttgtaagccatgaaaaatcatgcttccggtcattatggccgtagcaattttatttcttgttaaaactcttgggtggaagtgagaacaaaaaaggtaatgaagtgaatattttaaaaa

SEQ ID NO: 21339 - DNA, 858 bp, Oryza sativa
  unsure (1)..(858): unsure at all n locations
  Clone ID: TF_OsC204425_1
tccngggttgcaggattcggcacgagtttttctttctttctttccttcctccacaactactccctcctcttctctcctcttctcctccctttcgctccaagaaacgcagccaagctccgcttcgcttgcctccacgccaccatctgcgcgcgccactccgatcgatcgatcgatcgatcgatgggttcttccgatcagaaggtgatcgggatcgccgcggcggcagcggcggcggcggaggaggctgggaggcggtgctgcgtcgaatgcggcgccaccaccacgcccatgtggcgcggcggcccgaccggccccaggtcgctttgcaatgcgtgcgggatccggtacaggaagaagaggaggcaagagctaggcctagacaagaagcagcaacaagaacatcatcctcatcatcatcaacaacagcagcagcagtatcagcggcagcaacagcaacagcaacaagaagatcacagtgatgcagcaagttcagtaaaagacagtagcagcagcagtagcaacaaaagcagcagcctccaagtgatctctgaaatcgtcatatcgcgatccaaatccgattgcgaaggcgcgatggagggaaattgtgtgcccttgaagaggttagtgcaacaagtagattttctactatcatctactgggattacagaaagctgccaatgtgttgctgtttcttgtgccaatcagatgggattacagaaagctgccaatgtgttgctgtttcttgtgccaatcagagttctgacaatggaaaacaacagctgtgacattttgcatatcatcagaataataggcagaggctgtggcattgagtccaagaccagaataatagacagataa

SEQ ID NO: 21340 - DNA, 1774 bp, Oryza sativa
  Clone ID: TF_OsC140039_1
gcgcgcggcgcgtacctgcccctccctccgcttcctcgcgcgccccgcctggccgacctccgcctctctctccttcctcgcggccccctcccgagcgagcgcggcctggttagccgctagccggtcgcgccctctcgcgtctgccatctacttgggtccgcgcccggcgccgccccccctctcggccggcgacctccgccagctccctccccctatggagggggagcaccaccatcaccaccaggatcatcaccaaggccacttccaagccttctccctgcagcctaaggatcccccagtcttattcccctttgtgatcagtagaagaagcagcagcagcagccctagcgacagcaccactctaagctatggttcagaccatcacttgacacagcagcagcagcatcagcatcaagccatgcttgagccccaaaatatgattggaggatcatccgctggcatctttgcgacgccgttcccgaccgtcaagagcatccgcgacgacatgatcgagcggtcgcagttcgatccatacgataccgagaagctgcaggcgagctgcgggttagccaaggtcgtcgccggcggcaagtggagcgcggtgccagcggccaagatgaagatcacgaggaagatgggtgagccgtcgtccggtgtcactggcggggctgcgacgacggtggcgccgaagaagccgaggaggaggccggcgcaggcgtacgaggatcacggccatggcggcgccatgggccaagcttttggcgtgattagggtgtgctccgactgcaacaccaccaagactcccttgtggaggagtggcccgtgcggccccaagtcgctttgcaacgcgtgcggcatcaggcagaggaaggcgcggcgggcgatgatggcctccggactaccagcgtcccccaacgccgccggccccaaggcggccgcacatagcggcgccgctgcggtggcggctgcgcagccgaaggtgaagaaggagaagagagccgacgtcgaccggtcgtcgctgccgttcaagaaacggtgcaaggtcgtccaggtcgaggatcatcaaacgctgcccgccgccacaaacgcagccgccgcagctgccatggaggagacggccgagtccgccaccgtcgccccgcccccggcgccgacgacgaggggtggtactctcgtcgacagcatcgggctcagctggagcaagacccatgccgccgccaccgcctcctgcagcttccggccgtcaccggtggctcccggcttcgcggcggcggtgcaggacgagatcactgacgccgccatgctgctcatgacgctgtcctgcgggcttgtccggagctgagaaagaaaagctatacttcatctctgcatgcatccatcgatcgatcgattggcaccaagctagagagaccaatcgatggagatggagagaggtgcaggctttttgcagctagtgcgttagcctgttcttgctcgctcgatcgatcgtacactgccccccagttggaatgtctcttggcgtcttgtttcctgttcgagtcttgtgatctctgttactttgtgcactgtactagagagtgagagagagagtgaggtagaaacatcaagaggagattagaggagaaagaataattaagagaaaagtgtgagctagctaggtaagatttactgtactgtgagttcaatttggagtaagcttttttgggctgcttcacggctaattatgccactggctgctatatatgtatgtttggtcttcgtttaaaaaaaaata

SEQ ID NO: 21341 - DNA, 1922 bp, Oryza sativa
  Clone ID: TF_OsC156502_1
ccccggcgcctggggtcggctcggggctcgctccctccccggcgtccgcgccgctcccccgccatgagcggccaccacgaagctaagccctaccagccccgccgcggcccggctcccgccgacgaggaggccgcccccgccgctgcggcggacgaggcggaggcggaggcggaggtggaggctatggagcggtacgagcaggagcaggagtacgaggagggggaggagggggaggaggaggagtacgagggcggggagggggtccccatggacgccgacgcctccgccgcggccgtggcggggatggacccgcacggggagatggtgcccgtggccggcggggaggcgggcggcggctacccgcacgtggcgtcgaacaccctcacgctgtcgttccagggcgaggtctacgtcttcgagtccgtttccgccgagagggtgcaagctgtgctgttactgcttggaggaagagagctagcaccagggtcgggttcggtaccatcatcttcagcggcatacagtaagaagatgaattttcctcaccggatggcatcattgatgaggttccgggaaaagagaaaagagagaaactttgataagaagatccggtatactgttaggaaggaagttgcacttaggatgcagcgtaatagaggccagtttacatcatcaaaatcgaaggctgaagaagcaacatccgtcataactagttcggaaggttcgccaaattggggcgcagttgaaggtcgacctccatcagctgctgagtgccatcattgtggtattagtgcagcgtcaacacctatgatgcgccgtggtcctgatggcccaagaacattgtgcaatgcatgtggacttatgtgggcaaacaagggtacgatgagagaggtaacaaaaggtccccctgtgcccttgcaaattgtgccagctgcaaccaatgatgttaacggaatcgtcgaggcaacaggtgtcgagcagcacaattctgcagtcgaggaggcagtttctgctgcaaatggccatgaatcgcagtcgggagtcgcgtgatgcttgagggttcggatttaggaaaaaggaggaagatgcgtatcaatcactattgacttccatccgcaccacacgagctaaacgggaccagcgcgacgacggccatgggcgtggcggcgatggcggcatgccggtctctccgagatgatatatgcttgtggtccgactttttctcccatgtgtataaggattctattgtggaggcccagggtagaaggatgaactgcagctctgaatccgagaggcgtcaggctctcgagtcgcacgttgcagatctcaagagtgataatgagcgattgagaaggctgtatactgaaactttgttcaagttcaccaatcagatgaaatttcacacagagtctcgtaatctgaaggaagaactggaaaaggcaaacacgagattgctatccatggaagaggagtataagagggaaatcgaacaacttaagcttggcagtgaaatgaacagcaatgacctggagaacaagctcagctgcgctgttgttcagcaagcaaccaatgaagctgtgataaagcaactcaatctggaactggaagctcataaagctcacattgacatgctaaatagcaggttggagcaggttactgctgatgtgcaccagcagtataaaaacgagatccaggatctgaaggatgtagtcattgttgaacaggaggagaaaaatgacatgcataggaagcttcagaatactgaaaatgaattgaggatcatgaagatgaagcaggcagagcagcaaagggattccatctcggtccagcacgtggagacactgaagcagaaggtgatgaagttccggaaggagaacgagtccctaaagcggaggctggcgatctctgaacttgactgctcatga

SEQ ID NO: 21342 - DNA, 4523 bp, Oryza sativa
  Clone ID: TF_OsC64218_1
atgcccgacgcggcggccgccgccgccgccgcccaggacgccgacgccgtgatgcgcgacgcacccgccgacgcagcagcaggcggcggcgacaacgacgacgacgacggggatgacggcacagaagaggacgaggaggaggatgacgacgaggagggcgatgaagaggagctgccgccggccgaggatccggcggccccggagccggtctcggcgttgttgccggggagcccgaaccagctgacgctgctgttccagggcgaggtctacgtgttcgaatccgtgacgcctgagaaggttcaagctgttctgttattgttaggaagaagtgaaatgccaccaggtttagctaacatggttttaccaaatcaacgtgagaacagaggttatgatgatttacttcagagaacagacattcctgccaaaagggttgcttcactcattaggttccgtgaaaagcggaaggaaagaaatttcgataaaaaaatacgttacgccgtacgcaaagaagtggcactcaggatgcaacgtaggaagggtcaatttgccggaagagcaaatatggagggagagtccctatctccaggctgtgaacttgcttcccagggttcaggccaagattttctatctcgagaatcaaagtgtcagaattgtggcactagtgaaaaaatgacaccggcaatgcgccgtggtccagctggtccaaggactctgtgcaacgcctgcggactgatgtgggctaacaagggtaccctgagaaattgccccaaggcaaaagttgaatcttctgtggttgcaactgagcagagcaatgcagctgtctctccgagtggaatcgacaacaaggaattggtggtaccaaaccctgaaaacattaccgcaagccatggcgaagtgctgcattctttcaaaggagattggggagagattggggagattgtcactcgttttccgcgcacacgcttcccaaactactcaacggtgtccctgaggggatcgagcgcgagggagatcacccgcgacgcgctgctgcagaaggtctccgaggagcgccagctccgcagccacctccgccgcgccgccgccgcggcgctctccatccagcagctaaccaagtctgcgaaccaccttatgtggccatttcaaaaagaagtccacagagtcattaggcatgtggctgttgttcatatgtggcgtgtttggagaagatactcagtcataagaattgtttcagaacagctccatgaagagtgggaagcattaataaaccagcctgacattaatctgacaaaacaatggatatcaagcatgatgcttagaccatttcttttcttcgttactcaaccatcaagctggtacaagggacaacaggacaagactctaaactcgatttcggcatgcttcaaaatcatcttgaatagcataaactcaatggatgcaagcaaaaatttatgttcctttgctgtgggcacgccagaagaaaggtgtaaccattcttgctgtaaggatggaaacatggttcagattactgacactgctatgaggttggctgtgtctttaactgattgcaaaacatggaaaaaaattacaagtgaggatactagagctgctgatgcatctgtggagagcttgattgaatttattggtgcaagccagagtggtacatatagttgtcttaggagatatatagtaaatcttggttctcatgccttggagaagaaaatttcttcaatctcaacagatgatcagttcctgattactgctagtgcagtcaccattgcgctacgacctttccattctatgagagcagggaggggtgctgatctaaatggtgcttcaaaggaatactttacacttatactcacaattccggatctttgcaaacgcttgccacctctgttgttgcctgctataaagcacatatctatactacaaccatccctagatattttactgatctccaaggacaaaatatttgaggaaataactaaattggagaagtcaggggtttctagtggtggttctggtaccattccctactgtggatgggctcttggaaatcttgtaactttagctacagagcatgatgatttatccaattcagggtgctttgttcaagggctagattgttgcctatatgttgatgcaattaactgtgtttcccaaagcttactgaaattttttgaggagaacaaggaaatgcttcttagttttggtgatagtgttgatacatctttcatcaaggaaaatgataccagtgacagctgcagcagaacactgtttatggatcttctgaagccaatttaccagcagtggcacctcaggaaacttttggtgttggcaaaggaggatgctgtgtgcaagaggcaaaataatcatgacccagatacacagacccattcgcgtagcctaaaattgctggacattgtatgcttttactatcacatgctccgaattttctctttactgagtccatctattggttcattacctattctcaacatgctctcattcacccctggatttcttgttgatttatggggggcattagaaatatatatctttggacaagcagtccacaaattacaaggaccaaaacatgaaagagaatcagctacaagtagttcaggtgagcatgtatcctccatgaggcaaagaagaaatttcaaggatacatcaaacaagtggtcgaatgtgttccagaagattacaggaaaatcaaatgacgcagaggatacaaatttggttgacaatcctttaaattctgagcagaatggtgaagcattaattttatgggatattgaagccatgagacaaggatctgagtgtattggaaaggatttaatgcaaatgttgtatctgttttgtgctacgtatggacacctattgcttgtgctagatgatattgagttttacgagaagcaggttccttttaccctagagcagcagcgaaagattgcatcttcactcaatacgttcgtatacagtactttcattcagaatggtggaagcagcagcaaaccacttatagatgtgactgtgagatgtcttaatctactgtatgaaagggacagcagacacaagttttgtcctatttctctgtggctggcacctgctaggaatggccgaattccaatcgcagcggctgccagagcccatgatgcagcatttgctacattgccaggaaatcagttttttggaattcctatccggagctctgtacttactacaataccacatgtatatccatttgaggaaagagtgcagatgtttagagaatttattgagttggacaaagcatcccgaagagttactggagaagtatctgggccaggtccaggatctattgagatagttattcgtcgaggtcacattgttgaagatggatatagacagttgaactgtcttggatcaaaattgaagtcttgcattcatgtgtcgtttgtcagtgagtgtggccttcctgaagctggtttggactatggtggtctatcaaaggagtttttgacggatctgtctaaagctgccttcagtccagaatatgggcttttttcacaagcatcagcatctgatagcagcttaattccaagcaattctgctaaacttttggataatggcatcgatatgattgaatttcttggccgagttgttggcaaagcgctctatgaaggaattctattggactattgtttttcacctgtatttgtgcagaaacttcttgggcgctatagttttttggatgaactatcaactcttgattctgagctttacagaagtctaatgcaactcaagcactatgaaggggacgttgaggacctatgtttggattttactctgactgaagagttgggtggtagaagaattgtccatgaactgaggcctggtggtaaaaacatctcagttacaaatgaaaataaattgcactatgttcatgctatagcagactacaagctcaatcgtcagatactgccttttgcaaatgcattttacagaggactcggtgatctcatttcaccatcttggctgagcttgtttaatgctaacgaatttaatcagctgctttcaggcggattacaggattttgatgtcgatgatcttcggaacaacaccaagtatactggtggttataccgagtcaagtcgatctgttaaactcttctgggaggttatcaaaggatttaagccaacagaacgttgcatgctactgaagtttgtgacaagctgttcccgagctccattacttggattcaagtatttgcagccttctttcacaattcataaggttccatgtgatgttacactttgggctacaattggaggccaggacgtggatcgtcttccatctgcttccacgtgctataacacactcaagcttccaacatacaaacggtcaagtacgctgaggagcaaactgctatacgcgattagctcaaatactgggtttgaactctcgtagaggtatgaagattttatgtggatagattaaaaaattgggtttggcacgtgaattgagtgccatagcct

SEQ ID NO: 21343 - DNA, 590 bp, Oryza sativa
  Clone ID: TF_OsC64218_2
agagtccctatctccaggctgtgaacttgcttcccagggttcaggccaagattttctatctcgagaatcaaagtgtcagaattgtggcactagtgaaaaaatgacaccggcaatgcgccgtggtccagctggtccaaggactctgtgcaacgcctgcggactgatgtgggctaacaagggtaccctgagaaattgccccaaggcaaaagttgaatcttctgtggttgcaactgagcagagcaatgcagctgtctctccgagtggaatcgacaacaaggaattggtggtaccaaaccctgaaaacattaccgcaagccatggcgaagtcatgggcgacagcactccggcaaatgaagccgagataggagcgccaaaggcgcagtcacaataagtttatgtttaacctgtcatgattgaaaccaaaagattctggattctttgcctacaggctatacagctaaacatcacaatagaaggtctttttcctgaccaaagtatactgattctcctcaagtgtacaattcttgcttgccagcacatgtaaatgtaattgtaattaacataaagagcctgattggtgcctgttgtgt

SEQ ID NO: 21344 - DNA, 816 bp, Oryza sativa; identical to SEQ ID NO: 11738
  Clone ID: TF_OsC406373_1

SEQ ID NO: 21345 - DNA, 2151 bp, Oryza sativa
  Clone ID: TF_OsC321679_1
atggaggagttgctcggcttggtgcggggcttcgtcgacgtcctcgtcctcgccggcggccgcacctcgtctggcgccgccgccacctggcgctccggtgacgtcaagaaggccctccaatgggccctcttcttcgaggaggttttcaagaacctgcgtgacgatggtcagtacgatgagtctgcaagtgagctcgatgctgcactcgttcaactcgcttcaagcccgaatttccccaagggtattgaggatatccgatcaaaaacacttgcgatggcaagagagttggttgtgaagcattttctgaaaacaacgaatgcggagaatttaggtgctgtacttcaagcagttgttgagatggatatggatggcatttctgctagtggtgaatgcaatgtgtgccaagagtatgtgcaatcgattttagatatgaatttacctagtttgatgcgaaccaagaatgcccgtgatgttggacattccactagctctgatgaattttgtgaagaatccttgtttacgggtaattcacagattctacttaaagaactacagaagaagctggattcaggatcgtgtatttctttggctgagagagaactgaacacacttctaaaaagcatgaaaaaggacagctttgatagtgcaggaagtacattgtgcacctcagcaactgctcagaaaacacaaatcatcgacaagtttatcctgtggaagcaatggaaagcaaagtgtttgtcgtacttgcttgatgagcgtaccattcggatcatgtcaggaactaatatgatctttaatgctcccaaggagcagtggatgggattgtttgaaccattaaaagtttctgcagattctagtcaaagtggcatcattgaagtcatggagctatgcttgttgggattggttgcaaggcaatggaactcattaatagagagcatcatgtcacatacttttagttcctttcctatatcaaaacaatatgctgatctgcaccagttgcttcaaggaacaactcaggatgaatgccaagacaagcttcttggtttcaaggagatggatatttgtgagtatgcaaggcaatcattagagagcgaaccgtacatattatggcttctacctccagttcttactgctgcagcaatgccgccacggtcaagcttgtttaagatataccttgttgaaatagataagcaactcggtgaagctgcttccaaagaccgaaaatgcaattgccgagcagatgtgatcgactagcagccaatctcttccaactttacatcagatctttatatcaacaaaagtgaatcacctaacggcaagctttcttctgaatcatatgctattgatacctctggatgtgattcttccttgccgccaacacagtcattatacaagggtaatccaagttctttaaggatggtttatcctaaagtatctgaacagaatagttggagtcaagaaccactgcctggaccatttgtttgtccaactagtgttgatttcttcgatcaacaagatatgactatttttgaccaacaaatacaagataacattgcagcaagtcctagcaccaaccttgcaaagcaaaatgagtggttctcatctggcacttccttgcagtatttggaaagttcggtgtctgctggttctgtgctgaaggctgttgatgcgacaagtacaacaccttcaaattatttgcattgtcatgcacagagaaatacatcaaatcctcccaacttcaatgaaatttgttctgaagcaactccaaaagctgtccagaaagttatgaaggttgacggcttaactatataccatgtaaaaagccatctacagaagtatcgcacagttcatcatcgacctcaactatctgatggtcgaggcatggaaaccacctgtgaaggattaagggtccagattggcttgcagaaacaacttcacgaacaacttgagatccaaagaaagctgcagctgcaagtagaagaacacagcaagtacctcgccatgataatcgagaagcagagcgagagcctaagacaactgggagcattaccaagatctctagatgcacccactcaggttttggataacagggaaacgtgcgagggacaaacaggagatgctgattcagcagagcaaaaacctgagaaatga

SEQ ID NO: 21346 - DNA, 876 bp, Oryza sativa; identical to SEQ ID NO: 11760
  Clone ID: TF_OsC95862_1

SEQ ID NO: 21347 - DNA, 1448 bp, Oryza sativa
  Clone ID: TF_OsC159_1
gaaaaaaataaataaaaaaaaatcgcttggcttccccccgtctccttgcgcctccgccccctactccggcgagccgagccgccgtccgccgccgccgcatcgcgagtccttccctcgtcgggcagtcgcctgccccaggatatcaattcagccacacattccctacatcgttgctagttacacatgtagcacctctggttgaaagccaatactactactgctacctaatccaaagcaaggtgctgtaaattcaggtgatgagcaaatgcaatgtatcagccaaatcctatttccagcagtggtcagactcatggcaatcctactgctcatgagcaaatggagttagggaacaatgctattgtccctagtaacggagggaacaataaccctaatatggcggcaagacagcggttacgttggacaaatgagttgcatgaccgtttcgtggaggctgttactcagcttggtgggcctgatagagccactcctaagggagttctgagaattatgggtgtgccaggactgacaatataccatgtgaaaagtcacctacagaaataccggcttgcaaagtacattccagacccttcagctgatgacaacaaggatgaagataaagatccaaggaatctgctttctgcacttgaaggttcatctggaatgcagatatctgaagccctgaagctgcagatggaggtccagaagcggctacatgaacaattagaggtgcaaaggcagctacagctgcgaattgaggcgcaggggaagtatctccagaagatcatcgaagagcagcagcgtgtcattggtgcaggagcttccagagccacgtcaagcgaacaattgcctgactctgagaaaactaacccaccaactccagtaccaatttctgaatctccagttcagggtgcaccccatagcaagaacagtcaaagccaagttgagccgacgaagagcccttcgcatgatgatgctctcccgtgtggtgaacctttaacacctgactccagctgccggcctggttcaccgacgctcagcccaaagcatgagcgtgcagccaagagacagaggggcagtgatgcaggcgatgtcacagcattcgcagatggagaatttgtacttccaccaggcatctttgagtcaagcacaggatccgagttccaagaatgttcgatgccttattcaggccattagcctatggtgctctgatcatcagtccatcaccttgacaaagcttacatggtaagatttcatctgtagccgttggtagattttggccttgtcaacacaaatacctttagacagagagtctaggtttcaaaaggaaattgggcacatgacatgcagagtagctgtaattcttgcactgttgttagatgttcatggggactaatgtaactgatatttaattaaaaaatattattttagaatgacttatgttatgctta

SEQ ID NO: 21348 - DNA, 879 bp, Oryza sativa; identical to SEQ ID NO: 11777
  Clone ID: TF_OsC159_2

SEQ ID NO: 21349 - DNA, 2412 bp, Oryza sativa
  unsure (1)..(2412): unsure at all n locations
  Clone ID: TF_OsC19751_1
ntttcggtttcgtgggcgggggagagatggcgccggtggaggatggcggcggggtggagttccccgtggggatgaaggtgctggtggtggacgacgaccctacatgcctcgccgtgctcaagaggatgctcctcgagtgccgctacgacgcgacaacttgttctcaggctacaagagcattaactatgctgcgagagaacaggcgtggttttgatgttataattagcgatgttcatatgcctgatatggacggattcaggttacttgaacttgttggccttgagatggatctcccagttattatgatgtctgctgattcaaggacagatatcgttatgaaaggaataaaacatggagcatgtgactacttaattaaacccgtcagaatggaggagttgaagaacatctggcaacatgttataaggaaaaagtttaatgaaaacaaggagcatgagcattcaggtagcctagatgatacagatcgtaccagaccaaccaataacgataatgagtatgcttcatctgcaaatgatggagctgaaggtagctggaagtctcagaaaaagaaacgggataaagatgatgacgatggtgaattggaaagtggtgacccttcttctacatcaaagaaaccaagagttgtttggtcagttgaactccaccaacaatttgtaaacgcagttaatcatctggggatagacaaagctgttcccaagaaaattttggagttgatgaatgttcctggtttaactagggaaaatgtcgccagccatttgcagaagttcagattgtatctgaagaggattgctcagcatcatgccggaatagctaatccattctgcccgcctgcttctagtggtaaagtaggctcactgggaggacttgatttccaagctttggctgcctcaggtcagatccctcctcaagccctggccgccttgcaggatgagctcctagggcgacctacaaatagtttggtattgcctggaagggaccagtcatctttacggcttgctgcagtcaaaggaaacaagccccatggggagagagaaatagcatttggtcaacctatatacaagtgccagaataatgcatatggggcattccctcaaagcagtccagctgttggaggaatgccttcattttcagcttggcccaataacaaacttggtatggcagactcaaccggcacattgggaggcatgagtaattctcagaatagcaatatagtcttgcatgaattgcaacagcagccagatgccatgctgtcaggaacccttcactctctagatgtcaaaccttctgggatagttatgccttctcagtcattaaatactttctcagccagtgagggtctctcccctaatcaaaataccttgatgatacctgctcagtcatctggttttctagcggccatgcctccatccatgaagcatgaacctgttcttgcaacttctcaaccatcgagtagtctgttaggtggtattgatttggttaatcaagcttcaacaagtcagcccttaataagtgcccatggaggggggaatctttctggccttgtaaatcgtaatccaaatgtagtaccttctcaagggatcagtacttttcatactccaaataatccatatttggttagtccaaattctatgggaatgggctccaaacaaccacctggtgttcttaagacagaaaactctgacgctctgaaccatagctatggttatcttggtggtagcaacccccctatggactctggcttactctcttcacaatcaaaaaatacacagtttggtttactgggtcaggatgacatcactggtagctggtcgcctctgccgaatgttgacagttatggtaatactgttgggctaagccaccctgggtccagttcatctagttttcaaagttctaatgtggctcttgggaaattgcctgatcaagggcgaggaaagaatcatggatttgttggtaaaggtacttgcattccaagccgctttgcagtggatgagattgaatctccaactaacaacttgagtcacagcattggaagcagtggagatattatgagccctgatattttcggatttagtggacagatgtgaaggcttcttgaatttgtaagtagggtaatcactggaaacaatttttagtgggttgatgaacggttgccgtgtttttcatttcatccttttttttttccttctgtaattggtttataaagggaataatttatgtgacagcatgtcgaatcttggtttatagaaggttgcggtttaaacaactttggattaaaaagcctcaaaaaaaaaaaaaaaaaatcctttgttcaggggatccacacagttttctgattttgttgccaatcttcttctctcaaaaaaaaaaaaaaaaaactcaagactagcctcgtgc

SEQ ID NO: 21350 - DNA, 1500 bp, Oryza sativa
  Clone ID: TF_OsC60587_1
ccccgggctgcaggagaaaaaaaaaaatccccccgcaccccgaggcctccctctcctctctctctcgctctcccctccccgcgcgtcgctttcgccggacaccaccgccccccgccgctttcccctcctctcctctcctcgcgtcgcctccttccttccctttttgacccccccaattcccaactgggaatcccccctcggacggcggcggaagcggaagcagcagaggagagcatctggttcccctgcgctgcccgctttttggtggtggtggcggcggccggcggcggatcgctgcctcgccgtgccggtaaggaatcgaggctcctgttgagaaactctactactccaccatacaattatgctagttatagaacaaccacattctcatgatgtaccatgcaaagaagttctctgtaccctttggaccgcagagtacacagagtaacgatcatatgagtaatattggagcttttggcgggtcaaacatgggcagccctgctaatcctgcagggagtgggaaacaacggctacgttggacctcagatctccataaccgctttgtggatgctattgctcagcttggtggacctgatagagcaacacctaaaggggttctcactgtaatgggtgttcctgggatcacaatttatcatgtgaagagccatttgcagaaatatcgccttgcaaagtacataccagaatctcctgctgaaggctcaaaagacgaaaagaaggattctagcgattccctctctaacacagattctgcaccaggaatgcaaatcaatgaagctttgaagatgcaaatggaggtccagaagcgactccatgaacaacttgaggtgcaaaggcagctgcagctgagaattgaagcacaagggaagtacttgcagatgatcatagaggagcagcaaaagctcggtggatcactcaaagcttgtgaggagcagaagctaccgcattcaccaccaagcttagatgactacccagatagcatgcagccatctccaaagaaacccaagatggacaacctgtcacctgattcggtacgggatgtgacacagtcagattttgaatcccatttgattggtccttgggatcaagaggctgcattccgagtggatgaatttaaagctgaccctggtctgaacaaatcataaagcaaaacctcactcatcggaaattcttgatccaagatgttaacctccactgcgggccgatcgcatgtgaatatatatcctcttaacaacagagcgagccttgtaaggatctttggatccacatctgattccttcaccacggccaggtgttgttgtcactgtagtattcatcatcatcatacagctcttgtaattatcaggatgtcctaaaagccctagcaagcaattttccttcttttgaagggaaattgccctgagttgaatcatgtagccagaaagagtacacatttacacgcaatacatttgctgtgaaaaaaaaaaaaaaaaaaaaaaaaaa

SEQ ID NO: 21351 - DNA, 1835 bp, Oryza sativa
  Clone ID: TF_OsC14889_1
atgcggcggagcggagccccgccacaagaaaattactcggagagccgcgtgcgtctagttcagataaacctcgcgtacagtgcattcatcccgacagattggaacaacttggagacagctgagtcaaggcctaaatccacgggattaaacaaggttcgagccttcgaggagccaatgaggcgagcatgttctgctgccccttcagggtttcagaagacgagcttgcgaattccatccccctccacccacgaagcaccaaccggcgcgcagcaaaagaccagaaaattaaagccaggagcagaaaacaaccaatcatatcctgttggagtgcgtctttacaaactagagctggagactaaaaagaaccagataagcaaagaaaatgatagcgaggatatcatgaacaccaagaagattaagctgcacgactgccacttcggctcgccgctatgtgacccttcgccggcgccgcacctgctgagctccgccgccgccgccgggctgtcgttccacccggggctcgtgagctcggcggcgcagcaccagcagcacggcgcgggcggctggctgcacgaggagtactacgcgccgaggtcgtcgccgccgtcgtcgcttctcgcgcagacctgcgtcggctccaacgcgaccgcgttctacgccgccgagaacctgccgcagttcgacttcccagctctcggtacggcggcggcggcggcggccaaggcgccgttccggtcgtcggagagcgagctgtaccggccggtcgacccgctgctcctccgtgcggaccactcggtgaggacgtactacgtccggccgcagaagcgggattccggcgagaggacaccattgccgccgccgtcgcagcaacagcatcaggacagaatccacgggctcttcgccggcgctcccaccactcggcttctcagcggcgaacccaaaatccactcgtttccacctcaagtggcggcgaagccgattctgccggcgatggatgcgccgagcctgcagaaccagatggagaatcagctgacaaggaactgcatcggcgcggcaactccggtgacccccaccggaaacctcgccggatcaggtgcgccgagcaagacgcggatcaggtggacgcaggacctgcacgagcggttcgtcgactgcgtcaatcagctcggcggcgcagacaaggcaactccgaaggggattctgaagctgatgaattcggatggcctgacgatctaccacatcaagagccatctccagaaatatcgcatagcgaagtacatgccagcgtcatctgaagggaagcaactggagaaaagagcaacaggaaatgacatgcagaatctggaccccaaaactggaatgcaaatcacggaagcactgcgtgttcagctcgacgtgcagaggcgcctccatgaacagctagagattcagagaaatctgcagctgaggatagaggagcaggggaagaggctgcagaagatgttcgaggaccagctgaaggcgagcaggagcgtgatggaaccgcaggagctggacgacgtcgtcgccttcgccgccggcgacggagacgacgacgcgttcgatgacgtcgacgtgcagctgctggccgtcgctggcagcggctatgacgacgccgggttccagtccaaaataagctaggacagccttttttgcgttttgtgttttggcactttgatttgacaaatattgttctggttcttcgacgtatgatacgcacaatgctattttttgcccgtgtagttggcgaaagtttcaaaaagatattttaagaaaaaaaaaaaaaaaaaaaaaaaaaaaaaaggggcctcgtgccg

SEQ ID NO: 21352 - DNA, 2860 bp, Oryza sativa
  Clone ID: TF_OsC77895_1
tcatttctctgtctttaataccatctcgatctcccatccgaggggcatacttagctgccccccgggtctgaaccacaccctcccgaccgatccccgattccacgtgccacaattaaccaaagtcataccatagcattgattcagatctctcattcctgatgtccaaacagccagccacatgtgcatcaattttcagtatctgaaaaccctctgaaaaaacagattcagtattacaacaatccacatacattgtaacagatggatcatgcttgattctccaagtaagattttcgaagatgatctagtcggaatccgaagtaagatccatttcagggtgaaacgggcggagcaacttcgctaggtgctcccccatgtcctccacctcctccctcccgaagccccagtcatggaggaccagagacccgatggcgcctctcgcgacaccgtgcttctggaggctccccgatcgcctctctatgaaaggcaggacggcgctgcttgatcgtaaccgtgccgccattggtatcgattcgatgtcaagtgagccctttggctgggattcttctgtatggtcactaaggatctccccgtgccggccaatgttgcctctgaagattgacgggaacggaagggggacagggagggggcaaagagatgctgagagatgggaaaattttggctttgtctctctggcttcgtagactgaacataccgagtccttcacttgtgatatggaagtcctttgcccgcctctatcaagagctccatgaaccactagcgattcaactgaataaggatcttcgtcctcatcgctgatttcaggggtcaaagagtgcagcttcatctctatgttccccatagcatctctatctgtcaaagaaggggcaggcatcgctacatccagagcagtaaccatgttcatcaggttgcaaaaggacgaaagttttgaaaatgaaacagcatcatgaagagctctcataatggactccctttgattcctcctggatggtccaagggtcattggatccctcacacagtaaagcaatacaagtgtatttgtgtaatcatcagcaatgttctccaaaaactgtgcagctacactggaaaaacctcctgaatcatccacaataaactggatgccctgaatatggtcacattcttcaacaaagaaccttagcctctcattcatttcctctatttgcgaccagtctgaaacaacctcttgtgcgctgccatagttatcgaacttgtcaaagtcgagattaccggatgaactcaaagagccaagagaccctcgagaatcaacagacaccagacgagggcagtaggtagcaacaccctggtgcgtctcgccggagcggtagaggacgtccatgtccagcgcggcgttcttgaagaccggatcggcgtcggggtcgtcggcgagcccgagcaactcatcctggaagttccagaagtgggagccgacgtagttggcgaagccgccgacctgcaccgtcaccgcctccctcatcgccgccgccgccgctcggcgagctcctgaaccgcaaccgcaccggcggagtcgacgaagaagcttccctcgcagcagaaatctccacagacacgccggcgaggtttccccggtggggaatagcgccggcggcgaggtgctcagccaaacggcggcggcggcggcggcggcgcgagaaatcgtggaggttttcccctcactaccactgtggattgggttcccgtcctcctcttcctcctcaccgccgtcgcagctatcgccggcggtcactgacacggcgtggctcgacgacacggtgagctggagggggccctgcggcgagccagactgcgatgtgctgtgctgcgaggtggtgtattgctccggtggcagcggccatagacggccgccaaccgtctgatggtcaccgccaccatcaccgccgtcggatgcccgccgcgtgtgcagccggtacttctgcaggtggcttttgacttcatcattagtgaggccatcaaccttcatcagctccctaatctgcttgggagttgcagcttgtgggccaccgaggcgctggagcgcggcgacgaaccggcggtggagctccggagaccagcaccgtctggccttccgttgcaccgcctgctgccgctgcgctacagcgacatccgtgacggcgctgctggtggcgctcggcgccgccggacatgccggggcgtcggccatcgccacccgggaggagagggacaggtctggcacggcggcgtcggctttctccagtgattttgcaaacgccggcaaggtggccagtggcatgaacgcattggacaccttgtgctgctgcttcttgacgctgccgccattgctggtgctggtgcttgtgtggctcccgcagctccacagctgcgccgagctcatccagctccgcttgtcgttcgcgtccgcctccgccttcaccccctccgccgccgccgacgccgccgacttcctcttcgccgtcgccggcggcgcgaacatctccggtggcggcgccgccgccggagcctccacctgccgccgccgtagcagccgctgcttctccacctcgtccttgagccactcgatcacgtcggcgatgaggtggacgctgatggggagctcgcggcggaacacctccatcttggccttctcggcctcgaggctccggatgcaatcctcgaacctcgccgccgccgccgccgccgccgccgcctcgccgccgcccgccctcgccagcgcgcccgtcgccgtcctcgccgccagcatccgcatgtcgacgccgccgaggacgaaggccgccgccgccgccgcctcctcgtgctgcgccgccgacgccgacgacgaccccat

SEQ ID NO: 21353 - DNA, 1113 bp, Oryza sativa
  Clone ID: TF_OsC847_5
atgagggaggaggaggaaccgagctggttcgcgcggtgggaggagcagctgccggcgccggacgagctgatgccgctgtcgcagtcgctcatcacgcccgatctcgcggtggccttcgacatcccgacgcatgggggtggtggtggtggtggggtgggcgggggtgttgtcgggggtgatggggtgggaggtggaggtggtggtggtggtggtggtggcggtggcgtgggggcaggggagatgaacggcggggcgtcgtcggcggccgggtcgagcggcggcggcggcggcgggggaggtggcgacgagccggcgcggacgctcaagaggccccggctcgtgtggacgccgcagctgcacaagcggttcgtcgacgcggtggcgcacctcggcatcaagaacgccgtccccaagacgataatgcagctgatgagcgtcgatggcctcacgcgcgagaacgttgcgtcgcacctccagaagtaccgcctctacctcaagcgcatgcagggggtcggcaacggcggcggcggcggaggagggggcggcgccggcgccggcgggagccactcctccggctccggcacggacgccgccacggagcacctcttcgccaccgggccggtccccttcctcccgcccggccgcgcccccgccggcggggacccgtacccgccgttcgcccccatgggcgggcaccaccaccacccgccgcagatcggccacttccaccaccaccccgccgcgcgcccgctcggccactacggctccggcccgggcgccggcttcgaccacgggttcctcagccgggccgtcgccggaggcggcccgcccgtcggcccaccggggatgcaccaccgcatggtcggccccgccgccggcatggcgatgatggcgccgtcccccttcgccgaagagctggagctcggatcccgaggaggcggcggcggcggcgggcgccgcgagcttactctgttcccgacgaccggcgaccactgaggcaagcagacagacagaccgacggcggcgagccggcgacgggcaccgggcttccgtcctcgggtacatacaattcgttcgcttcatctccccctctgctagttccccaccagatcg

SEQ ID NO: 21354 - DNA, 1299 bp, Oryza sativa
  Clone ID: TF_OsC353740_1
atgctgcaaaggaacctgccgaatctctccctccggataagccctccggccgtctcgtcggcggcggcgccggtatcctccggaacaccgacgacggcggcgaggacgactctgccgaccggagtgattacagacgcagaaggaggaggcgaagtagcagcgttctttggaaaccctagctccggcagcgagccccccggtctgagcctggggctcgggccgacgacgccggcgcacgcggacgccggcggcggccgccatggcgaccaccacctgcagccgcaggggtgcgcgccgttcaagcgcgcggcggccagggcgtcccagctgccggcgggctcgaagcggagcgtccgcgcgccgcggatgcgatggaccaccgcgctccacgcccgcttcgtgcacgccgccgccccccccggcggccgcgggggagcgacgccgaagtcggtgctggagctgatgaacgtgaaggatctgacactggcgcatgtcaagagtcacctccagatgtataggacagtgaagagcacagacagatcatcccacattgcctcaggagaggcgcagctgcagcagcaggcaggaatggaggtggccatggaggcggcagctggaggaggaggaaatggtggtggtggtggtggtggggtggtgctaccgatgatgccggcatgtgacgacatggttgggatctgtagctcccctgcgccgcctgccgcagcgactagttccgctgctgcctacttcctctgcgcgacgacgacgtcaacagcaactgctccactggcagtagtgccatcgcctcctgctccaaccattcccacaaggtttcatgaatgcatatatggagatgttgatgtagtaatacagtcaatttcaatgttaataaatgttttgctacatggaattgataagagctgcctcgctttaacttttcttgagcacaggaggactgaccaaacgccagcgctggaaaagggtgtcgcgattgttgactcgttgcaccggtgtcagaagcataactactcaccagtgcttcaagatgctcttcatcagggagctgaagaagatcatcttattaccgggaacctaccaatgggaggagcatcagcacaagcgagcattgaggccatggcgactaccaactcttcaagccctgcaagctcatctccatcacttgcaagcctggagcagctgctacctgaagactcgtttgcgcccaacctggagatctccctcgggagacataactggaacatggaccatcctgaagaactcagcctgaaatacctgtga

SEQ ID NO: 21355 - DNA, 1299 bp, Oryza sativa
  Clone ID: TF_OsC140091_1
tcacttccttcctggaggtgagatcttcgcctgctcattggcggcgggccacgtggcaccagatgcgagggcttggtgtgctttctccatcatggaccgcatgtatttctcctgggcctcaaccctcatctggaggtgcttttctgcctcttgttgttcttggctctgggccttcttatctgccccattcacatgcacgttgcggccataggagatgttcctagccttggctccaacaattggactactcatcctctcacttcctacaggtagcactgtttgctgtggaggtggtgatctcatgtcaagcttagagctcatctgaccctcaaaccccttactgcccatggagtctcctcctgacatggtgatggcctccatcatcatcgtcgtcgtcgccggcgccgccatctggagctgatgatcgccggagatcttcgccggctcgccgccgccgtcgtcggcgccgggccacaccattgggctcttcccagtactggagctgtaattgaatgccaagaaggtatcaattgatggcctgatctccatctgctcatgctgctgatgcaggtgatctagatggcttcctccatataactgcagatcatcttgcagagaagggaagctcatggagctgccaatgtcaaggacagcttggctgcctagagatttgtatcctgcgtgccacgtggcgcaatctcctgaggacgagatggcttggtatgctttctccaggatggtctgcatgtatttcccctgggcctcaaccctcatctgaaggtgcttttgcacctctaattgttcatggaatcttctctgaacttccatcttcatccttagtgcctcattcacatgcacgtcattcatgcttcttcccatgatgcccgaagaagacgctgcattccgttgcatgtccattgcatccttaaccgagtggtcgttgaaatccttgtgctgcttcccaagtctgaatttctgaagatggctcttgagatggtaaagtgtgagtcccttgactcccataaccctcatgatcgtctttggagtcgccttgtccgggcctccgagctgggtgacggcgtcgacgaagcggtcatggagctcgacggtccagcggaggcgtggcttggggtcggtggtgaggacgaggccggagtcaccctggacgcacaacggcggccgatcattcgagctcgccgccgccgcggcgccgccgacgccgacgccgccactgagctgctgccgaatttgtcccgaaataatgtggccgggcaggagggcgggaaatacccgccccat

SEQ ID NO: 21356 - DNA, 617 bp, Oryza sativa
  Clone ID: TF_jC-osleLIB3474027c12b1
ctctcctcctccccctcccctcctcgttccgcgtgccgcgagaggatcgaaccctattcctttgttcttgaatctcttccaaatctgtaacagagagagagagagagggaggagatctagtgagtctagagagagagagaggttcttaagaggaggaggaaagctagctaggagaatagaatgttcccttcttcttctccttctccttctccttcctcctccaagaagcagcagcagctcagtggcggcgtcggcgtcggcggcgccgcggcggcggcgagctcgaatgatcggccgccgttgtgcgtccagggtgactccggcctcgtcctcaccaccgaccccaagccacgcctccgctggaccgtcgagctccatgaccgcttcgtcgacgccgtcacccagctcggaggcccggacaaggcgactccaaagacgatcatgagggttatgggagtcaagggactcacactttaccatctcaagagccatcttcagaaattcagacttgggaagcagcacaaggattttaacgaccactcggttaaagatgcaatggacatgcaacggaatgcaacgtcttctttggggcattatgggaaagaagcatgaaatga

SEQ ID NO: 21357 - DNA, 765 bp, Oryza sativa
  Clone ID: TF_OsC282077_1
gcacgagggtcgcattgctaattaggcttctagtattctagattgaaggaagctaatatgggagcgagaggaagaagagatcgaatgggcagcgccggcggctgcggggggtcgccgccggtcgtcgtccggcggtacaaccggagcgaggcgccgcggatgcggtggccggaggagctgcaccgccgcttcgtccacgccgtccgccgcctcggcggatgccacgaggcaacaccgaagcgaattatgcagctgatgggcgctaagggagtcagtatatcgcacgttaaaagccatcttcagatgtacaggaactccaacaacagtagcaatgttaaccgtcgtcatcctgtcaccccacaaatcgattggacgacgacggcgcagcaggatgaacagcagagacgacagatgagcagcttcagcttccttgcaacaagaacggtgccagcagctggaattgggagccatagccaccagagacctcaccggcggcaagcgctgcacgccggagacgacgacggctgcgagctgacgctgtcgatcagcggcggcgccgctgaagaatcgaaagacggtggctcgagcatcaccgacgacgacgacgagcttctgatccagccaccggcgcctaacatcatcaacgacgacggatcaacgcggcatggtcatcgtcatccttttgcttgttccacacagccgctgccgccggcggccattaaccttgaacttacgatttcttctccttgctgctggctcacctag

SEQ ID NO: 21358 - DNA, 1671 bp, Oryza sativa; identical to SEQ ID NO: 11790
  Clone ID: TF_OsC50227_1

SEQ ID NO: 21359 - DNA, 1841 bp, Oryza sativa
  Clone ID: TF_OsC11289_2
ctatctgtcaataccggacactttacctcctagagctgtttttgcggtggtttttgcacacgtggatgacactttggatgccacatcagcgaacaggatgttttgaccaactttttcatgagctgcagcggcagcggcgcggggaaggagcatctccgacaagctgttgcggtcatcggtggaggaggtttgcgcgccaagccgccgaaggagataggagaaagaggaggaggaggagatgggccccggcctgatccaccaccaccgcctcctcgacgccgatgtcggcggcggccggcggggggagcagcgccggcctggtactgacggccgaccccaagccccgcctgcggtggacggccgacctccacgaccgcttcgtcgacgccgttgcccagctcggcgggcccgacaaagcaacacccaaaactatcatgaggaccatgggtgtgaagggtctcaccctttttcacttgaaaagccaccttcagaaatacagattaggaaagcaatctggccaagagatggcagagccatccaaagacgcttcttatattttcgggagatcgtggggacgaggaaatacacgttcccgagggacctaaccaggacgtcgtcgttggtcatgatgcgcgtgatcctagtcgccgagatggaccacgagagaaacttgaatgacccggtcggggtcgtgaggattacctcctctccgagggtcaccagcgatcgcaacatcgactggctactggagatgttgtacaacatagtatctgaggcaactgaatggcttcagcatatctgaccatgatctaacctctgctggtgtcatgttgagctcttcagacaccttgagcccctccatcttccaccagctctctgtcagctcgatcagcctgcacagtcccggaggcaaatcctccccttttgcagctgatgctgacctgttctttcagaaggcgcctgaaaaacgcaagtcatattgagatacagataggtgaagatccatgacctgcttccttctggaaaagccagggggaattctgatgatatcttgcaggacgcccagcaattgtcctgtttctagtagctagactagcactgaacaaggctctcttaccttgatctatttcagttaatctagactgacctttgttaatatcctgtggctagtagtcgtagactgatcaagaacctttatcgatgcgtaagtatcttgtaattcagagtcctagctcccaaattaacacacttcggttatttgtatgcttttaaccccatataattgggaatactgaaagtgcaactcatattacatggatgtctcaaaagattatcaacctatgcggaacgaggcgggcggcggcggacagcaggctgctgtgcgtggggagtagtgcctcggcgtccttcgcggcgacgttgtggccgagacggaggtgggggtggagaagagccgcggctgggggcgacgtcgacgccgccggtacaggcgacgcggcaggacgtgcaggccgccatcgccatggcggtcgagctgcgggcgctccacgccgcggtggtggcggcggcgccggcgccagccgcagcccggcctcccgccggccgcgtcccccgcgctctccaggacggcagcggcagcggtggccaccgttggcgaggactacccggtgtttactccggtgatgatgcttttcttgcatacagtcacattgcatgctcttcttgccgacgaggaagatggcaatgacgaccaccgtcagagtcacctgcggaggtgacgacgcggatgacgcgacgaagacggcgacgtcggcggcggggttcctcccggcgaggtccat

SEQ ID NO: 21360 - DNA, 790 bp, Oryza sativa
  Clone ID: TF_OsC11289_3
gagcagcaacagcagcagaagaagagaagagcaagaggaggaggaggagatgttccccggcctgatccaccaccaccgcctcctcgacgccgatgtcggcggcggcggcggggggagcagcgccggcctggtactgacggccgaccccaagccccgcctgcggtggacggccgacctccacgaccgcttcgtcgacgccgtcgcccagctcggcgggcccgacaaagcaacacccaaaactatcatgaggacaatgggtgtgaagggtctcaccctttttcacttgaaaagccaccttcagaaatacagattaggaaagcaatctggcaaagagatggcagagcaatcaaaagacgcttcttatattttgggagctcaaagtggaacaaatctatctcctacagttccaactccagatttgaaagagagtcaagaactaaaagaagcactcagagcacagatggaagtgcaacgaaaattgcatgaacaagtggaggtccagaggcatgtacagatccgaatggaagcgtaccagaactacatcgacacgctactggagaaggcatgcaacatagtatctgagcaactgaatggcttcagcatatctgaccatgatctaacctctgctggtgtcatgttgagctcttcagacaccttgagcccctccatcttccaccagctctctgtcagctcgatcagcctgcacagtcccggaggcaaatcctccccttttgcagctgatgctgacctgttctttcagaaggcgcctgaaaaacgcaagtcatattga

SEQ ID NO: 21361 - DNA, 1965 bp, Oryza sativa
  Clone ID: TF_OsC1962_1
gcacctagtcaccaccgcaccaaccgcgcgcgaccggccccccgtcagtcgcaagctgagcctgagcgagcaactgatgccgctagctatagctgctgcctgcagcacgcagcgcccgtaacctaacgtatcatttacttccattgcactgcacatcctgtgagttcgttgtctgagtgagagctggacgtgctgcaccgagctcctggccgagatgcttgccgtgtcgccggcgatgtgccccgacattgaggaccgcgccgcggtggccggcgatgctggcatggaggtcgtcgggatgtcgtcggacgacatggatcagttcgacttctccgtcgatgacatagacttcggggacttcttcctgaggctggaggacggtgatgtgctcccggacctcgaggtcgacccggccgagatcttcaccgacttcgaggcaatcgcgacgagtggaggcgaaggtgtgcaggaccaggaggtgcccaccgtcgagctcttggcgcctgcggacgacgtcggtgtgctggatccgtgcggcgatgtcgtcgtcggggaggagaacgcggcgtttgccggggctggagaggagaagggagggtgtaaccaggacgatgatgcgggggaagcgaatgccgacgatggagccgcggcggttgaggccaagtcttcgtcgccgtcatcgacgacgtcgtcgtcgcaggaggctgagagccggcacaagtcatccagcaagagctcccatgggaagaagaaagcgaaggtggactggacgcctgagcttcaccggaggttcgtgcaggcggtggagcagctcggcatcgacaaggccgtgccgtcgaggatacttgagatcatggggatcgactctctcacccggcacaacatagccagccatcttcagaagtaccggtcacacagaaaacacatgattgcgagagaggcggaggcagcgagttggacccaacggcggcagatttacgccgccggtggaggtgctgttgcgaagaggccggagtccaacgcgtggaccgtgccaaccattggcttccctcctcctccgccaccaccaccatcaccggctccgatgcaacattttgctcgcccgttgcatgtttggggccacccgacgatggacccgtcccgagttccagtgtggccaccgcggcacctcgttccccgtggcccggcgccaccatgggttccaccgccgccgccgtcggaccctgctttctggcaccacccttacatgagggggccagcacatgtgccaactcaagggacaccttgcatggcgatgcccatgccagctgcgagatttcctgctccaccggtgccaggagttgtcccgtgtccaatgtataggccattgactccaccagcactggcgagcaagaatcagcaggacgcacagcttcaactccaggttcaaccatcaagcgagagcatcgacgcagctatcggtgatgttttatcgaaaccgtggttgcctttgcctcttggactgaagccaccttcagtggacagtgtgatgggcgagctgcagaggcaaggcgtagcaaacgttcctccagcgtgtggatgatatttgcatgatagattgatggttccgttactgactgattgcttatctggtcagttcaccaaaaaatgggaaaattcgccgacatgtccttttatttttcttttggccctagcgtttcttggacatctcgtttaatttttaacttgtgcagagttcgaaagacatctttgtttcgactccgggagaaattaacctgcgtattgtaaatgtaaaatgtatttgccgtgagttctcagcagctaagaataaattaaataatggtcctccgagtagggtttacttgaaataaaaaaaaaaaaaaaattcaaacgctctaatatctaaattccgcattgtactattttcacaaaggaaagtagcccccgcaattgcacaggcttctt

SEQ ID NO: 21362 - DNA, 2098 bp, Oryza sativa
  unsure (1)..(2098): unsure at all n locations
  Clone ID: TF_OsC50788_1
atgtctcgtccccaacctccaccgcttctccccgtcctccctgaactcggcggcctccaggcactcacctcatcctcggcttccctcgccacgtggctccgcggtggtggtcgggaggaggttgcagctatcaatctagatggcggtgatgcggtcatactggtcgttgtcccacctcacctcgccggccatggtggacaagggaggccgccccactacagcattgaacggaggaggtcacaacctcaattcgagtgccatgcgtatgtcaagggtgtaaaatatttggtattcgagttcaggggtgtaattcggctgacggcgatagctcacggagtggtaggcgacgtatttcttggcagcgaggcacctgtggtgacttcgtcaatttcaaaatatgctggtctagtcttcggaggtgctcatagggatgtgtcagccctaggagaggagaagctttctttttttggaaaatcgagtcaacaaaagagaataagcaccaatcagctctacaattctggaattccggtgactgtgccatcgcctctgcctgctataccagctaccctggatgaaaacattcccaggattccagatgggcagaatgttccgcgggagagagaattgagaagcacacctatgccacctcatcagaatcagagtactgttgctcctcttcatgggcattttcagtccagtaccgggtctgttgggcctctgcgttcgtcccaggcgataaggttctcttcagtttcaagcaatgagcaatatacaaatgccaatccttacaattctcaaccgccgagtagtgggagttcttcaacgctcaattatggatcacaatatggaggctttgaaccttccttgactgattttccaagagatgctgggccgacgtggtgtcctgatccagttgatggcttgcttggatatacagatgatgtccctgctgggaacaatttgactgaaaacagttctattgcagctggtgatgaacttgccaagcaaagtgaatggtggaatgattttatgaattatgactggaaagatattgataacacagcttgtactgaaactcaaccacaggttggaccagctgcgcaatcatctgtcgcagttcaccaatcagctgcccaacaatcagtttcatctcaatcaggagaaccttctgcagttgctataccctcgccctctggtgcctccaatacctccaactccaagacacgaatgagatggactcctgaacttcatgagcgctttgtagatgctgtcaatctacttggtggcagtgaaaaagctactcccaagggtgtgttaaagctaatgaaggcagacaatttgaccatttatcatgttaaaagtcaccttcagaaatacagaacagctcgatacagaccagaattgtctgaaggttcttcagaaaagaaggcagcctcaaaagaggacataccatcaatagatctgaaaggagggaactttgatctcactgaggcattgcgtctccagttagaactccaaaagaggcttcatgaacagcttgagatccaaagaagtttgcagctgagaattgaggagcaagggaagtgccttcagatgatgctcgagcagcagtgcatacctgggacagacaaggcggtggatgcttcaacctcagcagaaggaacaaagccatcttctgatcttccagaatcttctgccgtgaaggatgttccagagaacagtcagaacggaatagccaaacaaacaggagctagaatgtttttattggaattaaatattcaaactacagtaccccaaacacggcagcgacgattccgtgttaatgggatgatctttaggtttcagaaggcagcacaagcaaatttgcactgatgtactctttgtcaggtggtttgacttcttgctttctttgttgttagggactggatagcatggattaggaatttgattatgatgaactaattcaagaaattgccataatctttggtaccttgtgcgcctggaacatgtaaatggtaccaaacaacaatatgatatgtttaccttcatgttcaaaaaaaaaaaaaaaaaaaaaaaaaanaactcgagactagttctc

SEQ ID NO: 21363 - DNA, 762 bp, Oryza sativa
  Clone ID: TF_OsC245016_1
ccttgtcgttccccgggctgcagccgagatccccccccacttgcctcccacgtctctcctatggcgactactgctgccaccgcgccggatctgtcactccacataagcccgccttcgccgccggacatggccgccggcggcgagacgatggagcagttggctgagccaaagctgtgcctagggtttggcacggcggcggcggcggcggcggagcagtacaacaatggcggctgcaacctccagcagcagcagcggctgcaccaacctagccagatccagagattcaagaagagcgccagcggcggcagccctgtgtgctccggcggcgccaccggcaccggcggcgttgcggcggcgagatccgggaatggcggtggaggtgggaagaggagctctagggcgccgaggatgcgatggacgacggctctccatgcgcactttgtgcaagccgtcgagcttcttggaggccatgaaagagcgacaccaaagtcagtattggagttgatgaacgtgaaagatctcacgctggctcatgtgaagagtcacctgcaggcaacttatttgcttgacctggtgcagatgtatagaacagtgaagggaaccacagacagaacatgtgctgaaggccatgggcagatgagagatatgggctttctgaggagaggaggtggtggagtggatggctttgacgtgcttggtaacacctcttcaattgcaatcgccaatattagggccttcaatctcaaggatgcaaatatataa

SEQ ID NO: 21364 - DNA, 2461 bp, Oryza sativa
  Clone ID: TF_OsC1963_1
ccgcgtggctcccgggccgcccaagcaggccgtccccccgctgccgccgtcgccccgccgctccgtccacgcggatcttctgctccttcctatccattccctagctacctggagagatctccattagagcgaccttgccctcatgcactaccaccatccatgcatatgcatcgcgtcgtgattgcttgccctcttcactcccagctttgcctcttcatatcctgcacacccatcgcatatagaccttctaccatagagtggttgaattgaatctacgtgtgtatatagctgagaatcagaggcttagcgctggaggtttcggagtacatagatgtcgtggtcgcctgccgatcttgcgaggtggagaggggagagattttgggatgcttgaggtgtccacgctgcgaagccctaaggcggatcagcgggcgggcgtcggcggccaccatgtcgtcggcttcgtcccggcgccgccgtcgccggccgacatcgccgacgaggtcgacgcgttcatcgtcgacgacagctgcctgctcgagtacatcgacttcagctgctgcgacgtgccgttcttccacgccgacgacggcgacatcctcccggacctcgaggtcgaccccacggagctcctcgccgagttcgccagctccccggacgacgagccgccgccgacgacgtcggctccgggccccggcgagccagctgctgctgcaggagccaaggaagacgtgaaggaagatggagccgccgccgccgccgccgccgccgccgctgactacgacgggtcgccgccgccaccgcgggggaagaagaagaaggacgacgaggaaaggtcgtcgtcgttgccggaggagaaagacgcgaagaacggcggcggcgacgaggtcctgagcgcggtgacgacggaggattcctcggccggcgccgccaagtcgtgctcgccgtcggcagagggccacagcaagaggaagccgtcgtcgtcgtcgtcatcggcggcggccggcaagaactctcacggcaagcgcaaggtgaaggtggactggacgccggagttgcaccggcggttcgtgcaggcggtggagcagctcgggatagacaaggccgtgccgtccaggatcctggagctcatgggcatcgagtgcctcactcgccacaacatcgccagccatctccagaaatatcggtcgcacaggaaacatctgatggcgagggaggcggaggcggcgagctggacgcagaagcggcagatgtacaccgccgccgccgccgccgccgcggtggcagccggcggcgggccaaggaaggacgccgccgccgccactgcggcggtggccccgtgggtcatgccgaccatcggtttccctccgccgcacgcggcggcgatggtgcctcccccgccgcaccctccaccgttctgccggccgccgctgcacgtgtggggccacccgaccgccggcgtcgagccgaccaccgcggcggcgccaccaccaccctcgccgcacgcgcagccgccgttgctgcccgtctggccgcgccacctggcgccgccgccgccgccgctgccggcggcgtgggcgcacggccaccagccggcgccggtggacccggcggcgtactggcagcaacagtataacgcggcgaggaagtggggcccgcaggcagtgacaccggggacgccgtgtatgccgccaccgttgcctccagccgccatgttgcagaggtttcctgtaccgccggtgcctggaatggtgccgcaccccatgtacagaccgataccgccgccgtcaccgccgcaggggaataaactcgctgccttgcagcttcagcttgatgcccacccgtctaaggagagcatagacgcagccatcggagatgttttagtgaagccatggctgccgcttcccctcggcctcaagccaccgtcgctggacagcgtcatgtctgagctgcacaagcagggcatccccaaggtgccaccggcggcgagcggtgccgccggctgatacacatcgatcacaccgatcgtctcctccgccgccggcgaaaaaaaaaaaaacctctcctctctgctccggccggtctccacggtgagaagaggcaatgcaacccgtcgacttgtcgtagcttcgtcagtgtgaattgattcatcatgcattcacccaatgcgtgtagacgagctcgatgtgtaaactagctagtgtgtcttgtgtgtttgcattgacatatctgggtttttgctctcatggaatgtgcatgcagagacgatgcaggcgacatgcatgcctacctgagagttgcgtgtaaaatataaaatgttttgagatggaacgtacacggactgctatatatattttggacagctggtaattaaattgagaaataaccaaggaacttacacttaaaaaaaaaaaaaaaaaaaaaaaaaaacaagagaagcactcgtcccaactcctgcagcccg

SEQ ID NO: 21365 - DNA, 708 bp, Oryza sativa
  Clone ID: TF_OsC1713_3708
atgtttagatggggcctcacgctcgtggccgccgagaagctcgacggcgtggacgaagcgggcgtggagggagctcgtccaccgcatccgcggggcgcgcatgctgcggcgggacgccgggaggaggcgcggcatgaagcgggaggaggcgaacccgccgccggcgccggcgccgccgtagccgtgtcaccggcacggacgccgccgccgccgtcggctgccgcagccgccacggcagcacatcggccgccgatgtactgccctcctgctgctgctgcggcgtcgacagaaatgtaaatttcacaaatataaatgcgacaatcaaatgagacaaggagacgagagatttttcaccgaggttcggaaactcgccggtttcctactccccgttgaggcgagccaaactctaccgctcaaccacgaagccaccgcacgcccccttcgtcaaggggtgggcaaaatggatgaacacaaagctcaagtggggggccggtctgaccgcgcatgtgccgccagtcagaccggccttatgcgccggtcagaccgccgttgtggcgccggtgcgaccggccagggcacgccggtcagactgccagtgtggccggtctggctgcccctgttcaggccgaacccaatggttgcatcgatgacataccaagccaccccctaatatcatcattgttaccaaggcgagggaggatagtagct

SEQ ID NO: 21366 - DNA, 3374 bp, Oryza sativa
  Clone ID: TF_OsC7848_1
atggcgacgcgcggggaggcggcggcggcggcggcggcggaccgggacatggagctcttccggagcgggtccgcgccgccgacggtggagggcgcgatggccagcgccgccgcggccgccggcgacgtgttcctggacgatgagctccgggccgacccggtgtaccagagctactactactccaatgcgcacctcaacccgcgcctcccgccgccgctgctctccaaggaggactggcgctcggcgcagcaccgcctccgctcctccgccctcggcgggatcggcgacggcaggaggcagccggccgcggcggcgcagggggatgggctcgtggggttgcccgggatcgacctcgatcggcaggggagcttctccagtatcttccagtttcatcttatccaatccaaggagagctcgtatcagctggacatgggtaagcagggcgccgaccgcaacattagtgactttctggattcttctcggccacagtatgctctgcatcgtgagactagtagagctatgggtggtctgcagagtgacagcaatatacaaagcttggctgaagttcagaacaatgattcatcagcacatacatatgcctctcttttaggatcatctctttctagaagcgcatctccagatcctgagcttgttaggagggtccccagtccttgcctccctccaattggtgtgaaagtcagtgctgatgataagaagaacaatggtggttcatcttccttccgtcgaagttcgtctgctattggtgaatctgataatctgatagctgctttatctgggatgaatttatcatcatctggagcagctagtggacagcaaactgtgacccagtctgagctctaccaggatgttgataatgtccgtaagtttctatttgatcgtcagggtgatcaatcaaatggcaaccagcaacactcctatatgaaacatcccgaacaaggacattttaaggcacctgatggttactctgcaaactcgcctaattcttctatgataagaaatcaaattaatgctgctagtttcacatcgtttgacaatctgtctgctggatcaggctttgcttctcctaggatcggttctaggtccccaggtgggactttatcttcaaggcagaatttggttggtggatctaactttctgaattacaatggaattggaagtccaaatgcagcaacttctcttcaaacagccattgatccgtcatatattcagtaccttcaggcagctgagattgctgcccaactcgcagctagctgtgatgatcctctcatggccagtggccatctgggaagttcttatatggatttacttggtcctcagaaagcttatgctagtccattgcttcagtcacagaagaactgtggctactatggaaaccttggatttggccttggttattctggaagtcctttgatgagtcctgttcttccctcttcccctgctgcacctggtagtccacttaggcatggtgaacgcagcatgcgcatgcaatcaggtataagaaactttggtggttcctttggttcatggaatcctgacctaggtggaaagatgaacatcaatatgatgccttcactcctggaggaattcaagagcaacaaaagcaaatcttatgagctctcagaaattgctggtcatgttgttgagttcagtgctgatcaatatggaagccgattcatacagcaaaagctagaaacggccagtactgaagagaaggacatggtcttttcagaaatcatgcctcaagctctcacgttgatgaccgatgtatttggaaattatgttgttcagaagttctttgagcacggaagccctacccagataaaggaattggccgaccagcttattggacgtgttcttgctctcagtcttcagatgtatggatgccgggttatacagaaggctatagaggttgttggtttagatcagcagactaaaatggttgctgagctggatggacacgtcatgcgctgtgtacgtgatcaaaatgggaaccatgtaatacagaaatgcatagaatgcatccctcaacatgctatccagttcattgtctcaacattctatggtcaagttgtgatgttatccactcatccatatggttgtcgggttatacagagggtgctggagcattgtgatgatcctacaacacagcaaataatgatggatgagattctccagtccgtttgcttgctggctcaagatcaatacggcaactacgttgttcagcatgtactggagcacggaaaaccacatgagagatctgctattatcgagaagttaattggacaaatagttcaaatgagccagcaaaagtttgcctcaaatgtcattgagaagtgcttagcctttgggaatcctgtagaacgacagattttgatcagtgaaatgcttggatccactaatgagagtgaacaccttgaggtaatgatgaaagatcagtttgcaaactatgtggtgcagaaggtgctagagacttgtgatgatcagcagagggaggcgatccttacaaggataaaagcacatctgaacacgctgaagaagtatacctatgggaagcacatagtagcacgcgtagagaagcttgttgctgctggagagaagcgactagggcttcaaccagcatgcaccagtgccgcctgaagggcaagcaatgctgtacagctaacagtggctaggtttggtttgcacgctcctggtcgtcggctccagctaaaaacgtaggccagtatggcctatttgagaaataataaaaatacgcatcttaaaatcgcttgcactggagagtgtatattatgtagttgaggagcacgccgcaggcagcagggatggatgatggattgagtgagtgatgtgtgcaagtgctaatccaatatggaaggaagaagttgtaaagatgaggaggaagaagaagatgagtatacgtactctgctgtacaaattttatttagcactagagagatgaaaagaaaagagagaggaagctgttagctgtcaatatgagtgagtgatgggttgttgttgatgctgtaacataactagagtactactcagggcacaaaactagcctaagccctaagccttggtttttagtttttacagtttgaagctgaagctaattagtatcagctttgctgaacctggtttgttaatttgtcgcgcgccccccgtcacgctcgtcctgcgcctgtacgtggcgccccgcgcccgggagaacgtcgccagccacctccagaagtatcgcctctacgtgaagcggatgcagggcctctccaacgagggcccttccccctccgaccacatcttcgcctccacccccgtcccccacgcctccctccacgagcaggttccttctcctt

SEQ ID NO: 21367 - DNA, 1298 bp, Oryza sativa
  Clone ID: TF_OsC47644_1
ttggttttagctgcatccggggtattaattgcaaaaagaagaagaagaaggaatcaagaaaacccaaattgtgatgatgagatcgagacgcgaaatatatatctcttctccgatcgattgcgacgacgatgacgacgacgcagtggatatgatgtgcgtttcaagccattgctgctgatcattcttcgccatgacaagcttcagacgaactggctctggctaagctggggttggcgaaagatgatcagcaccaggttggtgtatatcacatatatatttcacatctcaggagaaatttttttttgatcattagcctctgtgattgccatctaatcatgatctgcaccgtgccagtcaggcctccctagagtgaactcgagactagggctactcagctcatggttggacacctgcgagctgctcgatctgcacggttccaagttctcaataggagaagacaatcctacggagcgatgggcgtccatgttgcaagaattggacgacagccatgggtcccttgaggagttgctccacctggtggtgctggtgttgccggccgacgactggtccatgtcgccgccgccgccgccgccgaccgagctggcggcgccctccgacgccgaccggccgtgctccgcgaacgccgccgcggccaccccgccgccgccgccacccctcaggcacatgctgtcgccgccgcccgacgccgcctgcccgccgccggcgaactcctcgtcgccggagccgccgtccgccggccctgaagaggctgcaggcttgtcagtgctcttcacggtgcgatacatctggaggtggctcttgacatgcgctagcgtcagatccttgacgtccatgagctccagcaccgacttgggcgtcgccctctcgtggccgccgaggagctcgacggcgtggacgaagcgggcgtggagggtgctcgtccagcgcatgcgcggcgcgcgcatgctgcgcttggcggggagcttgggcatgaagcgggacgcgagggcgccgacgaacggctggccgccgtggaggtggtggtggtggtggtgcgcgccgccgatgacgccgggggcggcggcgccggggacgccgtagctgcggagggtgtcggagacggagagcatgccgttgagcctccccgaggcggcggacagcatccggtggtggggggaggagaggaacgccgccgtggggtcgagcggcgacgacgcggcgcccggcggcgccgcgagcggggacggcgacgtggagggccacgtggatgggtggtggtacgagctgtagaatcccat

SEQ ID NO: 21368 - DNA, 762 bp, Oryza sativa
  Clone ID: TF_OsC12030_2
tcacagcttcgagggtgtttcacgagaaacgagatcagcagaaattagtaatagcaccatgacgagggacatgaagaatctactttcgtggttctccttgcaagatatcttcatgttcctgaccatatggttcagttgatgtgctttgggtttactaatctggtgtaccataaagggctcctctcttcttccctgcacccaaaatcccagtgcctgatgaaggcttgaagcagcagcagcaggagcacgagcacgagcggcagctgcagcatcgtgttgatctgatctcctcctatccatggacacttcttgcagtcgcatacaatcatcgatgaagtaccgggtgcctgcaggaggagcactactcctcatgtcactgctcccttccatgcatctgtatttgcctgaagcttctgtccctaccttggccctttttatgggtgggcacatgaattccttggggctctgctcatcactgccgaatgagtgctgcttcagatgtagctgtggctgcatatcgttttgtccaatgccatgccgtgtgcctctgtacatctgtaggtgacttttaacgtgagatatggtaagccctctgacatccatgagctgaagaatgagcttaggagttgctttttgttggccgccaaggcagtcgatggctcgcacgaagctgcggtggagctccgcggtccatctcagcctcggcaccttggacctgttgtactgcctcgcggctcccttcctctcgccgctaattcccat

SEQ ID NO: 21369 - DNA, 659 bp, Oryza sativa
  unsure (1)..(659): unsure at all n locations
  Clone ID: TF_LIB4370-035-R1-N1-F12
aggaaaaaagcaacatttttattcacccaagcatagcaagttcatcacactgtgatcactgatcatcagttcatcacaagaaaaaaacgacaatatgcgaatcttgtatatatttatgtataatatgtatgtaaatctcagggcgaaaatttggggtctgcccgacactttgcaagcctcatgggtggtagcagctcttcatctacacatccacaacaacccagctcatgatcagttcatcacttgagctctcaacagctcaatcttccctgtatacatggccaacactaccatcctcctcagagtttctgaatccattattggcaattttgcatcgatgcgcaagccgaaaatccatcaatctacctctctgtctagcaagattccacgagcacgatctttcgatcattttcggacatagccttccgacttgtcatcatcctcgcagcagctgcgncggccgggtggccgccgagacggccacccctgagccggagagctgaaggggaccttgaggtgatccggattgagagcagcttacttcctgagaagcccagagatcaccaacaagtacaatcgaatggctcgctgaagctgtgcctggtgatttccggttgtgcagccgatacttctggagatggcttttcacttcgtcgttg

SEQ ID NO: 21370 - DNA, 3462 bp, Oryza sativa
  Clone ID: TF_OsC7848_2
atggcgatgcgaggtgagccgtggcggcgccaggagggggagcaggcgcaggcggaggccgatcgggaacgcgagctggacctcttccgcagcggctccgcgccgcccacggtcgagggctccatgggcgcgctccacgccgccgccgccgccgacgtgttcctggaggacgagctccgggccgacccggcctaccactcctactactactccaacggcaacatcaaccctcgcctcccgccgccgctgctgtccaaggaggactggcgctccgcgcagcgccttcgccccggcttgggtgggatcggcgacgggaggaagcccagaggtggaggtggaggccgcggcggcggcggcgctggagggatgggtccaggggatggcctcattgggatgcccggtctcgagattggccgccagaatagcttctccggttttggcactataaaacgcctttctgtcgcaaaagtattggtcctgaaacttcttataattctattcaaggctaaagaaataacttctgacctatatatgctgcaggatgactcgtatcaacacgatacggatagacagggtgccaactgcaatggtacagacttgttgagttcttctaaagtgcagtatggtctacatcgtgagactggagctattagtggccttcactcagacagcaaagcaccatgcttgccagaaaaccagaatgaatcatcacactcatatgcatcaataataggatcatcactttcaagaagtgcatctccagatcctgaactagtgaggagagttcctagtccttgcctccccccaattggtgtgaaacttggtgctacagataagaagaataatgttggttcatcttctttcaattgtagttctcccaatattattgaatctgatgatttggtgtctgctctatctggtatgaacctgtcgtcatcaagagcaatgaacggaaacacaatggaccaatctaagctccatcaggatgtggatgatgttcgtaagttcctttttgatcagtacatggatcaaacaaatggcaatcagcgccattcctacatgaaacgttctgaacaaggacacgtgaaggttcctcaagaatattctggtgcttctatgaatccttctgttatgagaagccagatcaatgctggtggtttcacatcatttaacaactcatcggtgggatctggctttgcttctcctaggcttggatcccgatcaccaggtgggagtttatcttcacggcaaaatctaactggtgcatctaaccttccaaactacgttggaattggaagtccaactgcagcttctgcccaccagatgcctgttgatccactgtatgttcagttccttcgggcagcagaaattgctgcccttgcagctaactgtgaggatcctttgatggatagggctaatctaggaggttcttacatggatctatttggccctcagaaggcgtaccttagtccattgcttcagtcacagaagcaatatagttactacgggaatctcggggttggtcttggctatgctggtaactctttaacaagtcctattcttccctcgtcaccaggtggacctggtagtccacttaggcacggggatcgcagcatgcgctatccatctgggatgagaaattttggtggttcctttggctcctggaattcagatctcggtggtaagatggaggccaatttagttccatcacttctggaagaatttaagagcaacaaaagcaaatcatatgagctctctgaaatcgctggtcatgttgttgagttcagtgcggatcaatatggaagtagattcatacagcaaaagcttgaaacagccagcactgaagaaaaagacatggtttttgctgaaatcatgcctcaggctctcacattgatgactgatgtctttggaaactatgttgttcagaagttttttgagcatgggagctcagctcagataaaggagttggctgatcagctaattggacgtgtcttagcactcagcctccaaatgtatggttgccgagttatacagaaggccatagaagttgttgatttagatcagcagactaaaatggttgctgagcttgatggacaagtgatgcgctgtgtacgtgatcaaaatggaaatcacgttatacagaaatgtattgaatgcattccacagcatgctatccagttcattgtttcaaccttctatggtcaagttgtgatgctatcaactcatccatatggttgtcgggtgatacagagggtgctggagcattgtgatgatcctaaaacccagcaaatcatgatggatgagatcctacaatctgtttgcttgctggctacagaccagtatggtaactatgttgtccagcatgttctggaacatggcaaaccccacgagagatctgctattattgagaagttgattgggcagatagtacaaatgagccagcaaaagtttgcttcaaatgtcattgagaagtgtttagcctttgggaatcctgtggagcgtcaagtcctgattggtgaaatgcttggctccagtaatgagagcgaacatcttgaggtgatgatgaaagatcaatttgcaaactatgtggtacagaaggtgttagagacctgtgatgatcagcagagagagatgatccttacaaggataaaagctcatctgaacacactgaagaaatatacttacgggaagcatatagtggcacgcgtggaaaagctcgtcgcagccggagaaaatccgagtattatgggcgaggaggcgccggaggagtacgagctgggcggcggggaggacgagcgggtgatggagtgggagacggggctgcccggcgccgacgagctgaccccgctgtcgcagccgctggtgccggcggggctggcggcggcgttccgcatcccgccggagcccgggcgcacgctgctcgacgtgcaccgcgcgtcggcggcgacggtgtcccggttgcggcgcgcgtcgtcgtcgtcgtcgagctcgttcccggcgttcgcgtcgaagggagcgggaacgggagcggacgaggcggagtcagggggaggcgcggatggggggaacgggaacaccaacaacagcagcagcaagagggcgcggctggtgtggacgccgcagctgcacaagaggttcgtggaggtggtggcgcacctggggatgaagaacgcggtgcccaagacgatcatgcagctgatgaacgtggagggcctcacccgggagaacgtcgccagccacctccagaagtatcgcctctacgtgaagcggatgcagggcctctccaacgagggcccttccccctccgaccacatcttcgcctccacccccgtcccccacgcctccctccacgaccaggttccttctccttaccacccccacccccaccaccactcctacaacaacgccgcctatgccgccaccgtctcctcctaccaccactaccaccacgccaaccactga

SEQ ID NO: 21371 - DNA, 542 bp, Oryza sativa
  unsure (1)..(542): unsure at all n locations
  Clone ID: TF_uC-osflcyp085b05b1
tttaatctctcctcctcccagcaaagaggaggtggtggagatctcccaatccgcgggaatcactcgctgttcaccccgattcggcctccgctcgagctctgaatctcgggagctcctgatctggaggatgccaaatgtatgaaccaaagcccttctcaagcattgtactagctcacaacgatccagtttcccacaatcaacaaattgaacgtattaacaacaatgtagtatctaatagtggtgggaacagctcaaacagcaactttgccgccagacagcgcttacggtggactgatgacctccatgatcgttttgaggatgctgtaacacagctcggtggacccgacagggcaactccgaagggaattcttagaataatgggtgttcaagggttgaccatctatcatgtcaaaagccatctgcaaaaatatcggcttgctaaatacattccagatcccacagctgatggtgccaagtctgacagaaagatctcggagatttgcttgctgacattgaaagctcctncggaatggacatagggg

SEQ ID NO: 21372 - DNA, 502 bp, Oryza sativa
  Clone ID: TF_uC-osrocyp028f03b1
tgtgaatcccccctcggacggcggcggaagcggatgcagcataggagagcatctggttcccctgcgctgcccgatttttggtggtggcggctgcggtcggcgggagatcgatgcctcgacgtgccggtaagcattctcatgatgtaccatgcaaagaagttctgtgtaccctttggaccgtagagttcacagagtaacgagcatatgagcaatatcggagcttttggcgggtcaaacatgggcagccctgctcattctgcagggagtgggaaacaacggctacgttggacctcagatcttcataaccgttttgtggatgctcttgctcagcttggtggacctgatagagcaacacctaaaggggttctcactgtaatgggtgttcctgggatcacaatttataatgtgaagagccatgtgcagaaatataggcctgcaaagtacataccacaatcttccggctgaggctcaaaagaccaaaagacggattctagcgattccc

SEQ ID NO: 21373 - DNA, 1518 bp, Oryza sativa
  Clone ID: TF_OsC102690_1
cggcagcggcacggggaccgcagctccggcgcctcagctccagcttcagctttgggcttctcctatagcctcttttgacatcatatcagtgcagtggccggcggcgatatcatgcagcagcagcaacgagactagagctctcttcatcatcatatcgtcaagctgccatagatcgatcagagctggctgctggccggccggtgatccttcctataatttcctagctatgggaagtgcaggcaaggaggaggaggaggaggacggcggcggcggtgcaccggcggcggcggccaacaactacgggagctcgacgacgagcagtactacggaggaggagggatccggggagagcaggcggcgcacgtcgtcgtcgtcgtcggtgcgcccctacgtccgctccaagaaccctcgcctccgttggacgccggagctccacctctccttcgtccgcgccgtcgacaggctcggtggccaagatcgcgcaactcctaagctcgttcttcagctgatgaatgttagagggcttagcataggccatgtcaagagccatctccagatgtataggagcaagaagatcgatgagtccggccaggtgataggtggtgagtcatggagatcagatgatcatctgcaaatgcaaggtggtggccatgggggacaagcgtacaaccttggccatctttccctgcctgctctccatcatcgctctatcactgctggctccggtaccatcttccagtccaggtttggcaattcatggtccccatggagatgtcatggatcatactggctccctgcaggccatcacctgcttgttggatcaaaaccctattacccaccagcagctgaagctgaagctcctttccgcagatcaagtgctaggtatgtagctagagctaataccagcaaccatccagattttgtccaaggctcttcttcatctccagatgataatatcatgaaccatcaaagaccagttctgaaagagatgatctgcagtgagggtagtaaccatcaagaaggccctcttaatctggatctctcactcgatatctgtccgcggggcgagaagaggaagagagaatgcagctggaggaaacaagaggaagatcatgatcatgctactgttgctattggtgctgatcaagaagcagagagttgtgctactgggctctctctttctttgttctgatcatgtctcccctgttgaaagatgcaccatcactagtcctaccagtactatattgctgtactggcctggtgatatatcactagctagctatagtagctagatatcatatgttattgtggatgataaatcaaattagggaagaaaactcatgcagcagggacaagtactcttcatctcaccatatgactacactgtggtgatattttgtggtacttgtccttttatgcatgtatctagaggaagataaatatttattatgcatttcggttgttcattatccttcatatattttgactcattaatctagctgatatcccgattaatct

SEQ ID NO: 21374 - DNA, 499 bp, Oryza sativa
  Clone ID: TF_jC-osroLIB3475017g11b1
cccacgcgtccgaagaaccctcgcctccgttggacgccggagctccacctctccttcgtccgcgccgtcgacaggctcggtggccaagatcgcgcaactcctaagctcgttcttcagctgatgaatgttagagggcttagcataggccatgtcaagagccatctccagatgtataggagcaagaagatcgatgagtccggccaggtgataggtggtgagtcatggagatcagatgatcacctgcttgttggatcaaaaccctattacccaccagcagctgaagctgaagctcctttccgcagatcaagtgctagtgagggtagtaaccatcaagaaggccctcttaatctggatctctcactcgatatctgtccgcggggcgagaagaggaagagagaatgcagctggaggaaacaagaggaagatcatgatcatgctactgttgctattggtgctgatcaagaagcagagagttgtgctactgggctctctctttctt

SEQ ID NO: 21375 - DNA, 1543 bp, Oryza sativa
  Clone ID: TF_OsC43828_1
tccgtccacaatcaaaccacttccatctctcaattctcaagcacacacacaatccaacaagcttctcgaaattctcgatcgaggtggagtggtggtgtatgcgcgatggggctggatgtgggggaaatcggcgtcggcgcggcggacctgagcctggatctcaagatgttcgccgccaagagcttcggccgcgtcaggggcaaggacaccaccaccaccgccatgggtgactgcatccggaggctcgaggaggagatgggcaagatcgaggtcttccgccgcgagctccccctctgcgtccgcctcctcgccgacgtgattgatgtgatgaaggaggaggtggagaagaagggtggtgatcgtaaggaggatgaggaggacgccgccggcgacaagagcaactggatgagcaccgcgcagctctggactgggaattccggcggcccagacgccgccgccgctgatccagagaagcaggacaaggtgaggatctcgtcggaggcgaagtccaacggcggcgcgtttgtgggctctggcgcgccggctttcgcgcggccgaagcagagcttgatgaggaaggaggacatggcgtacgacgtcaggatgccggatctgtcgctgctctcgccgcctgcttccgccgccgccgccgacgaaagccgccgtcaggtcgtgggcttctcccaggccgcggcgagggctgccgccatggcggcgtctggccccgctctcagcctccagccccagcctcagccggcggcggcgcagcagcagcagcaggcgaggaagacgaggcggtgctggtcgccggacctccaccgcaagttcgtcgccgccttgcagcaactcggtggccctcaagttgccactccaaagcaaatcagggagctgatgaaggtggatggactgacaaatgacgaggtcaaaagccatcttcagaagtaccgcctgcacaaccggccgagagtgccaagctcaacaattgtgaaccaaccgattgtgctcatgcaagggctctgttacattcctcaagagcaaagcagctcccagtctggatcccctgagggtcctctccatttctcaggctcaggcatggccggtggcggctcatcggcggcgacggtcagctgcgaggaggaggatggcaggtctgagagctatggctggaaatgatccaagatgatgttgcatcagaaattttcatcacagctttggtgggttaggttaattgcggcgcggcgatgaaaaataataccagatcttcagggaggagtttgagaggagagactagtgtaggtgtttgtatacagtgagatcgagccttgagtgcttgagatgaaactgatggtgagttggttgttgtcatgtatatcgaaagagatgatactagctacagttttgcggcgagttttgccggttaaaggattcgggcagagctacagttttcgccctgagaattttacccaaaaaaaaaaaaaaaaaaaaaaaaaaaaaaaaaaaaaaaaaaaaaaatccccccgcccggtattactatagttctgat

SEQ ID NO: 21376 - DNA, 1528 bp, Oryza sativa
  Clone ID: TF_OsC331400_1
atggcttcttcgtcttctgacctaaccctagacgaccaccaccatctgacggcggtggctgcggcgtcggggcaggcgacgcagaagcttcaggagttcttgtcacgtctcgaggaagagaggctcaagatcgacgccttcaagcgtgagctccctctctgcatgcagcttctcaatcatgctatggaggcgtacaggcagcagctggaggcgtaccagatggggagccagcatagcgccgcggcggcggcggcggcgagggcgccgctggtgctcgaggagttcataccggtgaagaacatcgggatcgacgtcgtggcggcggacaaggcggcggcggcggggggcaacagcgtgtcgtcggagaaggcgagctggatggtgtcggcgcagctgtggaacgcgccggcgtcggcgtcggcggcggacacggcggcgaaggggccccagacgcccaaggagcactcggagcaccacccgctcgacacgagccccaagctgatcaccgcgctcgacggcggcggcggcggcggcggcgcgttcctgcccttctccaaggacaacgccatgggtgacggatcagccgccgccgccgccgcgctgccggagctcgcgctcgcgcccgcggagaaggcggcggacgcgatcaccatcgccgccggcgaggtcgacaagaagccgtacgcccacgacaacggcgtcgtggcgagatcgagagaagcccagaacggcgggaagccgccgtcgacgccatcggacgggcaggccgtcccgccgccgccacagccccaccggaaggcgcgccgttgctggtcgccggagctgcaccgccgcttcgtcaatgctcttcagatcctcggcggcgcccaagtggcgaccccgaagcagattcgcgagctgatgaaggttgatggattgaccaatgatgaggtgaaaagccatctccagaagtacaggttgcacacaagacggccgatgccgtcgccggcgccgccgacggcagcgacgccgcagctggtggtgctgggaggcatctgggtgccgccggagtacgcgacgcaggcggcggggccggccatctacggcgcgcacccggcgacgcagccgcactacacggcggcggtggcggcgcaggagtactaccaccaccaccaccaccacctgcagcaccaccccgccgccgccgccctggtgcaccaccgcgccgtagccccgcccccgccgctgccgcctcagcagcagctggcccctccctacagcgccaagtcgtcggcgtcggcgaggctcgggtccccggactccgacggccgtggcagcggcggcggcggcggcgccgccgcctccggagccggaagggacatgtccgagagcatcgaggaggaaggcgagggcgaggagcgggaggacgacgacgacgacgacgagatggcggcgaccaacaacgcccacgccgtcgacggcgacgacgacaacgacgagatcaacaccaccaccaccacgagcgcgggagcgattaactactaattaa

SEQ ID NO: 21377 - DNA, 1374 bp, Oryza sativa
  Clone ID: TF_OsC143589_1
ctcatttcatccccttcttccttcccctttcctagctattccacctgcacgcgcgtacgattccgatccagccatggcagtgtagatcgaaagagatcaagtagaagatttggtaagatgcttgagaggtagatagctacctagagaaggctgatcagcatcagcctgagagagatgaaggagaaggaagtgctagttgagattgttgaggatgatgagctgaagagatcgattggtagaaatcagctggacctcaacgaggaagttatggatgtcgagagcgaggagggagaagtcggcgatgatgaagatgacgaagatgaggaggatgacgacgacgacgatgatggtggtagcaccaccgatgttgccggaagcaggagctccagcaacaacagcagcaccaataacgtttcagagagcaaattgaagggcgacaaggatagcggtggcggcaggttggaggggatcaacggcggagagcagagggtgccatcggtgcggcagtacaaccggtcgaagctgcctcggctccggtggacaccggacctccacatggcctttgtccatgccgttgagaggctcggtggccaagagagagcaactcctaagttggtgcttcagatgatgaatgttagggggctcagcattgctcatgtaaaaagccacttgcagatgtatagaagcaagaagttggatcacgagggtcgccagatcagaggagccatcgcctcagtgttctctccaatggatttccatctgatgagaggcgatcgacgcttccacgacatgctcctccagcgagccgccgcgctctcctcctccaggcaggagcacggcggtttcttctcctcgagaagcggcggcggcggcggcggcctaccgccggaggccagccggctgtacggactcctccaacaccggcagtctccggcgatagcgacgatgcaaacattagacttcaagaacagcagtttcaggaaccaagagtggtcgttcagcttcaaccaccagcggaaggagacgatgaatccgtcgtcgtcgtcgtcgaccaccgcggcgatcaggcggtggccttcagccgccggcgcggtcgccgtcgtcgccggcgagcgacaaagactagcggagagattcggctactacaccgggaacggtggcgcgtcgtcgacgtctctgccgctcatcacgagggccgccatggcggcgccgccgccgatgtttgcggcggccgtggcgccgccgggacgtgatcaccatcgtcttccgtttggatggcacgccggcggcggcggcggcggcggcggtaataagaacaggtcgtcgtcggatcccgtggtgatcgatgaagccctagattcccgccgcctcgag

SEQ ID NO: 21378 - DNA, 1781 bp, Oryza sativa
  Clone ID: TF_OsC226770_1
atgggggaggtgaaggagaatgaggtggtagagatttttgagcatgatcatgacaacaagatcagatctcctgaaaactctgtgccaccagccatggtgctggacctcaacgagggcttcggcgagggcagcgaggaagggggagttggcgaagacggagatgaagaagacgatgatgaggacgacgacgacgacgacgatgacgatggcggtagcacaagcgaagttgccggaggagggaggagctccagcaacaacagcagcaccaaccacaattccgggagcgacaaggaccatgacatgaacagcagcagcagcaaggccgacggcggcggcgacagggtgccgacggtgcggcagtacaaccggtctaagctcccccggctccggtggacgcccgacctccacatggcgttcgtccacgccgtcgagaggttgggcggccaagaaagagcaacaccaaagcttgtgcttcagatgatgaatgtgagggggctcagcattgctcatgtcaaaagccatttgcagatgtacagaagcaaaaagctagaccacgagtctggccacgagagaggagccatctcatcagtgttttcgcccatggagttccacatgaggagaggggaccatcgtttccaccaccacgacatgttcttccagcgagccgccgccgctggcgtctcgccgttctcctccaggatgctgcacgagaacggcggcgggttcttcgcttcgaggaatcccggcttgccggagtccagccggctctacggtctcttccaacgccggcagcaagctcccatgcaaaaattcgacttcaagaactgcaatagcttcagtaggaaccaggagtgggcgttcaaccagcagcacgcggcggcgagggccgccggcgccgtcaacggccacggcccggcgaaagggctcatccacgagatgatcttccggaaggaaggaaagccgacgtcgcatctgttcgacgtgagggacgccatcgcctccacccgggtgacctcggcgaccacggccgccgccgccgaccaccggctagacggcgccgggaaggccggcaactttgattggatcgggagcagctcctcccggccgctcacgaggacaatgtcagcggcggcggcggctaccatgggcgaccaccaccatcttcggtggcgaggcggcgccgccggcagcgggaacacgacggcgtcgtcggatccggtggtcgcaagcgaagctgccctaggttccctgctcgagagggcaaagacgaaagcgaccgaggcgatgcgcctcgagacgccggtgaagatgacggcggcggcggtggcggcggaggagatcaacggcaggacgccggacttgcagctgagtttgagcccgaacgcgggagatcacagatcagccggcgagaagaggaagttcttgagtgagcaggaggtggacagtgacaagcagcagctgccactcacgctttccctgtcgctccggggtggtggcgacaatggcggcggcggcggcgcagaagccgccgggaggttagaggaagagatgacaggtagcagcagtagcaagaaggccgctctggggctgagtactttggatctgaccatgtcgatcaaggcattggagtgagatctttcaagtacttgtcccaaggccttccaagacatgcacactgcaccatgagattaattattaataagactgttaattttgtttaaccatgcttccagaccatatataatacatatatatcttatgttcaaaaaaaaaaaaaaaaa

SEQ ID NO: 21379 - DNA, 3918 bp, Oryza sativa
  Clone ID: TF_OsC4702_1
gcacgaggcacctctgagtagtagtcacaccatgacaccaaaggaaggagtagtcactggccagcgatgatttgcagtagtaacagatataggtcttaggcctccctgagaggctgagagagagagagagagagagagagagagagagagagatttggtgttggataggagaagagagtggagacagtgggggtgagaggattggaagcatccagattctgaatctcctgcaagcctacttcctgttatcttctttgggctttcagcaagcatccattgtgatgcactggccagtggatgataaagccatcaatcaactgaaccagcatgagctcccagagtgttgttgcagtgaagcagattactgctccggacaaaatagtggaaacctgtccatccacaaaacattctgcacataagctgttcgatgttaaaccggattttcaagggttgatagatgacaatttgtcatcctccagtcagtcctcaagcatcaagattgagctgatcagatcatcaagcttgccaaatatactgccgtttcagaaaagaagctctgaacctgaacctgaaagtccactgtctcatgtttcacatcccaatgtttcagagccagtttactcaaattcttcaaccttctgcacaagtttgttttcgtcgtcgtcgatggagacggagccgtgccggcaattgggcactctaccattcctgcctcaccctcctaagtgtgagcagcaggtttcagcagggcactcatcaagctcctccctgctagtacctggtggtgatggtgatattggcaatgctcatgatgaacctgaacagtcagatgatctgaaggatttcctcaatctctctggaggagatgcttctgatggcagcttccatggagaaaacaatgccatggcttttgctgagcagatggagttccagttcttgtctgagcagctagggattgccatcactgacaatgaggagagccctcggttagatgacatatacggcacgccgccgcaactttcatcacttccagtatcatcttgctccaaccagagtgtacagaaagcaggatctcctgtgaaagttcagcttagctcgcctcggtcatcttcgggatccgcgacaactaacaaggcgaggttgaggtggacactggagctccatgagcgttttgtagaggctgtgaacaagctagatggacctgaaaaggcaactcctaaaggtgtgctgaaacttatgaaagtagaaggcctgactatctaccatgtaaagagtcatttgcagaagtatcgcctcgcaaaatatctcccagagactaaggaagacaagaaggcatcctcagaggataagaaatctcagtcaggtagcagtggaaatgattcagtcaaaaagaagaacttacaagtggcagaagctctacgaatgcaaatggaggttcagaaacagcttcatgaacagttagaggtgcaaaggcaactgcagctgcgaatcgaagaacacgcaagatacctgcagagaatactggaagagcagcacaaggtcagcatcagcagcaactccctctcactgaaacccccagccgaatcgcaaccggaatcgccaaaaccaacatcagaaaagaaggaggccgaatccgaagcaggcgccgccacttcagctcagccatcatccgaggataaatcaccagacgcagaatgcaagtcgtcgccgccggtttgcactacccaagatactcagagaaggaggcttgaaaaggaaaagcatggcaaaactgtcgataaggaaacacagaaggtgagctgtaattactgtgggaaggtggttaggacatacaaccgtctggagcaccacttagcgggcatcaggggcaatgtttatccttgcagcttagtacctgacagtgtcaggcaaagcataaagagttcactagaggctcgcaagaaagattggatagcccgaaaaataggaaaacataaatcttctgagcttcctccagtaagaaatctatccctcacatctgctcatgcctgccgacctcttttgcagccaattacatccggtacggatcaagaaggctctgttagttggcaccgctgctttgttcacttcacaaataatttggtgcagcccggggaaactacacaagtaaatgcccatgatgtttcttgcaatgcaagttcatctcagaagggaggccagactatagaagtaactaggcctccatatcaaaatccgtgtatgatgaataagccaccggaaatatcttcagggcagagaattgatccattgagtttctctatggagaattcttcatcacagatgcaagattcggaatcctcaaaggagccaactaatgattacttgaattctcaggcaagaaagtcaataggcaagctcatctttgaagctggacttgagcctggtattctccacttgccatctttcaaggacatggttgatgtgcttgcctgggcccaggtggcaatccctacttatgaatcgattatggaggagcaactaagagaaattcaatgccatgcaagggatctcaagaaacactgggaaatgaatggctgcagtgtaattttggatacctgggagagtcgatgtggtaaaagcttcattagtgttttggtgcattgcagtaaaggcatgttgttcatcaaatcaatggatgtctctgatatcattgatgacgtggatgagctagcagtaatgcttttccgtgtggtggaagaggttggtgtcctcaacattgttcaggttatcacaaatgatgagtcaccttatatgcaagcagcagagcatgccgtgctaaagagatatggctactcgttcttcttcacactatgtgctgaccattgcatcaaccttctgcttgagaacatagcagcacttgatcatgtcaatgaggtcctaatcaaggcaagagaaattaccaggttcatttatagccatgcagtgccaatggaactgaaagggaagtatattcagggcggcgagattctgagcagttctaatttaaaatttgtggcaatgttcatcacattagggaagttagtatctgagagaataaatttggtggagatgtttagctcgcctgaatgggcttcctctgatttggcttctagaagttcattcaggcatgtctatgaagtagtaaaaactgataatgcattttggagtgctgctgctgatattttgaagcttacggatccacttatcactgtgttgtacaaactggaagctgataattgcccaataggtatcttgtatgatgctatggattgcgcaaaagaagacataaagtgcaatcttcgagacaaacatggtgattattggcctatggttgatgagatatgggatcattacttgcataccccagtccatgctgccggttatattctgaatccaaggatcttttacacagaaagattcagttatgatactgaaatcaaaagtgggaccaatgcctgtgtaacccgtctggccaaaaaccattatgatcctaagaaagtggccatacaaatggataggtatcgacgcaaatcagctccttttgattcagactcagcaattcagcaaacaatggaaataccacaagttcgttggtggtcggcacatgggactgacacccctgagctgcaaacgtttgcgatcaggatcttgagccaaacatgcttcggtgcttccatatacaacattgaccggagcatatccgagcagctgcatgttgtgaagaggacatatcctgagcaagagaggttcagaacgatggagtatctacactacaatcttcgcctcgcccattgtgagccatgcgtacgcggtgcttctggggctcaacagcatagtaggctcactagtcaactgggtgactggatctcatcagggcagaccacctcctattacaagtga

SEQ ID NO: 21380 - DNA, 6408 bp, Oryza sativa
  Clone ID: TF_OsC206290_1
atggcgccgccgcgggagctggacctctccgacgaggtcgagggcgaggaggacggcaccaccgacttcgtcttccgcctcgccggcgaccccatccccctcctccctaccacctcctcgccgctcccgctcttcgacctccagtcgcctccctcgcgcccgctcgccgtctccaaccgccgggccgcggtcttccttgcccaccccaacgggtttatggctgcgacgaccaaggcgttgatcgaggccagcaaggaggcgcgcgagaagggcaagtcgaccacccgctgcgcacgggactgctgcgtcgcggacatccctctccccggggtctctctcctcgaactctcccgtgatgaatcggtgcttgctgcctgcgcaggcagtgtgatccacttcttctcggcttcttccctgctcacagacaaggatgtggaaccactgtcatcatgtaccttggaaggatccagcactgtgaaagatttcaagtggctaaatcatgcttccaaagcctttattgtactctcgaaagacgggttgctgtctcaaggaagtctgggggaaggtctgaaggacataatggaaaatgttgatgctgttgactgctgcaaggaagggactcacattgttctttcaaaaaagaatacacttaacatattatcatcagattttaaggaaatatgttgcatgcccctcttgttccagctatggtctgatgatagtgattcagatgatgctagcatcaaagtggattcgattgggtgggtgcgcgatgacagtattgttgttggttctgtaagattgaatgaagaaggcaatgaagagggttatcttgtccaagtaataagaagcggcggaaatacattttttgagaattcaagcaagtcagttgttttcacctatgtggattttttccgaggcatcatggatgatgttttaccatctggagttggacctaatctgctgctgggctatttgcatcgctgggatctaatggtgacttccaacaaaaagagcattgatgaacacatttctctcttgaagtggtcatctgcaactgatgacaaaaaaactgtagtatatcttgagatgttggaggataaatatagtcctaggattgacctacaagagaatggtgatgacaatgtcatattggggtttggtgtcgagaatgtgtcattatttcagaagatcacagtaacagttggtcctgaacaaaaggaggttgctcctcaacatattctactttatctgactggtgaagggaaactgaatatatattatcttgccaggatttctgatccttctgaattacctcaaacaaagctatctgctattgaagatagcgatgtgatgaaagaaatttcacctgtaactgtatctggaaaagagtttactccaagtgctaccagctcattggacaagagtattcgcccagatggggctgagctttctagtgtacaaccagatagagacctgcatggatcaacagatatgaaaaacagttctccagtttcaaaagccaaggaaatagtggcttcctcacctgcacctgcctctttcttagcaccagcaagcaacttgaaacctggaatatctttcagcttttctactgctaatagcgtcagtttgagtccagctggaagcaacacatctagtgaattaggttcttcctggcaacaaagcagcagtagcaatttcgtaaataaccaacttggtaaaggaagcataccttccactcagccggtgggagcatttggaggatctcagaactcaaagaaagatggtaaccttagctttaataaatcatcagtgttcacttctgatggatctaccctggttaagcctggagaaaggaatgaacctggttttggaagtcacccgctgcaaagcagctacactaccgataagaaagttcctagttcagttggcttaagttccaagtcatcaccatcaatttctccaataaaaccttcctcagctggaccttcatccactggctttcgcacaggaaatcttgaggcatttcctacctcccgtggatcacctctaccacaggaaagcattgacaaaccacatgacagaacacatgcagtagtggaccattctaaaaatttcaagttaggcgcaatgttcgatactgaacaggacctgtctaaaaaattttacagtattaatgatatgaccaaggagttagatacactcctatcatacatagagaaggatggtggtttcagagatgcttgcataaccttccaggaacggcctctttctatgtttgagggtgatttgcaaaattttctggaactgttgcagatcttcaagaacaagatagcagaacagtgttcaagagttgaagacctgcggaataagatgtttcaaggcacgtctactactcgtgtctctgctaggcaagcttacatgaaaggaatcgtcgaccaatcttcagatacccaatactgggatatatggaaccgtcagaaattgagtccagaattcgaagcgaagaggcagaatattctcaaggctaaccagaatttgacaaaccagctggtagagctggagaggcatttcaataatctggagatgaacaaatttggagaaacaggaagagttgcttctagtcgcagagctatttattctagtaaggcacgatccagtcagacacaaatatccagtgtttacaatgcgcttaattcacaattagcagcagctgaacaactgtcagactgcctctcaaaacaaatatctgcactaaatataagttctccttctacaaagcgagggtcagtggccaaagagttgtttgaatcgattggtctagatcacacgatggatgcagccaaattttcaggtggtactccttccaagtcagttaagagatatccatcaacgagagaacacataactagcatatcagggccttccaagactgctgagcctgagactgcaaggaggaggagagagtcactggataggagcctggctagtttggagcctcagaaaactactgttaaaagaatagcgcaacaacagcgcctcaagatcagcagtgacctgccattcaggtcaaataagaaaatatttgattctcagatggcagctatgtcccaggagaagtccagcagtagccccacttcctccatagtagaatcatatgcaaacaagctgcattatccaagtgaagtgctgcacgagaaaacaaagccgtcaggaccccagcacaacacactgttcaaatgggtaaaggaatcggctggaccatctcaaggccctcagcataagtatcctgaattaccagggcagctgaaaagttctgaccagacaccaaagttgggctcatcttcaccgttgtcattcagttattcacataaggatgtctgggataatatcagctcatccaatgttccatcctctggaacaactcataccatgccaaagtcaagtactttgacatttaaaaccactgtcattccaaaaactaataccagtacactcccagatttgtcgcctttgatgacgggctcaaaattctctctgagtccattgaccgtgaaaactttatctggggattctggaggtgcgtcatccattattacaaagaacaaacaaggtggacaggcaatgccatatttgggaaccacaaaaggactggatgtttctccacagaatatgggtggtgcatttagagatcttaacaaaccgtctttgtctcctgaacctcccaagtctgctctgttacaagggaagactgtgcaacttggtaagattactgaaacagtgcagagcccagtgaaagctaaacctgaggtggcattccaacctcctgcatttccaccaacacctgttgcacaatcttctccatgctctattaagccaactgttccctcttcagctacatcatcctcgtcaactatgcaagaatcagctgcaaaaacatcagatgttttgtctccaacaggtccttccattcttccatcaaaggaatcaatgacaaaaccttcatcaccattacctgatggtaccatatctagttccctactatctattccaatgcctgttaaggagtcatcaactggcttgaataaaattgtatctaagcctgaagtggttacatcagaggtaactggaacaaccgtttctgcaagtactagctcaagcgtaccaatcactgaaggcaaaccttcatcgattccagcaaccagtggaagcttaccttcaattcctgtctctgcacctaaagtggtgccagtgtctgcagaatctgttgttgtcacttccaccggaaaagatgtaggaccgagcaatccctcatcagatgaagatgatatggaagaggaagttccttctgcaagttcggatctcaacttgggagcccttggtgggtttggtcttgggtctgtgccttcttcaagtcccccaaaatccaatccctttgggaactcatttactacctctgacaataagagttcaggttcgtcatttaccctgacaaccagtccaggacagcttttccgtccggcgtcactgagtattccctcatctcagccagcacagtcatctcaatcaactagctcaagtacattttctagtgcattctcaagtgggcttagtggattcggacagtctgcacagattggatcagcgcagcagtcagggtttgggcagccttcacaaattggagctgggcagcaggcaggatttggtcagccagcacaaattcagtcaggatttggccaaccagcacaagttggagttgcgcaacagtcaggatttgggcagcctgcacaaattgggacagcacagcagtcaggatttgggcagcctgcacaatttggtgctcagcaagcacttggatctgtcctgggttcttttggacaatcacgccaattgggaagtttcggtgctgggggatttggtggattcgctagtgcctctgcttccgggggcttttctagcaattctggatttgctggtggtgcaacaggcggtggcttttctgcagctgctgctcctgctggcggaggatttgctgctgctgctactggtggagggtttgctgctcttgcctccaaaggtgggggttttgcggctgcggcttcatctggtggcggctttggaggtgcagcccagggaagtggcttcagcagtgtggcccttatgcatgcaccaaaaattgttcttcgtgcattagctgtagctattgtggaactcccagcacctggtatagataccatatcacaggagcactttgcttatcttagtacaagtgatatccgtacctgggttagccaccaagattcccttaccaacttagatgaaattgtatcgaaccaccctactacaagcagacagacatttcagtgctggcctcgttctgggcagatgatgtatcatcagcaacaggttcagagtgatagccagcacctgtcttcaaggccgggtttgcctccggagaagcaatttctcctgcaaggcggagcagattcatcatcagggcttgtcctctcgaccgacgctaaacctcggttaaaatggacatcagagttgcatgagcgttttgtggaagcagtaaatcagctgggagggccggacaaggcgacgccgaaaacaatcatgaggctcatgggaattcctggattaaccctttaccatcttaagagtcatcttcagaaataccgacttagcaagaatcttcaatctcaagccaatgcttcccgtgcacaaggtgtcttaggttgtagtacgacagagatagataaaccatgtgaaggaaatggatcaccggctagtcacttggacctagagactcagacaaacagcagttctatgcacataaatgaagccctccagatgcaaattgaggtgcagagacggctgcatgaacaactagaggtacaaagacacctgcagcttcggattgaagcccaaggaaagtacctgcagtcagtgctggagaaggcgcaggaggcactcggcaccatcgccgtagcagaaactgctgcaactgcaaacgcctcctcatcgaaacgcctccaaaacgagcacacccagcttcaccatcaccagcagcagcagcaggtcggcgatggatcggtggacagctgcctgaccgcctgcgactgcgagggctcgcatcactcgcgctctcatggccacagaggagagcaggacatcctgtccatcggcttgccgccatttgagccggcagcagcaagatcaggcaaggagcaccactacctgctgttccccaacgagccgagcaggcgacgatcgtgttcggatgaacggcgccgcgagatgagcacgctgcaggcgtcggagctggacctcagcatcaatggcaggtcgtcgtcccactctcacaggcgcgaaaacatcgatctgaatggtgcaggctggagctga

SEQ ID NO: 21381 - DNA, 1254 bp, Oryza sativa; identical to SEQ ID NO: 11811
  Clone ID: TF_OsC359_6631

SEQ ID NO: 21382 - DNA, 1692 bp, Oryza sativa
  Clone ID: TF_OsC14903_1
cggcgggccccgggctgcaggaatcggcacgggtggaagacgaagaggaatatatctgagtagtggagtccaaggaaaggaaccaactgaccttagcttagcttaccttagctcaaccccaagcttgaagcttccactataagaactcacccagccacacggctacttggacgacgaagcagcagcagcagcagtaaacagcatcgctcgctcgtcttcgtcgtcgtcgatcggctccggtgagggtgatcggtcgccggcagaggcttctgatgctggagaggccgccgatcctgaagagataccgcgcaccggggtgggcagtggtggctcgctggaaatgtcgtcgcagcagcagcacgccggtgaggcccccgcctccgccgccgccgctgcccgggcgcggctcaggtggaccgggcagctgcacgagcggttcgtcctcgccgtggcggagctcggcggcgcggacagggcgacgcccaagtccgtgctgagggccatggccgtgccggggctcaccttgtaccacctcaagagccacctccagaagtaccggcaggcggtgagccgcggcggcaatggaggcggcggaggcagcggcagcctgaacgaccggtcatcctcgtcggagcgccaaccagccgaccacgacggcgatagcgccgccgatgagccgcgcaccattgcttacgacggcgacagcgatggcgatgctaaagaaggtctccgtgattcatccaggagcatggtgcagatgcagagggaagtccagaggaagctccaggagcagattgaggtcaagaggcatctgcaactgaggatggaggcacaggggaggtacctgcagtcagtgctacgcagggcgcagcaagtcctggccgaccatagcctggcaagctcgccggaggccgccacggcggagctctcggagctcgcctccgccgtggacatcgagtgcatgtcctcctcctccccgccgcggcaccaccgccaatccgccgcaaccgacagctgcgtgactacgacgtcgtcgtcggaggccgagagcaaggccgccgggtccaagcggctccacaccagcgattgcaccgtcgagcagccggtgcagggcaagagggccttcaacttcctgcaaaggcacaaccaggcagatcaagaagaagaacaagaagaagaatatgcaggagcagaggatggaagctcatcagagattgatctgaacagttagaggcagaggaggaagagaagcagcagaagcatctgtgatgatgtgctgctgtgcattgctgcagtggatgattggtggggtggccttcaaggctggggccaagcaaccaggcttttgagcaatgtctgcctgctactgcaacagctactgctgctgctactcctcattctatgatgatatatgttttgctttaacttatatatatatatatatatatatatatatatagctatgcaagcatctggttcttgtgtttcacgtacctgtaaaaaaaaatggaattcgaattggtggctggcccagctgcagatgcatgtggcatgcttgaggtgcaagaatatatagaactgtagtagtgtggattatgcagctagtgaatgatgctttagggaccaatgggatttccatgaaagatggaattggtttgcagtgtaatttaaagagcaaggttgatttttccc

SEQ ID NO: 21383 - DNA, 2253 bp, Oryza sativa
  Clone ID: TF_OsC147013_1
ctagtggatcccccgggcggccgcccttttttttttttttttttttttttgtcctaaaatgtaaatccagccgcgccacggctgtctgtgccaaaccaggacgaggaagaagaaactgacagtaagctcaggtttatacaagccatcaatgtctctctttctaggtcgagttggcaacccatctcgtcctccagattactactacaatacatatattgacatagatacacaggcctagactagattacatcacaaactaacactgctagctagtacacagcatacaatggggggacatgtacacagatgcagacgagagatctgtcatatgcaagctccaagggagtagaaatcgccgcaccccaggtcgtcgctgaaggtaacatcatccttctccactttgactatggaattgagaaggccgtcgaagctgcagctgctagagctaagttcgctctgaagtttcgggatgctcaaatcggaggcgttcttcggcatcgccatatctcccgaaacgaggaaatctgtcttcatttgtgggataactgttgaaccacttgaggttgcttgcccaatcattctggcaccaatattgctactgttactactgctattgttccatctttggctcatagcatgatgagccccaatgttgcttgccaattgagagctcggtacagaactccatacgaacttgagatcaaacagactgtctgcagtcctatcatcgaacttctgtttcaaaccgtttccacctccaaaattcaagtacttttgctctgtatctggaggtaaaagcatcgcgccaccaaaagagctagctccaccttttgtgtctcttgctaccataaggtcatttgaagagcgagcaggtgcacacgatgaagatgtaccacccaatttgtttgcacaggtattgttaaacgaaccatggattagcaacccgttggcggaaaatcctgataaaggaatagtactctgctgggatacacgagattcaagcagaccagatgaaactccaacggcgccttcaatatgttctgaacttacagaggaagttcgaattgatggctgactgacaattttggcttgtgtgcactcggctagttcttgaggcagcaaaggactgcttgtgacactttggagtgtgccagacataccattagataggccattcccagaaaggatggtggacagatcatcggtttcttcatggatccacttctgttgcatttgggtctgcccaagcgatgttgccaaaccttgtcccaagtttcctttctggtttcctggtaagctaaggtggtacttatttgcatcattaatggaatggctcaatgtatggcttccgctcatagtctgaatcgattttgaagcaggtaccccctgagttccaagagctgctggattgtttctaggacagtacatgctaataaatagaagatagtgaaatgagttccttgcctgtaggtgacttgcaacattttcccttgtgagtttctcaacattcatgagctcaagtatcctttttggcacagccttgtcaattccaagctggttgacagcagcgacaaatttccggtgtagttcaactgaccaaacaactctcggcttctttggagccgagggatcatcaatatcttgagtattgacctcaccctcatcctcctcttcactacagtactccttcctcttcttgctgggcctcccactttgatcaggtgatccacatgtaacatggccatgcacatggtctgaatccgcatttggtggcttgttgcactcttcatagaaatcgagattagcacggtcgcgagtactgaatttcctcctgataacatgctgccagatattcctgagctcttcgattcgaacaggttttaggagatagtcgcaggcaccatgggttatccccttcaatacagttttggtctctccattcacagataacatgatgacagggaggtccatttcaagccccacaagctcaagaagcttaaagccgtccatgtctggcatatggacgtcgctgataactagatcaaacatgtccctgttttcccgcagcattttcagcgcgatagcagcctgatttgttgtcgtcacatgatactggcagcgcagcagcagggtctcgagcaccttgagacacaccgggtcgtcgtcgacggcgaggacacgcataccgacggggaactggtccctcctcctcgccgccggcaccacacccttcctctcctccgccgccctcat

SEQ ID NO: 21384 - DNA, 653 bp, Oryza sativa
  Clone ID: TF_rsicek_6595.y1.abd
cgggctgcaggaattcggcacgagggagagagagagagagagagagagagaggatgttttgagagagcacagctagaagcttggcttctcgcaacaagtgctgcatctctagtgagcgagcgagtgagagagacagccttggccttggcgttggtggtgtagctccagcctccaagcatccatccatgcttacataagtcagacagggagggaggaccggaaggaggaggagagaaagcgaagctttggttctttctttgcaccaccggttgcctccgttgatctccttgtcgatcgccggaagcaaaccgttgttggtgatgggcagcggcggcggtggctgcggcaggaacggcgctgtgaggcagtacatcaggtccaaggtgccgaggctgaggtggaccggggagctccactgcagcttcgtccaagccatcgaattcctcggtggccaagacaaggctacacctaagctcattcttcagctcatgggggtgaaggggctgaccatatctcatgtcaagagccacctccagatgtacagatgctccaggctcgtctcccatggcacgggaaggagatcagagatgcaaccacagctgcaaaggaagcactcatgtggtgctgatgagcaagtccccagagaattcctg

SEQ ID NO: 21385 - DNA, 552 bp, Oryza sativa
  unsure (1)..(552): unsure at all n locations
  Clone ID: TF_LIB3434-018-P1-K1-D7
cgttcttcagctgatgaatgttagagggcttagcataggccatgtcaagagccatctccagatgtataggagcaagaagatcgatgagtccggccaggtgataggtggtgagtcatggagatcagatgatcacctgcttgttggatcaaaaccctattacccaccagcagctgaagctgaagctcctttccgcagatcaagtgctaggtatgtagctagagctaataccagcaaccatccagattttgtccaaggctcttcttcatctccagatgataatatcatgaaccatcaaagaccagttctgaaagagatgatctgcagtgagggtagtaaccatcaagaaggccctcttaatctggatctctcactcgatatctgtccgcggngcgagaagaggaagagagaatgcagctggaggaaacaagaggaagatcatgatcatgctactgttgctattggtgctgatcaagaagcaaagagttgtgctactgggctctctctttcttggtctgatcatgtctnccctgttgaaagatgcaccatcactag

SEQ ID NO: 21386 - DNA, 1931 bp, Oryza sativa
  Clone ID: TF_OsC16131_1
ggattgtcacagttgtatttggtgttactggtgaattttcagcaacagaggactaaacatcagaaagctagcaagttacaacttttcagatagccagattacagtttggcaatccgttgtgaaatatctgcttaatggcaaccacatgcattgcaatgacctaactgcaacagcttgagcttcacctgaacgccgagaggaaaaaagcaacatttttattcacccgtgcatccccgggccgccgctctgtgttctctgttcttctgttcttctcttgtttttttcgtctttttgcgaatcttgtatatatttatgtataatatgtatgtaaatctcagggcgaaaatttggggtctgcccgacactttgcaagcctcatgggtggtagcagctcttcatctacacatccacaacaacccagctcatgatcagttcatcacttgagctctcaacagctcaatcttccctgtatacatggccaacactaccatcctcctcagagtttctgaatccattattggccattttgcatcgatgcgcaagccgaaaatcctccaatctacctctctgtctagcaagattccacgagcacgatctgtcgatcattttcggacatagccttccgacttgtcatcatcctcgcagcagctgtcgccggcggtggccgccgagacggccacccctgagccggagagctgaaggggaccttgaggtgatccggattgagagcagcttacttcctgagaagcccagagatcaccaacaagtacaatcgaatggctcgctgaagctgtgcctggtgatttccggttgtgcagccgatacttctggagatggcttttcacttcgtcgttggtgagcccatcaaccttcatcacctccctgatttgctttggagtagcaacttgggggccaccgagctgctgcaaggcggcgacgaactgccggtgaagctccggcgaccagcaccgcctcgacttcctcgcctgctgctgctgctgctgcgcctgagcctgcaagctaagcgccgccgggacgggtgacggcacggcggtggcaaagcttgacgcgacaacgtgccggtggtcatcgccggcggcggtggcagccgccgccgccgccggaggaggcgacctgtgggaagccggaggcagcaacggcatagcgggtcgtagaaccaccctttcctccctcctaaagtacggcggcggcgcgacggccctcgacgacgactcctccgcgccgccgagcaacctcgacgccggcgaggtgctcccgctccgtcggtcattctcggaatcggcgtcgctgccgcggctgtccacccagagctgcgcggtgctcatccatttcgtcttgtcgccgtcctccgccttcgcctccgcgtcgtcgccgtccttcctcctcttcccggcctcctccttcatcagctcgatcacgtcggcgaggaggcgggcgcagagcgggagctcgcgcctgaacatctcgatcttgcggcgctcctcctcgaggctcctgatgcacgcctccacccccgtcgcctccttggccgccgccgccgccatcctcacggcgctcctcgccgcgaacatcttcaggtccaggctcaaatccagccccatcccgatctcccccacgtccagccccatgtacaacaacaacaacaaacaaaactctctctccctctctctcgaatctttgcaacaagaacaagaacaagaacaagaactggaggaagggtcgcggattggagcggaggaggaggagaaaggcggtggtggtggtgggtgagggggatctggaagctgcgcggcgatatatagacggggaggtgggaatctgcgagctggaccgcaggatttgttcgtctctctctctctcgcgcgcgcgcggaggcgaagcgagaccgcgcctgcagcccggggatccac

SEQ ID NO: 21387 - DNA, 589 bp, Oryza sativa
  Clone ID: TF_OsC53221_1
cccgggctgcaggaattcggcaccacggggagttagagcagctaaaggccatctgactcccaaagaatagaactgcaacgtaccatgaactacccctgattaccagaaacagagggctgataaaacatcaccaggcggttcctcacaggggggttgtgcagtctacaagcaaattgtacataagaggaattgaaagagatgtatcatcatcaacaacagctccaaagccacaaccaactcttgccatctaggcagagtttcccttcagaacggcacttgcttatgcaaggaggaagtgtttcaggggaatcagggcttgttctctcaactgatgcaaagcctaggttaaaatggacccctgagctacatgagcgatttgtggaggcagtaaatcaacttggtggtccagaaaaagctaccccaaaaacaatcatgaggctcatgggcgtccctggattaacactgtatcatctcaagagtcatcttcagaaatacagactaagcaaaaatctccacgctcaagccaatgcgggaaatgtgaaaaatgcgctagtctgcaccacagcaacagagaaaccatctgaagcaa

SEQ ID NO: 21388 - DNA, 903 bp, Oryza sativa; identical to SEQ ID NO: 11765
  Clone ID: TF_OsC98613_1

SEQ ID NO: 21389 - DNA, 3245 bp, Oryza sativa
  Clone ID: TF_OsC8440_1
cacgaggcttgctctagctcagctagctcttgctgctagtagcttcagctttgctactgctactaccactactactactactactttcacctccaagaaagtatagattgcaagaacaatttctgctgctgttgttctttcttgctgttctttctccttgtgtagttgtgtggtgtggttgagctgaggtgtagttaggacagtggctggctttgcttgcttgattggtcacctgggaaggtcgctgtctctgccttttgttttctttgccatctctttctttctgggctgctttcaccttttgctttccaacctcttcttgccatcaataatgatggaggagtaagatgagggcttgttcttgaagtctctccaatctaatctcatttcatcttcatcatctccacccggtccaaatccacctactactgtttttcttttgtcccttctcttttttttcttcctctgatcttttcttttttcaggtgttttgtttttggcagtaggtgcttgctatcttttcattaggctttggattttcctctcgtgttctttagtctcagcctattagaggtttgaggaaagttttccatttcttagctctttttgcttccagcttcttgggattgctctgtttcttgctgagaattggctcgatttgggaggcctcatcttgtgttagctttcaggttttcttgcctgaaattgaaccgattgggtaggtttttaggtgcttcagtttcagttgctagctcgtcaggcttgttcttgggctcctgccttgaattggggtcaaattgggatgcttctgggcccacgcgtgatggaggagaggaggggattgatggggagggagagggatcaattccccgtcggcatgcgggtcctcgccgtcgacgatgacccggtgtgcctcaaggttcttgagaccctcctccggcgctgccaataccatgtaacatcaaccaaccaggctattactgcgttgaagctgctcagggagaacagggacatgtttgatcttgtcatcagtgatgtccacatgcccgacatggacggatttaagctccttgagcttgtggggcttgaaatggatctcccagtcatcatgttatcagtaaatggagagacaaagactgtgatgaaggggataactcatggtgcctgtgactatcttctaaaaccggtccgaatcgaagaactaaggaacatatggcagcatgttgttaggaggaagttcggtaatcgtgagcgaaacaatcttgatttctccaaagaatgcaataagccgcaaagcgcggatactgatcatggaccataccaacctacctgtggttcttctgatcaaaatgggaggtccagcaggaaaaggaaagaactacacggcgaggacgacgatgaaggcgatgataatgattatcaagaaaatgatgagccctcagctgcaaagaagcccagagttgtatggtcagttgagctgcaccgaaaatttgttgccgctgtcaaccagcttggaattgacaaagctgtaccaaaaagaattcttgagcttatgaatgtggagaaactcaccagggaaaatgttgcaagtcatctacagaagtacaggctttacctcaagagactaggtgctgtagcatcacaacaagccagcattgttgctgcctttggaggcagagatccctccttcttgcatattggagcatttgaaggactccagagctatcaaccttttgcaccttctgctgctcttccatctttcaatccacatggcctgctaacccgaactagcgccgccgcggctttcggacttcaggagcttgctgccccctccagcacaattcagacttctacaggaaatgtcacagttggccattgcttggaagaaaaccagcaggcaaatctagcacaaggcttgaccgcggcgatcgggcaacctcagcttcaacagaactggattcatcaagaaggtaatggtctgtctgatgttttttctgggagttctctgaccaacactttgtccagcacactccaaagagttccaagcagttcattgccaccacaagaactcttggagtgcaaacaagccaaagttagcatgccgccatcgatacggataccgccttctagttcagcacttcttgagaggactcttggggtttccaccaatttgggagattctagtatatcccagcagggtgctcttccaatagatggtggattttctgctgacaggttaccattgcacagttcatttgatggcgctgttgcaacaaagctagatactagtttggcagcttcacagagagagattggccagcaggggaaattttcagttagcatgcttgtctccccttctgacaatcttgcattagccaaaaatgccaaaactggagctagttcttctggcagtactataattctccctcttgatactgcaagacattcagactacttgcagttcggaggtgcaagcaattctttgcagaaaatggatggacagaaacaagatcatatacagagctcaaacattatatggagttcaatgccaagcactcaactgccaagtgatacccaaattcataatactcaaaaccaaagattggacagcggaagttttaaccataatattggtgcccatttggctgaccaaacaaatgcaagtgcgtcaatacttccgcaaatgaagtttgacacaagaatatcagaagagaaaatgaagcagaagaatacatatgacttgggtagttcaaagctgcagggtggatttaattctagtggctgcaattttgatggccttctcaattccataatcaaagtggagaaggatgatctcccattcatggacaatgaattgggctgtgacctttttccacttggtgcctgcatatgaatccatcatttcggacaccaaagattttgcataatctaaaagagtcagctgtgctgcctgatctgtgctacttcatccaggctttgtgtatactaggatctagggacagtagtggcttgtaatcttgctttatctcttctctagggttggctatggaagtatggttagatcaagataagaagaaaatataatgctgtaatgtcagcgccttttctagtcaaaatctgtgtttgtttctaaccaagcaaccacatctagtgtttgctgcaccttctcagactgaaaaaatatggaaactcaccatggcatagataaatcaaaagggaagtctttaaccaaaaaaaaaaaaaaa

SEQ ID NO: 21390 - DNA, 701 bp, Oryza sativa
  Clone ID: TF_OsC263764_1
gaactagtggatccccgggctgcaggagagtattggtgctaaccgcaacaagaggcagtcacggaaaagtagagatgagaatggagatgatggtgatgattctggcgggaactcggctcggggtggagactcatcaacacagaagaagccaagggtcgtgtggtctgttgagctgcaccgaaagtttgtggctgctgttaaccagcttggcatcgagaaggctgttccaaagaaaatattggatctcatgaatgtagagaacatcaccagggagaatgttgctagtcatttgcagaagtatcggctgtaccttaaacggttgagcactgatgcaagcaggcaggctaaccttgcagctgcatttggaggaaggaaccctgcttacataaacatgaattcatttggaaactacaacgcatatggtagataccgtacagtcccaactgctggccatacccaggcaaacaacattcttactaggatgaactccccttctgcgtttggtgttcatggtttgctgcattcacagccaattcagttaggacatgcccaaaataatctgagcacttcactgaatgatttaggagggcttaataatggtaacatgatcagaggtgcacagatgtcaacaattctaactggtccttctggtaactcctttccaaacatatcgaatggtgcaccgctggcaactgcgaaca

SEQ ID NO: 21391 - DNA, 538 bp, Oryza sativa
  Clone ID: TF_rsicen_8566.y1.abd
cccgggctgcaggaatcggcacgaggctcgtctcttcctcttcctcttcctcgtcgtcgtcgtcgccgagccgtcgcatggtggacgccgctgcggcctccggggacgcgtgcggccgcgtgacggagtgggagaccggcctgccggctccaggcgagatgacgccggtctcgcaccagctcgtcccgccggcgctcgccgccgccttcgggatcgacctcgcggccgtgggcgtgctcctcccctctccctccgtcgactcccctgtctcccacctcttcttccccgtcgacgaggacgacgacgaggatgaggagggggagggcgaggggggtaacgatgacgcccccgccgccgccgccgcgggcggcggcggcgggaggtgcgggaagaaggcgaggatggtgtggacgcccgagctgcaccaccggttcgtcgaggcggtggcgcacctcggcgagaagggcgccgtgcccaaggccatcgtgcgcctcatgaacgtcgacggcctcacccgcgagaacgtcgccagccacct

SEQ ID NO: 21392 - DNA, 1579 bp, Oryza sativa
  Clone ID: TF_OsC138612_1
caggagtatttagagagacccacgcgtcgggcgagagaggacagtttggataggagaagagaggagagagggtgcttgctgtggaaggagaggactgacaggcttggagcaagcattccatctcagttctcatattaggtgtgaatgaccaagaaatcaacaatctcaaggagccatgagcacacagagtgtcattgctgtaaagcaattcagtggccctgacaaaatcgcacaagcatacactgttccacagccatcagctcatgtgctctccaacgctaactatgactatgatctctgtggttcaacaaatagtacctcattatcatgtgctatccaatcctcaaacattaagaccgaatcaatcagttcatctagcctgccaaagatccttccatttagtactgactcaaatggtgaaagttcactttctcgcatgtcgcaagccgagttttcggacccaattttgtctagttcttctacattttgtacaagtctgtacacctcatcaccgatgaactctggttcatgccgaaaaaccggttatttgcctttcctgccacaacctcctaaatgtgagcagcagcagaattcagctgggcaatcatccagctctctgatgctccttgatgctgatctcagaaatagtggtcatgctgatgatgaacacacagatgacctcaaggactttcttaacctctcttcagattgtagcttccatgggaaatgcagtgccatggcttataatgagcagatggagtttcagttcttgtctgaacagctcggaattgcgatctcaaacaatgaggagagtcctcggttagatgacatatacgacagaccaccgcaacttatgtctcttccagtgtcatcttgctctgatcaggaggatctgcaggatgcaagatctcctgctaaagttcagttgagttcatctcggtcttcatctggaactgcatcatgtaacaaaccaagactgaggtggacaccggagctccacgagcgtttcgtagatgccgtgaacaagcttgaagggccagaaaaggcaactcccaagggtgttctgaagcttatgaaggtagagggcttgaccatctatcatataaagagccacttacagaagtatcggcttgcgaagtatcttccagagacaaaagaagacaagaagcaagaagaaaagaaaacaaaatcagtggctaatggaaatgatcatgcaaaaaagaagagtgctcaaatggcagaagctcttcggatgcaaatggaggtccagaaacaactccatgaacaactagaggtacaaaggcaattacagctgcgcatagaggaacacgcaagatatttgcagaagatattggaagaacaacagaaagcaagagaatccatatcctcaatgactagtacaacagaaggagaatctcctgaattcgcaccgatggagaaaaccgaggacaaagcagaaacctcttcagcacctttgtcaaagtgtagaattacagatactgatgcagaatgccattcaaaagttgataataaaaagacaaagcctcaggctgatcttgaaatggtgcatgacgaataa

SEQ ID NO: 21393 - DNA, 403 bp, Oryza sativa
  Clone ID: TF_LIB3474-012-P1-K1-E2
aagaaacctaagcccatcggaaatctctcctcctcccagcaaagaggaggtggtggagatctcccaatccgcgggaatcactcgctggtcaccgggattcggcctccgctcgagctctgaatctcgggagctcctgatctggaggatgccaaatctcaaacagcaactttgccgccagacagcgcttacggtggactgatgacctccatgatcgttttgtggatgctgtaacacagcttggtggacccgacagggcaactccgaagggaattcttagaataatgggtgttcaagggttgaccatctatcatgtcaaaagccatctgcaaaaatatcggcttgctaaatacattccagatcccacagctgatggtgccaagtctgacaaggaaagatctcggag

SEQ ID NO: 21394 - DNA, 1351 bp, Oryza sativa
  Clone ID: TF_OsC72070_1
atggccgtgtttggagaagctttagcagtaaagcttctttcagagccttacgtgcaaagaagcattgctttgaagtggcaaagaggatgccaaatgtatgaaccaaagcccttctcaagcattgtactagctcacaacgatccagtttcccacaatcaacaaattgaacgtattaacaacaatgtagtatctaatagtggtgggaacagctcaaacagcaactttgccgccagacagcgcttacggtggactgatgacctccatgatcgttttgtggatgctgtaacacagcttggtggacccgacagggcaactccgaagggaattcttagaataatgggtgttcaagggttgaccatctatcatgtcaaaagccatctgcaaaaatatcggcttgctaaatacattccagatcccacagctgatggtgccaagtctgacaagaaagatctcggagatttgcttgctgacattgaaagctcctcgggaatggaaataggggaggctttaaagttgcagatggaggtgcaaaggcagctacagctccggatagaagcccaaggaaggtacctccagaagatcattgaggagcagcagcggctcagtggtgtgctgggtgaatcaggcaagttaggcgccctgggaccagctccaggggagccataccaggattccaacaaaaccgacccctcgaccccggtaccgacttccgaatccccaatccgcgacaaggctggaagcggcttgttcaagaccatttcttcgcacgacgactgccgcgagcctttgacaccggactccagctgccgtgccggctcccctttggagagcccccccagggctagcaagaggatccgggtcagcagcgacattgatcatcgtgggaacaatgagttcccccctcctctcaaagttccggagccaagttcaggttcagatttccgacaggaaagctcagtgttattatcatccagcgcagtgcacttcgattctttggagagcctggatgcagatgaaaatgtcttcaccaatggttcaggcagtgatgattgatttttcatctgtgtaggggcagggcagtgatgtttagaggacttgctagttatctcttcagtagagctgttgatcttagtgaggctgtaatgctgtaaacccagccatgactgttagttgttatctactgttcagtgcatgtttgtagcttatacttattcaatcagagatgtgcagtgtgcacatcactttacagttcatgtaggtctggaaatctcgtaaggtgagaagaacataaagatatgatcttattttcgttgagcatgcaaaaaaaaaactcgagactcctgctctctcc

SEQ ID NO: 21395 - DNA, 607 bp, Oryza sativa
  Clone ID: TF_LIB4309-004-Q1-N1-F10
ggaaagcaaaaaaaagcttcaatctatgcttcaatcggcaggtcccaaggcagggggaaccttttgcccaggggaaaggccccccctcctaaatcattcagggaagggcccaaattatttggggcatgcccaaacggaatggggggggaaggcagcaaaccatgaaccccaaacccaaagggggggtccatcctaaaaaaaaggttgtttgccggggtatggccagcagtggggactggccggaatcaaccataggcgggggagttcccaaaagaattcatgtttatgaaagcagggttccttcctccaaatgcagctgcaagggtaccccgcctgcttgcataagggcccaaccgttaaagggacagccgatccttttgaaaaagacaaaaaacattcccccgggggagggtctctacattcaggaaacccaatattttttttggaacagccttttcgaggccaagcgggtaaacagcagccacaaactttggggggagttaaacaaaccacacaaccctgggtttttttgggggggaggaggccccattctaattacggggctaatgaaaaaaaaaccatcatccccattctcatctctactttt

SEQ ID NO: 21396 - DNA, 1998 bp, Oryza sativa
  Clone ID: TF_OsC25944_1
atggcgaccgccgccgccacgcagtcgcagccggtgcgcgtcgtgctgcgggtgcgcccgcacctcccgtccgaggcgaactccgcggaggcgccgtgcgtcgggcttctcgggagccaccccggcggcgaggtcaccgtccagctcaaggaccagtacaccagccggaacgagtgctataagctggacgctttcttcggccaagagagccgtgtctgcgagatattcgatcaggaggtcagcgccgtgatcccgggaatcttcgaggggaccaacgcgacggtcttcgcctatggcgctaccggcagcggcaagacctacacgatgcagggcactgaggatttgccggggctcatgtttcgaccgtgttggcgctatgtactggcacatggtgctctgttgagatctcatactatgaggtatacatggagcggtgctatgacttgctagagcccaaggcaagagagatcatggtgctggatgacaaagatggcaacttacagctaaagggcttggcctgggtgcctgtgcgatctctggaggaattccacgagatatactctataggagtgcagaggagaaaagttgcccacacaggcctgaacgatgtttcaagtaggagccatgctgtgctatcgatcaggattactactgatgttgttaaagggaagcttaacctcataacctcatcgacttggctggtaatgaggacaaccggagaacttgcaatgaggggatccggctacaagagagcgccaagatcaaccagtcgctgtttgcgttgtctaatgtcatatcggctctcaacaagaaagagccacggataccatacagagagagtaaattgacccgcatactgcaagattctcttggaggcaatagccatgctgtcatgatagcatgccttaatcccgtggaataccaggaggcagtccacacagtaagcttggctgctcgttcgcgccatgttacgaaccacatgagttcagcaagcaagcactaaagataaggttgacatggaagccaaattgcgagcttggttggaatccaaggggaaaacgaagagcatacaaagaatggatggacttctctccccaaatgcaatcaagactcctctatccatgagccaatgagccataagaagcaatcagcatctggcagggtttctggtagagtggtgctcccttcattaactccatgcaaagaggacaaaactggatcatctcttaggaaggcactttcccccatttcttcaaacatggatcctcaaaagcaacggacagctgatgatagcaattgcttgatgttgttggagctgagaactccaatgggatcatgcaacatagtagggaaggtcacaggtgctacaccccttgataaatttattgcacttggctctaacctgaaggaatctcttattcagcaataccttgatttcttaaatgttgcaaacaaggaagaactacagaagttgaaaggcattggtgaaaggagggcagagtacattcttgagcttcgagaagattcgcccagaccatttaaatctctttcagatttgggaaatattggtctatcatcaaaacagatacaagatattttgtgcaagacagcgactggaatcttcaaatgatcaccggaatggaaatgccaccgaactctaccactttgaagatgctggctcatattaacggtcagattgttgtgggctattgacttgtgattatcagccaggtctgccgctgaatcaagttagctccctcctgtattgccgaatttaagcaatctgtagtttgtgtaccatccatgattccttgggtgtaattgtagctgtagtcatctgatgtactactagagtatggagcaatggttgctcctctctgttgtagattttctccgagaaaccgccgtttaatttgagctgacttgcacgagcagcaggaaatgaaatttgtggaatatttcttggtaccttgagcattgaatccgtgaatttctttc

SEQ ID NO: 21397 - DNA, 1389 bp, Oryza sativa
  Clone ID: TF_OsC747_1
ggtggttgccgccttcaattccattcgaacgaaacgaggagaagagagaggagagaggagagagaggggtttgtgtggctgcgagtgggccccatgtcgacgtcggcggcggcggcggcggcggcggagcagcagcaggaggagggggagcacgggccgttccccatcgagcagctgcaggcatctggaattgctgctctggatgtgaaaaagctcaaggattctggtctgtacacagtggagtctgtggcctatactccaaggaaagaccttttgcaaatcaaaggaattagtgaagccaaagttgacaagatagttgaagcagcatcgaagctagtcccattgggatttacaagtgcgagccaacttcatgcacaaaggctggagattattcaagttacaactggatctagagagcttgataagattttggatggggggatagaaactggctctatcacagagatttatggtgaattccgatcagggaagactcagctgtgccacacgctgtgtgtcacatgtcagcttccattggaccaaggtggtggtgaagggaaggctttgtacattgatgcagagggaacattcagaccacaaaggctgctccagatagctgacaggttcgggttgaatggtgctgatgtattagagaacgtggcttatgccagagcttataatactgatcatcaatccagacttctgctggaggcagcttccatgatgatagagactaggtttgctctcatgattgtagacagcgcgacagctttgtacagaactgatttctcaggtcgaggggagctctcagcgaggcaaatgcacatggctaagtttctgaggagccttcagaaattagcagatgagtttggagtggctgtggttatcactaatcaagtagtggcacaagtggatggttctgccatgtttgctgggccgcagatcaaacccatcggtggaaacatcatggctcatgcttccacaacaaggcttgctcttcgcaagggaagaggggaagagcgaatatgtaaagtgataagctctccatgcttggctgaagccgaagcaaggtttcagatagcatctgaaggcgttgcagatgtcaaggattgagacaatctctgctcagtgctaagcgctaactggcaacagcttcccagttcccacatgtgttgctctcctgctgattgcgctaccacccctgaagggttcaactgatgtgatgctcctgttctgaatccgacaaccacttattgtcgagtggaggtgcacatctgtgtcactgttgtagtgttgtagtataaaacgttgtctgccctgcaaggctgcaatgcatgtaatgtgacattggtttacagatattgaatgaattgaagtaagttttctgcc

SEQ ID NO: 21398 - DNA, 1517 bp, Oryza sativa
  Clone ID: TF_OsC748_1
atgtcgtcgtcgggtgcggctgcggcggcggcggcgacggcggaggaggcggcggcgggcggggagcacgggccgttccccatcgagcagctccaggcatctggtatagctgcacttgatgtgaaaaagctcaaagatgctggtctctgcacggtggagtctgtggtctactcaccaaggaaagaccttctgcaaattaaagggattagtgaagccaaagtcgataagataattgaaggagcttcgaagctggttccactgggatttacaagtgccagccaacttcatgcacagagacttgagattatccaagttacaactggatcaagggaacttgataaaatcttggatggtggaatagaaactgggtccattacagagatatatggtgaatttcgctcagggaagactcagttgtgccacactctgtgtgttacatgtcagctcccattggaccaaggtggtggtgagggaaaagctttgtatattgatgcagagggcacattcagaccacaaagactcctccagatagcagacaggtttgggttgaatggtgctgatgtacttgagaatgtagcttatgcaagagcatataatactgatcatcaatcaagacttttactggaagcagcttccatgatggtggagacaaggtttgctattatgattgtagatagtgcaacagccttatacagaacagatttctctggtagaggggagctgtcagcaaggcaaatgcacctggccaagtttcttaggagccttcagaagttagcggatgagtttggcgtggcggtggtaatcacgaatcaagttgtggcgcaagtggatggtgctgcaatgtttgggccacagatcaaacctatcggcgggaacatcatggctcatgcttccacaacaaggctttttcttcgaaagggaagagcggaggagcggatatgtaaggtagtaagctctccctgtcttgctgaagctgaggcgaggtttcagatatcaccggaaggcgtcacagatgttaaggactgaaaatcccaaaaatcgccttcaggatacagcatgagtttgcagtctatctacagcctgctgtttgcaatcccagtgtggtggacgcttggattgatgtaggccatcctgttcaaccaccacctgcgatagcgccctggaatcctggatggaagtacccatggtttcttcattgacattgctcttgtgtttcagcgggggtgtacagcaagtcgccacaattttggcttggcaccagcgatgttgttgttcactgttgatgttagacgagccagaattagtgtagatagttttatttagctggtccttgttttcttaccgtttgtaaatgtagtttaacgcatgctaggatgttctaacgtcacattgtatcggttagcaaaagttgtattcagagtttcaaacagttttcgtttacatatatacgctaacaggtttgaatttgcaaaaaaaaaaaaaaaaaaaactcgagactagttctctccctcgtgccg

SEQ ID NO: 21399 - DNA, 1020 bp, Oryza sativa; identical to SEQ ID NO: 11820
  Clone ID: TF_OsC83381_1

SEQ ID NO: 21400 - DNA, 1164 bp, Oryza sativa
  Clone ID: TF_OsC477_7
ctagggggcgacggcgaggtgggcggtggcggcgacggggatggggatgagaacagcgggggaaggggaggggagcgagtcaagggcggtgagggagaccttgtcggcggcgaggcaatggaggggcgaggtgggagaggaggacgtcggcggccccacacacccgcaaccacccagcacgcgctgcagatgcctggcggtccctcgcgtgccgccgttgcggacgacgacgacgaactctcgcgtcttctctcccgccgcccgccgcatgctctgtgaggtgggccgtgacggcgtcgtcgtcgtcgccggccgcgccgtctccgcccagttcgccacggctggcgcggacccatcctctggcgccgcgaccaccgccatcgccaccatggacgcctccgccggcggcgggggaactccctgccgacgaccggcgccgacggggtgaagcggcgggtgtgctacttctagcgcgcgaccacgacctctgccgcttccacgccgacgacccagcaggaccagatccgggcgctcaagcacttcaacgtcggcgaggactaccccgtcttcgacggcctctacagcttctgccagagctacgccggcggctgcgtcaagctcaaccacagccacgacatcgccatcaacgccctcgagctcgcccgcacggcgacgccgccgcccagctcctcccccggcggctgccgcccgcgccaagctccatcccgccggccgcgcacttctccgcccccgacggccgcgcactgctccgccccccacggtcgctgcccagctcctccccggcagctgccgccggcgccaagttccacccctcgccgccgccggcttcctctgggccctcttcccctcatgcctccctcctgccctccccggcggcggcgcggtatggcggagctcaaggatggcgaggacggcgcggcgtcgtgggcgggcgctgggtggcgcaactcgagaacggcgagggcggcgcggagatggggcgggggtcgttggcggcgaccccgacgcggcggcctgatcacgcgtcgcggctgccatcgctgcctcgtcggccgccgctctcaaccctgtcacgccgctcgtggccgaccccttcaaccagtcaccggcgtcggcatcaccggaggaggagaccgcggccat

SEQ ID NO: 21401 - DNA, 482 bp, Oryza sativa
  unsure (1)..(482): unsure at all n locations
  Clone ID: TF_OsC151927_1
ctccctttttctttcttcccccgctccatttccgaatcgtcgtctcgcctccacttccgacttccgagtcgtctcgcctcgccggcgcaggatggcggcggcgacgaccgccgcggcggcgcgangggtggggctgctgtacgacgagaggatgtgcgcgcacgcgacgcccgacggggaggagcacccggagaaccccgagaggctgcgggccatctggcgcaagtctccgccgacgggttcgcctccaggtgcatgatcatgaaagcgaaggaagctgaggacaagtatatagcttctgtccatagccagaaccatatcaagctgatgaggagtatcagctcaaaagaatatgattcccgtcgaaacaagattgctagaaaatttaattccatttacttcaacaagggctcctcagagtctgcttttcttgcagctggttctgggattgaggtaacttanaagttgctgcaggagaanta

SEQ ID NO: 21402 - DNA, 1582 bp, Oryza sativa
  Clone ID: TF_OsC19780_1
ctgctgcgacccggcgcccggcacgaagcggcaaaggaaacgtcaccgtcgcggcgtcgccgatggagtcgtccgcctcctcctcggccgcggtggcggcggagggggcgccggcgacgggggagcagctggcggtgttctggcacgagggcatggtggcccacgacgccggccgcggcgtgttcgactcgggccgcgacccgggcttcctcgacgtgctcgaccagcacccggagaacgccgaccgcgtccgcaacatggtctccatcctccgccgcggccccatcgcgcgcttcatctcctggcactccggccgccccgcccacgccgccgagctcctctccttccactccgccgaatacatagaggagctcgtgcaagcaaatgccgttggtgccaagaagctgtgtgaaggcactttcttgaaccctggatcctggggtgctgcgcttctggcggctggaacaactttatcagcgatgaagcacatactagatggacatgccaagattgcctatgcgttggtccgcccccctggccatcatgcgcaaccggaccgtgctgatggttactgcttcctgaacaatgctgggcttgcagtgaagctggctctggattcaggacgcagaaagggtgctggtgttgatattgacgtgcactatggaaatggcactgcggagggcttctaccacacagacagcgtgctgacgatctctcttcacatgaagcatggttcatggggtccatcacatccccagagtggctcggtggatgagattggtgaaggcaggggtctgggtacaatctcaatattcctttgcctaatggcagtggggatgcagggtatgagtatgcgatgaatgaattagttgttccagccatagagaagtttcgtcctgagcttttggtttttgttgttggccaagattctagtacgtttgatcccaatggaagacagtgcttaaccatggatggttatcggaaaattgggcaaataatgagaggcatggctgatcaacacagcaatggtcaaatattgatcgtgcaggaagggggttatcacatcagctattcggcatattgtctgcatgcaacactagaaggtgttctgaatctacaagccccgttgcttgatgatccaatcgcctattatccagaggatgagaaatacaccatgaaagttgtggacatcatgaagaaatgctggaaagaatctattccattcttgaaggacatatagaaatccatttcttttagatgcgagtgcccttgaacctcaatttcatatcagtgcaccgtctattcttatggccttttgactgaaagtacatgcattcattggagcaacattcgagtgcttgttcctttcataaacccctgattcacaagttctcaattcacattggtattgtacatacatcatgtcaaactctaccatcttatatttgtggacctcaattgctgcgcctaataagtaacgctgactaacagatgggctgtttgattatgcaatggggcattggggctacagccacctgtattatataagcgcaccagttccaagtctgaaaccaagtgccaa

SEQ ID NO: 21403 - DNA, 1901 bp, Oryza sativa
  Clone ID: TF_OsC79201_1
cacaagaaatcgtcatttcctcgccaggtaacagcatgaaaaaccaggcaacatcgactagtgtttttttttccaccccaaaacaaaccaatccggagagcaccaatgagacaatgaccaacccagggtacaagcgctagctagattcttaacaatcctagggaaacttgatcgggtccagattccccaattggcaggacattcacgaggcctctacataagcccccgtggtcctgaatgatcaacgcactatctttacagtcctgcaaacctactcatcattcctcctacagtcctagtacgctcctactggctgtacaaactaagcgcgtaagtggctaatctgcaaacccacttataagtgaaaataagtggattcgtgggttagccacttacatgcttagtgcaaaactacaaaccataatgcatagggaagcagccttcacaggcctctggtagctgcagtgttgatgtaactagcggccgcatctgcatccaggtgcttcccttccattagtccccttatcagggtggcggagtaggtcttggatggaggacacaatggcagctctccggatctgcatcgctctacgtctgatgacgggcatgtcattgtaagaattggaaggttatcctcctccccaaggtaaagtacattggagtaccagctatccttaataggtgcaaggtggacacccttgtttctggaaacaaactctatttcagacaagccaatcaaaggagagtcaggagactcagtttttccactttcgccgttctccttcactaaacgattctcttgaaacaatacatcattgaactgctcgagcgttattttatacatgcagacataggagttctcagtgtggtttatctcagggttgagaaaagcaacaccaccagttccccagcaaggagtagaggatctaccaaaaaacaatctatgaggcacagtcttccacatggaacctcttggtgggcttgtgtcatgagatccaaaacatggtatattcataccctcagcctttcccccttggatgtagcacagaaaccttggtgtccacatgtttgaaccaaagctggcataccaaacatatacttttgacagttctgatctccaagtagaagatagagatgatattccttcagttgacaccgcagcagatccatcattttgtggttcaactgaatcagttggaccttcaaccattacattacttgaggtggtctttgttgcgattttgtcttcatcaaggttcaactttgagaggctttcacttataataccataagtaatttgaataatattgacagaagcaatagcatcagggagatcttcaactcagcagtcagaaccagaaggatacagcccaatttgtgagggcctactcctcattgatatattgtccggcaatctattactcagaacaggccaggacgtcttcaattcatcacgtaccgcttgtataactctccatgaagattcaaacggttgcatatcaggagtgtcaaatctgaacttgtctcccaacaaaactttagcacaagcactaactgaatttggtatggatctaaggttatagcctcttcaagagccatcagtatcctcccttgggcaaaactaagagctttgtcagtagcagagcatatccattgggagtgatgcagcagccaccaagaggatcacccagtgctgcatcaaacccagcagacaccaagagtatatcagggttaaatgcttcagcaacaggaagtagtacatggtcccatgcagcaatataatgtgcatcaccacattttccatgttcccagggcacgttaactcgtgccgaattcgtgcagcccgggggatccactagttctagagcggccgccaccgcggtggaatggagtggggtaaa

SEQ ID NO: 21404 - DNA, 2296 bp, Oryza sativa
  Clone ID: TF_OsC17811_1
ctcgagccgagcacgaagcgcacgagccgctcttacagtcatcccgtggccgcgccgcgcccctccaaaaatccaatcgcgagaggcgagcgccgccgccgccgggatcgccctccagattgcgttgcatgctctgatggcgtctgatatgaggtcactcaacagccaaaagggacagagttgtggagtttcagaccaagcttgccacagcaaaagcaaaagcggcaatgatggaaaaccatcacatgctaaagcaaatggagtttcctcgttgagcgggagtcataatgatgagaaaattttgaaagagaactctggagcatgcaatttaaattccgaccatgccaatcctttatcagtagatgggaccaaagtttctacagcaaggtcggaacttattgacagttcaggccatgatggttgtctgcatgtcaagaatgaaagctgtatggcttgtgatgatctgcttcaagagtctgacaaagaacagcctgggggtacactggaggatctattttcctttaatgatgaagaggatgatgacagtgactgggaaccctctgctcgccttgctttgagcaggtggttttgcttgaactgtacagtgccaaacatggaggggtttacacattgtcagaattgcgatgagcttaagggatctgtggtagttggatatgatgctttcaaagctcatcttgcacaggcagctttgttatctgctgacgcagcgctgccatcagtatctacagctgtcggttttgatgaaagaatgttgctccatagtgagatagagattaaaccaaatccacatccagaaaggcctgaccgccttcgtgcaatcgctgccagtcttgctgctgcaggtatcttcccttcaaaatgtgtcatggtacctcctcgagaaatcactaaggaagaactcctaagggtccatacttcagatcacattgacagtgttgagcagacaaagaacatgctttacagttacttcacttcagatacctatgcaaatggacactcagcatgtgctgccaaacttgcagcagggatatgtgctgatcttgctaacttgatagtatctgggcgtgttcgcaatggatttgcaatggtgagacctcctggccatcatgcaggggtgaaacaagccatgggtttttgtcttcacaataatgcagcagtggctgcattagctgcacaaagagctggtgccaagaaagtcttaatagttgactgggatgtccaccatggcaatggaacacaggagatatttgatggggacaattctgtcttgtacatatcattacatcggcatgaggatggaagcttctaccctggaactggggcagcaaatgaggtgggagttatggatggccaaggattctcagtcaatataccttggagccgtggtggtgttggagacaatgactacatatttgcttttaagcatgtggtgcttccgatagctgcagaatttgctccagacatcaccatcatatctgcaggatttgatgcagcgaggggtgaccctctgggttgttgtgatgtcacacctgctggatattctaggatggcgtccatgctaactgcttgttcacagggaaaattgttggttatacttgagggaggatacaatcttcggtctatatcctcatcagctactgaagttgttaaggtcctacttggggatagtcctgtttatgatacagatgcaactgaaccatcagaggagggcatacagactgtcttacaagtcctgagtatccagcagcaattttggccagttttagttccatcctttgcatcagttctggcactgcagcggtcggttttttccagatataccactgaagtaaacaagatgaaaaggaagcatgcaggaggggcaggacccttctggtggaaatgggggagtaaaaggctactgtacgaagtgctatttgagggccgctgtctgaggaaaaccaaggatacaggcaaagaaaaattgaatgatgaagcagagccctaaatgtgttgctgctgaagcctgactgctgatctcatcaacatccatagtgtagtgggctgactggggttccctgaatgtagcttgcatataccgagccaaattttgactggagaattaagatggtagttcgtgtttttaggtgaaatttgtgaacaaccttgttgacatgtattggatgttcagttgtattagaaatagagtcaagtttaccatcctgtcgtctgtcgaatgatcaccacgtgcagttcaccgcttcaaaaaaaacctgcagcccggggatccactagt

SEQ ID NO: 21405 - DNA, 300 bp, Oryza sativa
  Clone ID: TF_13447556
caggatagcctacttctacgatggcgatgtgggcaatgtctactttgggccaaatcacccgatgaaaccacatcgactttgtatgacacatcatcttgtgctttcatatgatcttcacaagaagatggagatatataggccccacaaagcatatccaacagagctcgcacagttccattctgctgattatgtggaattcttgcatcggataactcctgacacccaacacctgtatgaaaatgaattacgtagatacaatcttggagaagactgcccagtctttgataatctgtttgagtt

SEQ ID NO: 21406 - DNA, 1190 bp, Oryza sativa
  Clone ID: TF_OsC8271_1
aaaaaaaaagaaaagagaagaagaaatcctccgaaatggcggcgtccggcgagggggcgtcgctggcgtcggcggcgggaggggaggacgggcggcggcggcgggtgagctacttctacgagccgtcgatcggggactactactacgggcaggggcacccgatgaagccccatcgcatccgcatggcgcactcgctggtggtccactacggcctccaccgcctcctcgagctctcccgcccctacccggcctccgacgccgacatccgccgcttccactccgacgactacgtcgccttcctcgcctccgccaccgggaaccccgccctgctcgacgcccgcgccgtcaagcgcttcaacgtcggcgaggactgcccggtcttcgacggcctcttccccttctgccaggcctccgcggggggcagcatcggcgccgccgtcaagctcaaccgcggcgacgccgacatcaccgtcaactgggcggggggcctccaccacgccaagaagggcgaggcctccggcttctgctacgtcaacgacatcgtcctcgccatcctcgagctcctcaagttccacaggcgtgtgctatatgtagacattgatgtccaccatggagatggcgtggaggaagctttcttcactacgaatcgagtcatgacttgttcctttcacaagtatggggactttttccctggtactgggcatatcactgatgttggagcaggcgaaggaaaacattatgctttaaatgtgcccctgagtgatggcattgatgatgatacctttcgtgatctgttccagtgcatcatcaaaaagactgcagttgctgttggagttgaacctgataacaagttaccttataatgactactatgagtactttggtcctgattataatctccatattcaacccagaagtgtggagaacctgaattcgactaaagacctggagaacataaagagcatgatattggatcatctctcaaaaattgagcatgttccgagcactcagttccatgacagaccatcagatcctgaagctccagagcaggaagaggaggacatggacaagagaccacctcagcgcagtaggttatggagtggaggagcttatgaatctgatacagaggatcctgacaacatgaaaactgagaccaatgacttatctgccagctctgtcatgaaggtttga

SEQ ID NO: 21407 - DNA, 1973 bp, Oryza sativa
  Clone ID: TF_OsC477_3
gttggaaaagaaaaaaaaaagagataaaaaaaaatctcctcctcctcctcctcgccgccgccgccatggacgcctccgccggaggcggggggaactcgctgccgacggtgggggccgacggggccaagcggcgggtgtgctacttctacgacgcggaggtggggaactactactacgggcaggggcacccgatgaagccccaccgcatccggatgacccacgcgctgctcgcccactacggcctcctcgaccagatgcaggtgctcaagccccacccggcgcgcgaccgcgacctctgccgcttccacgccgacgactacgtcgccttcctccgctccgtcacgccggagacccagcaggaccagatccgggcgctcaagcgcttcaacgtcggcgaggactgccccgtcttcgacggcctctacagcttctgccagacctacgccgggggatccgtcggcggcgccgtcaagctcaaccacggccacgacatcgccatcaactgggccggcggcctccaccacgccaagaagtgcgaggcctcgggattctgctacgtcaacgacatcgtcctcgccatcctcgagctcctcaaataccaccagcgtgttctctatgtggatatcgatatccaccatggggatggtgtggaggaggcgttctacacgacggacagggtgatgacggtctcgttccacaagtttggggattatttcccggggaccggggacattcgcgatattgggcactcaaaggggaagtattactctctgaatgtcccgttggacgacggtatcgacgacgagagctaccagtcgttgttcaagccgatcatggggaaggtgatggaggtttttcgccctggcgcggtggtgctccagtgcggtgcggactctctgtcgggtgataggttgggttgcttcaacctgtcaatcaggggccacgcggaatgcgtgagattcatgaggtccttcaatgtcccgctgttgctgcttggtggtggtgggtataccataagaaatgttgcgcggtgttggtgctatgagacaggagttgcacttggtcatgagctcactgacaagatgcctccaaatgagtattttgagtactttggtccagattatacacttcatgttgcaccaagtaacatggagaacaaaaacacacgccagcagttggatgatataagatcaagacttcttgataatctttcaaaacttcgacatgctcctagcgtccaatttcaagagcgaccccctgaggctgagctacctgagcaagatgaagaccaagaggatcctgatgaaaggcaccatgctgattctgatgtggaaatggatgatgtcaaacctttggatgactcaggaaggaggagcagtattcagaatgtgagagttaagagagagtctgctgaaacagatgccgcagatcaggatggtaatagggtcgctgcagagaacaccaagggcacagaacctgcggctgatggagttgcacgacggcaacgacggggcaacgacggttcgacggatttgatggtcgtcctcgtccaccaccaagcctactggtccaatctacccaacgaggatgccatggtgttgcaagatggatctacaaacacgaagcatgtcaaaaccgatctaatcggatgcataggagacggctgcagccacgccgatgtcttcctgccgtcctgcgtcgtgctgatggacaccaacgccgcccgcgactgcgacctccgcctcctccgctccgacgactacgtcgcctccctccccgccgtcctcccggagttgtggatctgttccctctgccgcttcaacgtcgacgaggattgcccgattttccatggcttctacatctactgccagacctgcgcaggggactgtgcccgcgccatcatcgatcgctaccatggcgcacaaaacgtcgtcatcaacaaggctttggatggcaacatggccgacaaatga

SEQ ID NO: 21408 - DNA, 2125 bp, Oryza sativa
  Clone ID: TF_OsC477_4
ggggaaaagaaaaaaaaaagagataaaaaaaaaatctcctcctcctcgccgccgccgccgccgccgccatggacgcctccgccggaggcggggggaactcgctgccgacggcgggggccgacggggccaagcggcgggtgtgctacttctacgacgcggaggtggggaactactactacgggcaggggcacccgatgaagccgcaccgcatccggatgacccacgcgctgctcgcccactacggcctcctcgaccagatgcaggtgctcaagccccacccggcgcgcgaccgcgacctctgccgcttccacgccgacgactacgtcgccttcctccgctccgtcacgccggagacccagcaggaccagatccgggcgctcaagcgcttcaacgtcggcgaggactgccccgtcttcgacggcctctacagcttctgccagacctacgccgggggatccgtcggcggcgccgtcaagctcaaccacggccacgacatcgccatcaactgggccggcggcctccaccacgccaagaagtgcgaggcctcgggattctgctacgtcaacgacatcgtcctcgccatcctcgagctcctcaaataccaccagcgtgttctctatgtggatatcgatatccaccatggggatggtgtggaggaggcgttctacacgacggacagggtgatgacggtctcgttccacaagtttggggattatttcccggggaccggggacattcgcgatattgggcactcaaaggggaagtattactctctgaatgtcccgttggacgacggtatcgacgacgagagctaccagtcgttgttcaagccgatcatggggaaggtgatggaggtttttcgccctggcgcggtggtgctccagtgcggtgcggactctctgtcgggtgataggttgggttgcttcaacctgtcaatcaggggccacgcggaatgcgtgagattcatgaggtccttcaatgtcccgctgttgctgcttggtggtggtgggtataccataagaaatgttgcgcggtgttggtgctatgagacaggagttgcacttggtcatgagctcactgacaagatgcctccaaatgagtattttgagtactttggtccagattatacacttcatgttgcaccaagtaacatggagaacaaaaacacacgccagcagttggatgatataagatcaagacttcttgataatctttcaaaacttcgacatgctcctagcgtccaatttcaagagcgaccccctgaggctgagctacctgagcaagatgaagaccaagaggatcctgatgaaaggcaccatgctgattctgatgtggaaatggatgatgtcaaacctttggatgactcaggaaggaggagcagtattcagaatgtgagagttaagagagagtctgctgaaacagatgccgcagatcagttgttatggtcaacgtgtgctgcaaggtgggatggtaatagggtcgctgcagagaacaccaagggcacagaacctgcggctgatggagttggttcctcgaaacaaactgttcctaccgatgcaagtgcgatggccatagacgaaccaggctccctgaaagtcgagccagataactcaaacaaattgcaagatcaaccatcggtgcaccagaagacataatagttctctctaccttaaaacttagtaactgatgccatctatcatccattgattatattggagaaactcccaactttgaagcagagagttcatgccataccaaaagttatataccaaatttcgaatggtatgtacacctttcgaactggtggtgttttgtgcaatacatttatgccaggctgactattatgtggtatctattattagctttagtttaaccctgtctgctgtcgagcaatcggtatagtcgtgcaatatattctggatctatcaagcaatgtgagacggatgtcaaaccattggttgtgacttcagcaatgtatgtatatgtaagtatagggacaggcagcaggcgttactttggtggaagctacaagctttgtctctcttctcatccctaatacctacgtggggtgcgtctcgttgttgtttaggtattactgcattcttaaaagtgctcatttagggtg

SEQ ID NO: 21409 - DNA, 1866 bp, Oryza sativa
  Clone ID: TF_OsC477_2
atggacccctcgtcggcgggcgccggcggcaactcgctggcgtcggcgtcgtgcggcgacgcgcagaagcggcgggtgtgctacttctacgacccggaggtgggcaactactactacgggcagggccacccgatgaagccccaccgcgtgaggatgacccacgcgctgctcgcccactacggcctcctcgccccggccaagatgcaggtgctccgcccgctccccgcccgcggccgcgacctctgccgcttccactccgacgactacgtcgccttcctccgcgccgtcaccccggagacccagctcggccaggtccgcgccctccgccgcttcaacgtcggcccggactgccccgtcttcgacggcctctacgcctactgccagacctacgcgggggcctccgtcggcgccgccgtcaagctcaaccacggcacccacgacatcgccatcaactggtccggcgggttgcaccacgccaagaagtccgaggcctccggcttctgctacgtcaacgacatcgtcctcgccatcctcgagctcctcaagctccatgagcgagttctgtatattgatattgatatccatcatggagatggagttgaggaggcattctacacaacaaacagggttatgacagtctcatttcacaagtttggggattatttcccgggaacaggggacatccgcgatattgggtattcagaagggaagtattactgcctgaatgtcccgctggatgatggaattgatgatgacagctaccagtccatcttcaagccgatcatcagcaaagtcatggagatgtatcgtcctggtgcagtcgtgcttcagtgcggcgctgattcgttgtccggtgataggttgggctgtttcaatctctcaggcaaaggtcatgctgaatgtgttaagttcatgaggtctttcaatgttccgttgcttcttcttggtggtggtggatataccataagaaatgttgcacgctgctggtgttacgagacaggagttgcacttggtgaagagctacgggagaagttgccttataacgagtattatgaatattttggtccagaatacagtctttacgttgcagcaagtaacatggagaacagaaatacaaacaagcaattggaggaaataaaatgcaacattctggacaatctctcaaaacttcaacatgctcctagtgtccaatttgaagagcgaattcctgaaacaaagctacctgagccagatgaagatcaagatgatccagatgaaaggcacgaccctgactctgatatgctgttggatgatcacaaacctatgggacactcagcaagaagccttattcacaacatcggagttaagagagaaattactgaaacagagaccaaagatcagcatggtaagagattaacaactgaacataaagtaccagaaccgatggcagacgatcttggttcctccaagcaagttcctgccaccagctcttatgccacggattcctgcatgctattagttacttactccgaggtgttgtatgactgtttcttctgtaggagtttacaaattacaactgtttcttttgttgaagaattccaaagtgtccaggcaatactggacgtggagacattagtctgatcaatgtactgcagagtacagaacatgtaacatgacccaagttacagtgtatagtcttttagactgttagatggaactttcagtcgaaatgcctgtgcctacttgtgtgtgctctctgttggttgtttttcgttaaaatattttgttccggtttatcatgtacttcctacgtttttatgtatgagttgttttaaagagacaaataaatctattttttaatttataatagttaatacttaattaatt

SEQ ID NO: 21410 - DNA, 1483 bp, Oryza sativa
  Clone ID: TF_OsC56939_1
cgttgccgactcggacagagactcatgtctcccttttgtatatccatgtgagatttctgcaccattgctgcattctgttcgatctcgatcttccaagaaggaacttggagcgatggccaccggcgggaactcgctgccgtcgccgtcgtgcgccgacgacaagaagcggcgggtgtgctactactacgaccccggcatcgcccacatcaaattcagcgacgaccatgtcatggtgcccgcccgcgtcgccatggcgcacagcctcgtcggcgtctacggcatgctcggcgacatgcgccgcctccgcacgagacccgccacggaggcggagatccgccgcttccactcgccggagtacgtcgacctcctccgcgacctcaccccggagagctacttcaacgacgccgcgcttcggcagaaggcggaggatgaccacggcatcggcggcgacgacgattgccccgccttcgaccgcctctggaagtactgccgcggctaccccggcgggtcgttcgccgcggcgcgcgcgcttgtcgacggcgcctccgacatcgccatcaactggtccggcggcatgcaccacgcgtccgcctgcaaggccaccggcttctgctacgtcaacgacatcgtgctcgccatcaacgagctcctcggcaccttcaggcgagtcatctacgtcgacatcgacgcgcaccacggcgacggcgtgcagaacgccttcttggactccaaccgggtcatgacgctgtcgttccaccggtacggcaaaatcacgccccacaaggacttcttcccgggctccggcgccatcaacgaaatcggcgacggcgccggcgagcactacagcgtgaacgtgcccctggacgccggcgtccgcgacgacgtgtaccacacgctgttcaagccgatcgtgggcaaggccatggaggtgttccagccggaggccatcgtgctgcagtgcggcgccgactcgctctccggcgaccgcctcggcggcatggagctgtcggtgcggggccacgcggagtgcgtcagcttcctccgcgggttcaacctgccgctgctcctcgtcggcggcggcggctacaccatcaaccacgtcgcctccgcgtggtgctacgagacggcggtcgccgtcggcaaggagaggaagctccccgacgacatagagatacccagccacggctacgagctcatgtacaagaaccaggggaacaagctccattacaagacgtcgacagcgacggcggcgagaaaaaggtcgagcagcacggaggtcaccaaggggaaggtgctcgagcacctgtcgcaggtcaagcgcgcgccgagcgtgcagttccaggagcgacgcggcggcgacaatgccgccggagttgggctctactacgagcgccctccgagcctggaagacgacgaacccgcgcagaggctgcaccgcctctgcttccctggcctgacgaagcgtatcaggctcaatgactga

SEQ ID NO: 21411 - DNA, 1579 bp, Oryza sativa
  Clone ID: TF_12698879
ggcacgagggccatggacgcctccgccggaggcggggggaactcgctgccgacggcgggggccgacggggccaagcggcgggtgtgccacttctacgacgcggaggtggggaactactactgcgggcaggggcacccgatgaagccccaccgcatccggatgacccacgcgctgctcgcccactacggcctcctcgaccagatgcaggtgctcaagccccacccggcgcgcgaccgcgacctctgccgcttccacgccgacgactacgtcgccttcctccgctccgtcacgccggagacccagcaggaccagatccgggcgctcaagcgcttcaacgtcggcgaggactgccccgtcttcgacggcctctacagcttctgccagacctacgccgggggatccgtcggcggcgccgtcaagctcaaccacggccacgacatcgccatcaactgggccggcggcctccaccacgccaagaagtgcgaggcctccggcttctgctacgtcaacgacatcgtcctcgccatcctcgagctcctcaaataccaccagcgtgttctctatgtggacatcgatatccaccatggggatggtgtggaggaggcgttttacacgacggacagggtgatgacggtctcgttccacaagtttggggattatttcccgggaacaggggatatccgtgacattgggtattcagaggggaagtattactgcctgaatgtcccgctggatgatgggattgatgatgacagctaccagtccatcttcaagccgatcatcagcaaagtcatggagatgtatcgtcctggtgcagtcgtgcttcagtgcggcgctgattcgttgtccggcgataggttgggctgtttcaatctctcagggaaaggtcatgcagaatgtgtaaagttcatgaggtctttcaatgttccgttgcttcttcttggtggtggtggatatgccataagaaatgttgcacgctgttggtgctatgagacaggagttgcacttggtcatgagctcaccgacaagatgcctccaaatgagtattttgagtattttggtccagaatacagtcttttcgttgcagcaagtaacatggagaacagaaataccaacaagcaattggaggaaataaaatgcaacattctggacaatctttcaaaacttcaacatgctcctagtgtccaatttgaagagcgaattcctgaaacaaagttacctgagccagatgaagatcaagaggatccagatgaaaggcacgaccctgactctgatatggtattggatgatcacaaacctatgggacactcagcaagaagccttattcgcaacatcgaagttaagagagaaatcactgaatcagaggccaaagatcagcatggtaagagattgacaactgaacataaaggaccagaaccgatggcagacgatcctggttcctccaagcaagctcctgtaagtcgtcgtcttctctatccatctgcaaatccatagcaaaagctctgcattgcccaatgcctatatggatatcgaattatagaacaccatggttaatctgctctaaaaaaaaaaaaaaaaa

SEQ ID NO: 21412 - DNA, 828 bp, Oryza sativa
  Clone ID: TF_OsC82111_2
atccaaattatagaagtttatttctttttaaggacgttgagagtaggtccaacctgataaccacatacgccgggtttaaacaaaaaaagataggaaaaatgtgtgcagccaaaaactatgaatcattaccaccgactaagaatttgcaatctctgcatgcaactagcatatgtaactgattaaaaagtaggaacgtacacgcactatatgcaggcaaaggtgttagatcctaacaagtcaattgacagtatttcccacctaacgctgttaaaccgcgcaacagcaccagactttctctatccaggttcatcatacaaagaacctttttcaacgggccccgtcctcatgatcattgtcgttgtcaccttcatagtactcgtcatcgcgatgaatctgcttgtcttgggtatgctgatctacacgttcatcaggatccagctcatcttcatcaatatctgggatataaaaatctggtggaacctcttgcatctgaacaccaggcgcatgttgtatggcccgcaaactctccatgacttgcactttgattgaacttagatatgacttgctattcaagttgtccatgttcacattcgatactttcaatgtataatctggagcaaagtatttgatgtattcattgtctggaatttcatttgggagctccgtatctagaagaacaccagtttcaacagcccaacagcgtgctacattctcttttgtgtatccaccacccccagtcaccagtagagggatattgaatttcttgacaaacttcacacattcagcatggccatcgtagaagtaggctatcctgtctttctccagcat

SEQ ID NO: 21413 - DNA, 1584 bp, Oryza sativa
  Clone ID: TF_OsC90813_1
gggaaaaaaatgtcagcttttgtattataaaacaaaatgctgatagctcgacaggttccactggacactaactggagtagaaagatgcaagtaatcgcagtagtactggtattaatctacacaactggtattgaactattgacaagcttgcgatcgaatgtatctgattcacagcaactaagatgtaaatgactatgccgtgcttttccgatgtacaatgctacactggaaagtgcaaaagctaacaagacatgaatatgatcttgagttgttgaccagcatcagcaagcagtttcagcagccaagtatagatactgttgcaatcttctgggcgccgcgcttagagcgagtggaggtgcttggccttgtcgatggcctccctgatcttccgcgtgggctcctcgtagagcatcgccgggtcgtcgaaccgcgcggcgaggctgggctcgccgaggaacgcacggaaggtgtcggccactgagctggacagcgactccaggttgtagccgccctccaggaagaagacgcaccgcccgccgcacagctccgccgccacctcccggatcctcgccgccagcatgtagaacgtccccgtcgtgaactgcagccccgccagcgggtccagcgcgtgcgcgtcgtacccggctgaaacgaggatgatgtcaggtttgaaccgctgggcagctggggcaataacctcatcaaacgcgcacctcatcgcgtaatcgcctgagccaccgggtagtggcaggttgagcgtcgtgccctcgccgttgccctggccaacttggtggatcttaccggtgccaggatagcttccaagctgatgagttgagaggaagaatatgtccggatcctcataaaaggcgtcacatgtgccgttaccgtggtgaacatcaaaatctattatcatgacccgctttaaaccatgttgattctgagcataccgagctgccactgcaatgttcccaaagacacagaagcccatgggaccttcaggaacagcatgatgtcctggtggccttactaaggcaaagccgagcggtggcttcgggcccaactttgatgctgcaaccactgaatcaaccaatgtaattccagcaccagcagaaaggagacattcttggaaagtcttccaacgagaaaagcattgggggaataaaaacaagagggaatgtgcatagatcattacagtctgggtagcatatgtaggtccagttccttcaatgaatatcaaaccttcatctgaagccctactcatagccttttcaagtccagttatgtatgatcttgaatgaactagtgcaatatcatcaagtgaagcaggttggaaatcttgaatttcaagaacctgtgaaccacgatgcttcgaagtaagctccagtttttcgagagcatcaactattgcaggaactcttttgttagtttctggatgcgcttccttgttatgacccatggcaggagatgtacaatagagaatatgagcatcccgcagcaaattgtcaggcaaagctaagtcttttcgaacaccatttgtgtctgaaatagaagttccattatcgcctgcagcccggggatccacta

SEQ ID NO: 21414 - DNA, 787 bp, Oryza sativa
  Clone ID: TF_OsC477_17
cccacgcgtccggttgggctgtttcaatctctcagggaaaggtcatgctgaatgtgttaagttcatgaggtctttcaatgttccgttgcttcttcttggtggtggtggatataccataagaaatgttgcacgctgctggtgttacgagacaggagttgcacttggtgaagagctacaggagaagttgccttacaatgagtattatgaatattttggtccagaatacagtctttacgttgcagcaagtaacatggagaacagaaatacaaacaagcccacccggcgcgcgaccgcgacctctgccgcttccacgccgacgactacgtcgccttcctccgctccgtcacgccggagacccagcaggaccagatccgggcgctcaagcgcttcaacgtcggcgaggactgccccgtcttcgacggcctctacagcttctgccagacctacgccgggggatccgtcggcggcgccgtcaagctcaaccacggccatgacatcgccatcaactgggccggcggcctccaccacgccaagaagtgcgaggcctccggcttctgctacgtcaacgacatcgtcctcgccatcctcgagctcctcaaataccaccagcgtgttctctatgtggatatcgatatccaccatggggatggtgtggaggaggcgttctacacgacggacagggtgatgacggtctcgttccacaagtttggggattattttccggggaccggggacattcgcgatattgggcactcaaaggggaagtattactctctgaatgtcccgt

SEQ ID NO: 21415 - DNA, 617 bp, Oryza sativa
  Clone ID: TF_LIB4309-015-Q1-K1-H3
gcgttcgccgacgacggctcaagcctatcttcgtcgccggcttctccgatggttaccaatcgcgtagacgtcttctggcacgaaggaatgctccgacacgacgccgtagaaggcgtcttcgacactggatacgaccctggattcctcgacgtattggagaagcacccggagaacgccgatcgcgtcaggaacatgctttcgattctccgacgcggtcccatcgctcctcatgtcaattggtttaccggtcttccagcaatcgtttcggagcttctaatgtttcacacttcagagtacattgagaagctagtggaggcagataaatcaggagaaaggtgtgaaattgccgcaggtactttcatgagcccaggctcgtgggaagctgctcttcttgcagctggaacaactctttcagcaatgcaacatattcttgattgccatgggaaaattgcatatgctctggtacgcccaccaggtcaccactcacagcctactcaggctgatgggtattgcttcctcaacaacgctgctcttgctgtcaagctggcattgaattcgggttcttgttcccgagttgcggttattgacatcgatgtacattatggaaatggcacagc

SEQ ID NO: 21416 - DNA, 1238 bp, Oryza sativa
  Clone ID: TF_OsC136700_1
cccacgcgtccgcccacgcgtccgaccgaattctcccgagctccggcgacgtggtcgcgcattcctcttctcgccggcagactcgccgccgtcctccgccgcccctctcgcggcgcagcgattcgtctccctcctccgcaaccgcgcccgagctcccccctcctccccgcatccggtggatggcctcttccgcgccgtccgcggcggcgggggcgaccccgccggaccccctccgccgcgaccgcatcctctccagcaagctctacctcgacgtcccgggctccaaggctccggtggtgtactcgccggcgtacgacatcgccttcctcgggatcgagaagctgcacccgttcgattcctccaaatggggccgcatatgcaagttcctcaccaaggaagggcacctggagaagaaccgagtggtggagccattggaagcgaccaaggacgatttgctggtggtgcactcggagtcgtacttgaacagcctcaagagcagcctgaaggttgcgtccattgtagagcttcctcctgtggcattcattcctaattggcttgtgcagcaaaagctactgtaccctttcaggaaacaggtgggtgggtcgattctatcggccaagcttgcacttgagagaggatgggccattaatgttggcggagggtttcaccattgttcggcagagcaagggggcgggttttgtgcatatgctgatatttctctctgcattcagtttgcttttgtccgtctaaatatttcaagagtgatgatcatagatctggatgcccaccaaggaaatggccatgaaaaggatttcgctaatgatggaagagtttacactttggatatgtacaatgctggaatatatccctatgatcatgttgctaagcggtatattgatcaaaaagtcgagctagttagtgggacaaagacagaagactacttggatcaacttgacaaggctcttaaggttgcagaaagtagatttcagcctcagttgattgtttacaatgctgggacagatatcctggatggcgatccattgggaagattgaagataagccctcagggcgtggtgatcagagatgagaaggtgttcaggtttgcaaaggatcaaagcatcccactactcatgttaacatcaggaggatacatgaagtcgagcgcccgagtgatcgccgactcgataatcaatctctcgaataaaaacttgatagagcttggtagccagcttggctga

SEQ ID NO: 21417 - DNA, 486 bp, Oryza sativa
  unsure (1)..(486): unsure at all n locations
  Clone ID: TF_LIB3432-035-P2-K1-D11
gttcacaggttcttgaaattcaagatttccaacctgcttcacttgatgatattgcactagttcattcaagatcatacataactggacttgaaaaggctatgagtagggcttcagatgaaggtttgatattcattgaaggaactggacctacatatgctacccagactactttccaagaatgtctcctttctgctggtgctggaattacattggttgattcagtggttgcagcatcaaagttgggcccgaagccaccgctcggctttgccttagtaaggccaccaggacatcatgctgttcctgaaggtcccatgggcttctgtgtctttgggaacaatgcagtggcagctcggtatgctcagaatcaacatggtttaaagcgggtcatgataatagattttgatgttcaccacggtaacggcacatgtgacgccttttatgaggatccggacatattcttnctctcaactcatcaacttggaagct

SEQ ID NO: 21418 - DNA, 1413 bp, Oryza sativa
  Clone ID: TF_OsC82111_1
ttttttttttttttttttttttttatccaaattatagaagtttatttctttttaaggacgttgagagtaggtccaacctggtggccccccgcgccgcgggttttctttttttgtttggttttttgtgtgcagccaaaaactatgaatcattaccaccgactaagaatttgcaatctctgcatgcaactagcatatgtaactgattaaaaagtaggaacgtacacgcactatatgcaggcaaaggtgttagatcctaacaagtcaattgacagtatttcccacctaacgctgttaaaccgcgcaacagcaccagactttctctatccagtttcatcatacaaagaacctttttcaacgggccccgtcctcatgatcattgtcgttgtcaccttcatagtactcgtcatcgcgatgaatctgcttgtcttgggtatgctgatctacacgttcatcaggatccagctcatcttcatcaatatctgggatataaaaatctggtggaacctcttgcatctgaacaccaggcgcatgttgtatggcccgcaaactctccatgacttgcactttgattgaacttagatatgacttgctattcaagttgtccatgttcacattcgatactttcaatgtataatctggagcaaagtatttgatgtattcattgtctggaatttcatttgggagctccgtatctagaagaacaccagtttcaacagcccaacagcgtgctacattctcttttgtgtatccaccacccccagtcaccagtagagggatattgaatttcttgacaaacttcacacattcagcatggccttcaatggacagattgaagcaccccagacggtcccgtgccaaggaatcagccccgcattgaagaacaatagcacctggcagatatgtctcaacaactttggcaataactgttttaaaaaggcgagtaaagccggagtcatctatcccatctttaagtggaatgttaatggcataatattttccttctctttctcctatatccttaatatcacctgtgccagggaagaaaaaatcaccatacttgtggaaacttacagtcattaccctgtcagtgaaataaaaggcttcttcaactccatccccgtgatgaacatcgatatcaatatagagaaccctggcatggtacttgagaagctccagaattcccaaaaccagatcattaatgtagcagaaccctgatgcctcgcacttctttgcatgatgcaatccaccagcccaattgatagcaatatcacatgttttatgattcaatctgcgagccgcatctagagttcctccagcatatatttggcaaaactcaaacagattatcaaagactgggcagtcttctccaagattgtcatcgtagaagtaggctatcctgtctttctccagcat

SEQ ID NO: 21419 - DNA, 386 bp, Oryza sativa
  Clone ID: TF_uC-osrocyp027g06b1
ttttctcttgcttcctcatcataaccattccatccgcggttgatgagaagagctccagggagcatctactcaaatggcgggcgttggcaatatatagactcccattgatcacagcctatgcgatcatgcattctagaccaattgttagaaacgcctttcgaactgcaagatgcccgacctcaagattgctaggatgacacaatctgaaattcagagcgatctgtgttaccagagccaggctgtgcttgacctataaaaagtttgagaaacgtaccttgttggtctattagaggacaccaacctgtgcgctattaatgacaatcgtgtgcccattttttttcaagtaatacaattggctaggaggatttgtggagagaggtcttaaa

SEQ ID NO: 21420 - DNA, 2721 bp, Oryza sativa
  Clone ID: TF_OsC1528_2133
atggagatggaaacattgcagctgcgtgctgggacaggctgcttatgggtttgcctcctcctctgtgttgcgccgtcgctcgtggactactccatcccgctcgccagcgtgcaccggcgatcgggagagcaggtctccggaacctctgccttcgacgtcctgcaccgggagaaggcggcaataaggtttttgggaagcgcttcgtgcgactgctccctgttcaaccgcgacggttcgccttcctctccgctcgcgtgctgcacgccttcgtcgacgctcgcaaccgcaagtagttcatgccgagcaaccggtctttccgccacctcgatcagggtcaatctgtggctgacagctatgaaatgcttctgggtaagtactggcaagcctatgggcgttcttaatgctgatcagcagaaagaattcgatgaggccactactctttttgtgggatgcattcttagcgtgcttggcgatcgtctggtcgaggtgtatatgcatatgaccgacgctacggagttgtgggatgcactgaatactaaatttggtgctactgatgctagtaatgatctgtatatcatggagcagtttcatgtctacaagatggctgacaaccgttctgtagtcgaacaggctcataagatacaaaccatggctaaggaactcaaactccttaagtgtgtcttacctgacaaatttgtggccgggtgcattattgcgaaactatctccatcttggagaggtttcggtactgcactcaaacacaagagacaggaatacttcgttgaggggttgatagcgtctcttgatgttgaggagaaagctcgggaaaaagatgtcgcgtctaagggcgatggtgggcagtccagtaccaatgttgtgcacaaggcccaaaacaagagcaaggggaaatacaaagctcagcagaccaccaacttcaataagaagaagaaaaacaacaatcctaatcaggatgagaggacttgctttgtgtgtggtcaacctggccatctggccaggaagtgtccacaacgcaaggggatgaaggcacctgcaggacagacctctaagtctgctaatgtgaccattggcaacactggagatggaagcgggtatggtcgcacggggttccaccgtcctaatggggaatgggtcacatgcttctgttcatggtgttggcacggtagatctgaagtttacttcgggaaagatcgtgcagctgaagaatgtgcagcatactactggaaggaggatgtccgtagtgaaatggattccattatcgctaacgggacttgggaggtgacagagcgaccctatgggtgtaaacctgtggggtgcaagtgggtgttcaagaagaagctcaggcctgacgcctcacatggtcttctcattcatcaaatggacgttaagacaacttttcttaatgaagagctggatgaggagatctatatggatcaacctgatgggtttgtagttgaaggctttgcagtcaatgaggcagataaatatgtgtactatcgccatggtgggggtgagggagttattctgtgcttggtttgcctcctcctctgtgttgcgtcgtcgctcgtggactactccatcccgctcgccagcgtgcaccggcgatcgggagagcaggtctctggaatctctgccttcgacgtcctgcactgggagaaagcggcaataaggtttttgggaagcgcttcgtgcgactgttccctgttcaaccgcgacgagggtgatgctgcagatagggcgagcaacttgacagatgccactgttgacagcttgattgagtctatcatcattaaagatggggtgaaagccaagtttttctttaacattatgtctcttgctaactctgcaggagagaagttgcttgccttcagtcaatatatacttcccatgaaatttttggaaaggttgttggttaagaggctgggctggcatgtagggaaggagattttcatgatatctggtgatactagtgcagacgacagagaagtggcgatggatcagtttaacaactctgccgatgcaaaagttttgtttggttccatcaaggcctgtggagagggaatctcccttgttggtgcatctcgagtcatcattctagatgttcatttgaacccatctgtcacccgtcaagcaatcggacgtgcattcaggcccggacagcagaagaaagtgtttgtgtacaggcttgttgctgctgattctccagaggtgaagttccatgaaactgcattcaagaaagaagttatcccaaagctatggtttgaatggagtgagctctgcactactgaagacttcaaactgaatcaagttgatattgatgactctgaagatgaactattggaggctaatgctattcgccaggatatcaaggctttgtatagaagggttggcaagggcctgtcggcggcagcggcggcgtcgaagcggagatggacgttggcgttggcagcgaagaaggtagtggggcggaagctgggtgggccgaagaagccggtgccacgctccgtcaaggccgggctccagttcctcgtaagccgctacctcgagaacggccggcacgcgcaacgcgtcggcactggcacccccgtctacctcgctgccgtcctcggcgtagctgtggcggccgcggcgaggaggagggaggggagtagcagcagcgcggggacacccatggctgtcgcggcgacggcggcgaggtggtag

SEQ ID NO: 21421 - DNA, 348 bp, Oryza sativa
  Clone ID: TF_uC-osrocyp032h06b1
acgttcaacacacgcagcgaattccacgaagagagaatcagtcttacatggcgcccaaggctgacaaaaagccgacggctgattaatcccgcggaggaggagcccgtgggggagaatgccccgtctgcatgcgaagaagcccaaggcggtgaaacggctcggcggggagaagggcaagaagggcggagccagataggggaagaaggacgggaggaagaaggggaagaagagcgtggatacctacaagagctacataaggaaggagatgaaggaggatccccccatcatatggatctgctccaaggccatgtacataatgaaatccttgattaacgacatgttggagaa

SEQ ID NO: 21422 - DNA, 3772 bp, Oryza sativa
  Clone ID: TF_OsC1517_1666
atgacgatggccgacggtgcggggcgtgatcgctccggcctcgggccggggaagaggaaggagagggtgcgcccggagtccacgtcacgcgtcctcgctcgtgccggctcctccgacacaacaggcctccagtgtccatacgggcagtatgaggccccgaactgtgcagtcgcggtcagctgtcggctgtcgagcgggcaccgcgcggggagaactacaacaaggttttcacccgccagctataacagaaaaaagggatggctcgacaacgtcctcaagaaggaagatgatactcgaagtgccgtcgttgtcgtccgggcggtggccggcccggagctcggcggggcgaggcaagagagactgcgcgagctcaagacgtggttctccggaccactccacgcggagtcggcgccgggctgcgggcggagcgcggcgggcgagagcggcgatgggcgggcggcgggcaagctccaggtcgctccgtgcgagtcacgtcaccgggggcgcggcgactggtgggtgtgggcggccgccctcctccgactttgccccctactcctcgcacatcacctcctgccggaggcaggcaggcgcggactgggcggcgatgacgacgactcgccctcctcatctccccgtctcccgccggcctcctctcccacttctcccgccggtgaagaaggcgacaggcgggaggaaggccggcgggcgaggaagaaggcggtgacgcgctccgtcaaggccgggctccaattccccgtcggccgtatcgggcgctacctcaagaaaagccggccggtcgatctcctctccgccgctccttccccatcggccgcgccgaccctcttccccaccgcgtcggtcacgccgccgaccctctttcccaccgcgtcggtgacgccgccgaccctctttcccacacacgcacctcaagatattcctctctacccatcctcagcagacatggcgagaaaggagggggaagggctggatctggtagcgatggaagaagagctggatctgtattcttgggaacccgtggtgacgcttgccatatctttgctggacagagccatatcctacttgggtgaggacactagctgggcggaggggcggaacaagaacagatttggtggtttcagcagtcaaatgttttattatctccaacctgccagaggaaggtttcaagacttccgtctgcgtctgattaattggccaaagtcgtactgttgtggctatgaggaaatctggaagttcaggattgcggttgagctattggaggatttgatcgaggagatcgaacaccgccggctggaggaagatggtcgcattcctgccttgttcatgaatgctaaggcaaagatcgccttcaagtttgcgacaaatgattatttcagggaggagtgggacaggctgttccaggagttcacaaccttcaggctagaggacttgatcacggatatcgaacaccttagactggaagagagtggaaaaaagatctccaacaagaagtttgcgagatctcctgatcagtataaacaacaggctaggctatttttcctgctagagagaggtgtatcacgtttacgcgaccaattaccagcggtggtcgaacatgtggttagccaagatagggagctggttgaccttgagaaggaggagttgcatgcagagctggttggccgagatagggagaagaagcagatagtgcagtgcctcatcatcagcacagcaggcgcagaaatcaagcgtgtagcgagcgcaggccacatccaggagtatctttcagtccggatctcgaggcactgtcacaatggtaaaacccccgtcatcgccaacgagcctggctccgcgggggcggacaccgccgccggcgccgcggcgagcattgcccgcgcggaacttccgctccccgaacccgagcgcgtctccgatcccgcggttcccctccctccgcctgccctcgtctcggagccgccacctaccaccgctactgtcgccaaagtggaagatgaggagaagcccacggccgtcgcccaccaggaggcggcgcccagggattacgcgttccagcgagcgctcaagaccgcggagaacaagagcgacccgtgcggcggccggtacatctacgtgcacgagctgccgccgcggttcaacgacgacatgctccgggagtgcgagaggctcagcctctggaccaatatgtgcaagttcatgagcaacgaagggcttggtccgccgttgggcaacgaggaaggggtgttctccaacaccggctggtacgcgacgaaccagtttatggtggatgtcatcttcaggaaccggatgaagcagtacgagtgcctgaccaaggactcgtccatcgctgccgcggtgtttgtgccgttctacgccgggtttgatgtggcgaggtatctttgggggcacaacatttcgacgagggatgccgcgtcgctggatttgatagattggctgaggaagaggcctgaatggaatgtgatgggcgggcgtgaccatttcttagttggcggcaggattgcgtgggatttcaggcgcttgacggacgaagagtcggattggggcaacaagctgcttttcatgccggctgcgaagaatatgtcgatgttggtggtggagtcaagcccatggaatgccaatgattttgcgataccatatcctacttacttccaccctgccaaggatgctgatgttttgctttggcaggatagaatgaggagcctggaacgaccatggttgttctcgtttgctggggctcctcgtcctgatgatcccaagtctatcagaagtcagcttattgatcaatgcaggacatcaagtgtctgtaaattgctggagtgtgatcttggggagagcaagtgccattcccctagcgcaatcatgaatatgttccagaactctttgttctgcttgcagccccaagatggcgtccgtaagggaaatgtcagcattgaggacaggcttaaaagtatccatccagatatggtcaagaagatgagggaagaggtcattagtctcatcccaagggtgatatatgctgatccaaggtcaaagctggagaccctgaaggatgcattcgatgtttctgtagaggcaataattaacaaggtgacacagttgagaagagatatcatcgaagatcatgaagataaagattttgttgaagagaatagctggaagtatgatctgttggaagaagggcagaggacaattgggcctcatgaatgggacccgttcttctctaagcccaaggacaagggtggagattctactaatccatctactaatgctgccaagaactcctggaaaaacgaacaaagaggtcagaactaaaatacaggtagttagatatgtgatcgaggaaaggaactagatatcctctctagagaagctccttgcaaataccttgcccatatgtcaaagatcctccaacgcagtagctctgatgatcatgtatgttcttgatgatctagcccctacaggtgtaagtggtggtagaaaagatgcttggggaaaaaaatgcacggccttcgagttgcccttataaataccatttcacactctatttttgttttgctttgctcaataatcctttgtaagtccttacgggatttataggtatatcaattttgctgttgtttctgttttgtttgctttgatctgtatgtgtatggtttagaatttgtgtatactacctttttatactcacaattagtaagcaatcaaagagatttttgtagataaaaaaaaaaaa

SEQ ID NO: 21423 - DNA, 280 bp, Oryza sativa
  Clone ID: TF_uC-osrocyp032a11b1
tcgtggtcgcgtgggctcgctcgctcgctgcgtgggcgcactttatccacagatttttctgctgctgttgcttcgttgcttagcccgaggattccgtactactaccggagggcttggttggttgatttggtttggattagccatggcacgggagagggaaggcgatcggataggacgccggcaagaaggccatgtctcgaagctccaaaggcagcctacaacatcccgtgggcaggatcgcccggttcttgaaggccggcaagtaccccgagagggtagg

SEQ ID NO: 21424 - DNA, 240 bp, Oryza sativa
  unsure (1)..(240): unsure at all n locations
  Clone ID: TF_2310729
cacgccagtttggtcgctctcgatttcgatttcccccaaatccaccgcaagagaaagccaagtcgccgccgagaagcgaagaggagatggcccgtacgaagcagaccgnccgcaagtccaccggcggcaaggccccgaggaagcanctcgccaccaaggcggcgaggaagtctgntccgaccaccggnggcgtgaagaagccccaccnctacaggacggggacggtggcgctccggagat

SEQ ID NO: 21425 - DNA, 304 bp, Oryza sativa
  unsure (1)..(304): unsure at all n locations
  Clone ID: TF_428926
gaagcccaaggcggagaagcggctccccgcggggaagggcgagaagggcggcgccggcgaggggaagaaggccggganggaggangggnaggaggaccttggggacntaaangttttaaattttaangtttttaangaagttccaccccnnantnggantttcttcaangncattttcattnatggactccntcatcaacgacatcttcgagaagctcgccgccgaggccgccaagctcgcccgctacaacaagaagcccaccatcacctcccgcgagatccagacctccgtccgcctcgtcct

SEQ ID NO: 21426 - DNA, 442 bp, Oryza sativa
  Clone ID: TF_LIB3433-030-P1-K1-H8
accgctccttgtcctactccatttcttctggtggatgtctgtgtatctgtgtctgaagctcggagggccacctataacaggcgtgatttgtagacataaatcatcccggcaagggaggcatgagtctccataaggaccgcgccaagacgtaaccggaaggtgcttccagacaacatccaggggatcaccaagccggatatcctgatgctgacgaggaggggctgcgtgaatcgcatctgcaggctcatctacaaggagacccgcggcgtgctcaagatcttgctcgagaacgtcatccgcaacgccggcaactacaccaagcacgcccgtcataagaccgtgaccgacatggacgtcgactacgcgctcaagcgcgcaggacgcaccctgtacagcttcagctgatgatcgatcgtgcctccataccccatctctaccatgt

SEQ ID NO: 21427 - DNA, 582 bp, Oryza sativa
  Clone ID: TF_LIB4834-009-R1-M1-A11
ggccgcttttttttttttttttttatttggctctgaaacatgtttcaattcaaatcccagttgcaaacatcatttgcttcacaatttcatgattcaggtaaacactagaaaaactaaacagcgaactgaacaaggtggattccacggctttccatcaaactttttttcttgaccgcaagacttgtgggcacggccagacgacatgggagagatggcggagggaggcaagatcgatcagccgccgaagccgtagagggtgcggccctggcgcttgagcgcgtagacgacgtccatggcggtgacggtcttgcggcgggtctcctcgtagatcagcccggagatgcgcttcacgccgcccctccttgccagcctccggatcgccggcttggtgatcccctggatgttgtcgcggagcaccctccggtgacgcttggcgccgcccttgccgagccccttgcctcccttgccgcgccccgacatggccgccgacgacgacgattccggtggctcgacgcacgagagagagagaaaagcgagtggaattggagaagaggttggtggtgattggggagtcccggccgg

SEQ ID NO: 21428 - DNA, 748 bp, Oryza sativa
  Clone ID: TF_OsC724_9
tgattcccttttgcaaaatgttctcatgatttaagtttgtgaatgcaatagaaattataaactggttagtcatagtcgttcagactttttgcttaattgcaaacttgataatatgctagtttgttggcaacaagcaaacactttttgtgtaccgtcatctgaaagttgcggctgtgtgatgtcttgagtccttgactatgcgcattgttgatcatgtcccttgtttttgtcctcaggtaaaccaaagttctttttccgatggctcgtactaagcaagctgccgaggcgtacctggtgggtctcttcgaggacaccaacctgtgcgccatccatgccaagcgtgtgaccatcatgcccaaggacattcagctggctaggaggatccgtggtgagagggcttaggctttctcatctctgggaggggctctggtgtttcatctgtgactacttcctgcttttgctgctgaactcttatttggtgtcgtgaatggtgctaatactactcacatgtagtagtagattgttagtgaagtactctgtttctgtgttctagaactggatattttgctagtaagttgtctcgactgttgatttcatccatccatctgatggatgtgtatctagtagtttctcatctgaagtcctaaaatctgaaccatgaatttacctgtggaatggaacttagaaaaactgtgtcaaatgttcaaagatcttggcatgaatgccttgtttcttttttaaacaaaaa

SEQ ID NO: 21429 - DNA, 387 bp, Oryza sativa
  Clone ID: TF_rsicef_6944.y1.abd
gcacgaggattagaaacacactcgcctcgcctcctttcgctcgtttcgtccaacaccagcaccaccacctaccgatctctgatggcgcccataggggccgagcaatgaagcccgcggagaagaagccggcggaggagaaggccggcgagaaggcgcccgcggccgggaagaagcccaaggccgagaagcggctgccggcgtccaagggggagaagggcggcgagggcaagaaggagcgcggcaggaagaaggcccagaagagcgtcgagacctacaagatatacatcttcaaggtgctcaagcaggtgcacccggacatcgggatctcctccaaggccatgtcgatcatgaactcgttcatcaacgacatcttcgagaagctcgccg

SEQ ID NO: 21430 - DNA, 507 bp, Oryza sativa; identical to SEQ ID NO: 11863
  Clone ID: TF_OsC408256_1

SEQ ID NO: 21431 - DNA, 445 bp, Oryza sativa
  Clone ID: TF_LIB4309-013-Q1-K1-B4
gaaccccaccgtttccccttcccgagaagaagagagcagcatccatggcgcccaaggcggagaagaagccggccgcgaagaagcccgcggaggaggagcccgcggcggagaaggccgagaaggccccggccgggaagaagcccaaggcggagaagcggctccccgccggcaagggcgagaagggctccggcgaggggaagaaggaccgcgctgggaggaagaaggcgaagaagagcgtcgagacctaccagatcttcctttttaaggggcttaagccggttcaccccgacattggcattttcttcaagggcctgttcattatggacttctttattaaccacctttttgagaaggttggccgccaaggccgccaggttggccggttccaccagaaggccacccttaccttccgggagattcaaaacttcggtcggcttgttcttcc

SEQ ID NO: 21432 - DNA, 707 bp, Oryza sativa
  Clone ID: TF_OsC106861_1
tttttttttttttttgagaggaacccattattgcaatcatctttttttttcctggttcacatttcacaatcgactgtttgatgaaatcctgaattcgaccaatccaaatggagcaaaaggtaaatactaacatcaactgaattagaatgggaacgaagggtaagttgatccctatgtgaagatacatcggcactactttctaaaatgttaatcaacgacacatgttgctccttgtccatcatgctgcatggctcgcaaacaaattttcaccatggcctccgcccaccgatacgcctggcaagttgcatgtccttttgcatgatggtaacacgcttagcatggatggcgcagagatttgacacttcaaatatgtccactaagtggtattctgctgcctcttgcaatgcaaggagagcttcaagggtccaccgtgacacatcctttgaatagaaatcagtgatctccctgaccagccgagaaaatggtgcaaacgggatcagcagttcggtggttttctgaaatttcctgatctcccgcagtgccactgtgcctggacggaagcggtgtggcttcctctgcttcgtttgctgcctaggcgtcccaccagcgcgctgcgccttcgacggccgaggggagcgttcgaactggagcttcttcttgggctccgccttcgacttcctcaccgccgggtgcttcgtgcgagccat

SEQ ID NO: 21433 - DNA, 787 bp, Oryza sativa
  Clone ID: TF_OsC631_9
acgccgcaatctcgcaaatcccaccgcttccctttcctctcctctccccgagaagaagagggcggcatccatggcgcccaaggcggagaagaagccggcggcgaagaagcccgcggaggaggagcccgcggcggagaaggccgagaaggccccggcggggaagaagcccaaggcggagaagcgcctccccgccggcaagggcgagaagggcagcggcgaggggaagaaggcggggcggaagaaggcgaagaagagcgtcgagacctacaagatctacatcttcaaggtgctcaagcaggtccaccccgacatcggcatctcctccaaggccatgtccatcatgaactccttcatcaatgatatcttcgagaagctcgccggagagtccgccaagctcgcgcgctacaacaagaagcccaccatcacctcccgggagatccagaccgccgtccgcctcgtcctccccggcgagctcgccaagcacgccgtctccgagggcaccaaggccgttaccaagttcacttcctcctaggctgtacgcctgcatctagtcctagtagtaatagtagtttttatatgtttatgtggtatattgtttaagtgatatccaagattggaaatggatgttaaattgttggtttggtagtcattggctgtaagaagaatggctttgggttgcttttgggaaacacttgcttcacggatcgggcataagtaaccatgcttttataacatgcgaatgtgtgctttctcttgtgccatcattgataagaattacccttgtgcc

SEQ ID NO: 21434 - DNA, 1367 bp, Oryza sativa
  Clone ID: TF_OsC3753_2
ggaaataaaaccccaaccttagtttagttttaaatcacaattttacaagctggaattacccatagctgaagtccaaattttggggttcaaatacagtaattgggagaatggaatttacaggggaaaagatgctcccaaatttggggatcaggggttcacacttttgatttttgaacgggattttttcacccagatatcttccgttcagcgtttttcatcattatcacaaattcatcgtagttcacctgcccgtcgccatcggtatccgcctcccttatcatctgctcaacctcctcgtctgtcatcttctccccaagattggtcatcactgtcctcagctcagttggggagataaaaccattctgatccttgtctaggacctcgaaagcttctttcagctcttcgtcgccatccccatccttcatcttcctggcaatgaggctcaggaactcctgaaaatctatgatcccattgccatctgtatcaacttccctcatcatgtcgttgagctcctgatcggtcggctcaaggccaagagaacgagtcaccgcagccagctcttccaaggtgatgcatccatcgccgttcttgtcgaagagcaagaacgcctcctggaacgccaccatctgctcgctcgtcagcccttccatgcaggctccgccaccttcacagtcacaccactagcaaggagagtgcaggaaaacaaaagggtggcggacgcgctggggataaacagcaggggggcaacttgtattggttattgatgcaagaattgacttggaacagaatgataacctttcattagggttagtagctttagctcggatttgagtagtagaccatcctccacgtaccgtatatctatgctggatccagtcagcctggagtgtaaaataatgaaaagtgacaaagaaaacaaagctcttgaccactccaccagcgatggtacccttgatgagagtgtcgagctcctcatctccacggatggcaagctgcagatggcgaggggtgatacgcttgaccttcagatccttgctagcgttcccagccagttccagaacctcagctgttaagtactccagaatagcagcagagtaaactgcggcagtagcaccaacacgtccatttgcctgagtcctttgcttcaactggcgatggatacggccaacagggaacagagtcctatcatggttggcttccatggtagctgaaaccaccacagttggtgccactggcatactaccaccttcctggagaccagcgcgggacgagcgggagacgggggccttcttccccttgtccttctccgccgacttggcggccgtcgtcttcgcggcgagcaagcccttacctccttttcccgccat

SEQ ID NO: 21435 - DNA, 325 bp, Oryza sativa
  Clone ID: TF_uC-osrocyp002h02b1
tggtaccggtgcgggatccggggcggagacccacgcgtgcggtaatcttcaggccagagcgcgagcgagaagaccggaggcctgctgctacgttcttggggagggccctgacgaagcagacgggtcggaagtcgaccggcgggaaggcgccgaggaagcagctggcgacgaaggcggcgcggaagtcggcgccggccaccggcggcgtgaagaagccgcaccggttccggccgggcaccgtcgcgctccgggagatccgcaagtaccagaagagcacggagctgctgatccgcaagctccccttccagcggctcgtccgggagat

SEQ ID NO: 21436 - DNA, 715 bp, Oryza sativa
  Clone ID: TF_OsC41976_1
acccgcaaattcaccttgagtccgctccaaatccaaatctcaccttgaattcttctccttctcctcctccttctcctctctttctccttcggtgagagatggcccgcacaaagcagacggcgaagaagtccaccgccagcaatgtgccgaggaagctgctggtgatgaaggtggcacgcaagtcagcaccgacgatggcagggctgaagaagccacaccgcttcaagccagggaccgtcgcactccgagagatccgcacataccagaagagcacagagctgctaatccgcaagctccccttccagcggctggtgcaggagatcgcgcaggacgttaggtcctatgttcgcttccagagctctgccgtggttgcgctccaggaggctgccgagacctaccttgtggggctcttcaaggacaccaacctctgtgttatccatgccaaacgcgtcaccatcatgcccaaggacatccagctcgcgcgccgcatcaggggcgagaaggcctaggtttgggggcatcgtcttgtccgatcgcgcttcttctgtctgtgttcttggctactagcacatttttaaattcatgtccgtaggttaggaagatgtttttggtcagggtttgatgggtgaactggctttttattttatcctgtgatgctgtaatcgttatggtttgctaatcttatggaaagcctatggtcgtttgggatttctac

SEQ ID NO: 21437 - DNA, 414 bp, Oryza sativa
  unsure (1)..(414): unsure at all n locations
  Clone ID: TF_2442299
ggcggagaagagcagcggcgaggggaagaaggcggggcggaagaaggcgaagaagagcgtcgagacctacaagatctacatcttcaaggtgctcaagcaggtccaccccgacatcggcatctcctccaaggccatgtccatcatgaactccttcatcaacgacatcttcgagaagctcgccggggagtccgccaagctcgcgcgttacaacaagaagcccaccatcacctcacgggagatccagacctccgtccngctcgtcctccccggcgagctcgcaagcacgncgtctccgagggcaccaagnttttgaccaagttcactccgttagattccatctatttgtagtattaagttctgtctatatcttgtagtggtaggaatggatgtcttattagtgtgtagtttgcggtt

SEQ ID NO: 21438 - DNA, 716 bp, Oryza sativa
  unsure (1)..(716): unsure at all n locations
  Clone ID: TF_OsC631_2
ngtcccccctcgaggccggcccgggaaaaaaccggccggaaaacacacggcgaaagcaaatcaaatccaatccacctctcgcctccaaatcccaaatcctctactcgtcgtcgtcgcggttcatctccagcgaattcccgatggcgcccaaggcggagaagaagcccgcggagaagaagccggtggaggagaaggcggagaagaagcccaaggccgagaagcgggtgccgggcgccaaggagggcggcggcgagaagaaggggaagaagaaggccaagaagagcgtcgaaacttataagatctacattttcaaggtcctcaagcaggtgcatcccgatatcgggatatcgtccaaggccatgtcgatcatgaactcgttcatcaacgatatcttcgagaagctcgcccaggaggccgcccgtctcgcccgctacaacaagaagccgaccatcacctcccgcgagatccagacctcggtgcgcctcgtcctccccggcgagctcgccaagcacgccgtctctgagggcaccaaggccgtcaccaagttcacgtcgtcttaagacgcgtgatctgttcatgttcgttggatgtttatctgttctgatgtttatttagagcgctcttagatttcccacatggaacaatgtagtatcggtgaaattcgctataaatgaatcgctgatcttatcacaacttaaaaaaaaaaaaaaaaaaaa

SEQ ID NO: 21439 - DNA, 419 bp, Oryza sativa
  unsure (1)..(419): unsure at all n locations
  Clone ID: TF_LIB4371-057-QB-K6-B3
gacccacgcgnccgcactcctcaccaagncaaagnnnctncctcgcgaccggcggcgagcggcggcggcggcgagggcngggagaggcaagggcggcaaggggctcgggaagggcggcgcgaagaggcacaggaaggngctgcgcgacaacanccaggggancacgaagccggcgatccggaggctggcgaggaggggcggcgngaagcgcancnccgggctgancnacgaggagacccgcggcgngcncaagancnnccncgagaacgncanccgcgacgccgncaccnacacggagcacgcccgccgcaagaccgncaccgccanggacgncgncnacgcgcncaagcgccagggccgcacccncnacgganncggcggcnaggcgaggcgangcgaggccacgcgannnggaaggg

SEQ ID NO: 21440 - DNA, 587 bp, Oryza sativa
  unsure (1)..(587): unsure at all n locations
  Clone ID: TF_LIB4371-021-R1-K1-B4
tcggtccaggctgnaaaatactgcggccgcgatgaagcccgcggcggtagtagcccgcggcacgaaaacgccgacaaggcccccgcgcgctgcaagtcccaggcggctaagcgcctgcccgccgtcaggtctagattggcagggttgatggtaataaggcgggcggatgatgggaagaagacggcgataccttttgatctactcttcaaggtgctcaatcaggttcaccccgacatcgtgatcccctccacggccatgtgcatcgtgaactccttcatgatcgacttctttgatatgctcgccggggagtccgacatgctcgcccgctacatcgagaatcccgccatcaccttccgggagattcatacctccgtccgtctcgtccttcccggtgagctcgccgatcacgccgtctccgagggcacgaatgccgtgaccacgtttacttccgcttacgctgactgccttgctctaactggttaggaggctttggagcacgaggatgctctgtttatgtggcatgttaactgcgaaatgatgattgcaaatgaagaattgtgcggcgtcttcttttgcgataactcact

SEQ ID NO: 21441 - DNA, 637 bp, Oryza sativa
  unsure (1)..(637): unsure at all n locations
  Clone ID: TF_LIB4371-037-R1-K1-F6
cgagatgaagagagcggcatccatggcgcccaaggcggagaagaagccggcggcgaagaagcccgcggaggaggagcccgcggcggagaaggccgagaaggccctggcggggaagaagcccaaggcggagaagcgtctccccgccggcaaggccgagaagagcagcggcgaggggaagaaggcggggcggaagaaggcgaagaagagcgtcgagacctacaagatctacatcttcaaggtgctcaagcaggtccaccccgacatcggcatctcctccaaggccatgtccatcatgaactccttcatcaacgacatcttcgagaagctcgccggggagtccgccaagctcgcgcgctacaacaagaagcccaccatcacctcacgggagatccagacctccgtccgcctcgtcctccccggcgagctcgccaagcacgccgtctccgagggcaccaaggctgtgaccaagttcacctccgcttagattccatctattggtagtatttagttctgtctactatctggtagtggtagaaatggatgtcttattagtgtgtagttggcggttgtggcgctgcttttggtaaactgttgcttatttatctgagatattaacgatgctcttctagaanaaaaa

SEQ ID NO: 21442 - DNA, 2356 bp, Oryza sativa
  Clone ID: TF_OsC631_3
atggcggctctgacggaggacatcctcctccagatcttctcccgcgtgggcagcatcaaggacctcttcaagttcgccgtgacatgccggcggtggctgcgccgcttcaccgacccggccttcctccgcgggctgtgcctggacagcggcgagggccaccgcgcgcgcctcctcggcttcttcttccagcagacgagattctatcgctgcgaaaagatgatcaagatgcgggtgacgcagcagagctcggtctgtccgcccaccttcctgccggcgccgtggtcgccgctcggcctcacggatcgcaccctcacctccttcctcgccgccgacgacgacaccttcaactacgccgagcccctcgcagcgcgctgcggcattgtcctgatgcggcttgtcccccgcaccgcgctgatgatagcgtgcagccacctcctcggcgtctgcaacccgatcaccggggaatgccacgttctcccgcctctgaatctctccggcctccatcgctacttgaccagctacgccatcatcacgtccaccgacagcgacctagatgggaagcagccgccatcatcatcatcgtcagggcgctccacgttctcgcagctgtacctcgtcgtccaacacaagaaagactgtaacgagtacttctactcctactctgctgctacgtgcagctggagcgctcccaccatgtgcgtggacggccgccgcttctccctggtgggtgagagatccgccgtcgttcacaagggcgcggcgcactggctgtttattgatcgtgtatctagcgcaacccaagatgacatactgtacaaactcaccgcggcggtggacacctcagaaatctccttgacaaggctcccctttggtgctggaggctcaccgctcctctgcgtcagtggagacggcaaactttcggtcgcttgcgtgtttcccatccacatgagagtttggactcagcaagatgacacccctgcaacgtggctccgcactgtgatcaggataccattggcggtgccttacccagactattcccatatatgtcagccccgcgagaagtggtttaacttcaacaggggatcaatgctcgtgctgtacaggagcaacggcgtcttcatcctcgacctcgagaagaaggtgatggaaaaggtcatggactgcttactgcccctattcagtgataaactgaacaggacggctgtggcgtatgagatggacttggttgagttctttgtgctccagctcagtggatacatatggaaattgagtttgttggtgatcacagttacaggtctgactccatggcaaaaagcccaaaacctgaacccaaagaaagaacagcccaccaccacagcgctccaaaaacggggcccactgcacatttttctttgcaacgtcagcgatccgcacggaaacgcatcgcagccgtctaaccgaaaaggcaccggacgtcacacattcatccacgtcatcgatccgcgggacaagcctctccaccaatcagcgcccacttttacccactataaactcaccgcacccgtgtcctccttccacaccgcaatctcgcaacacatcagcacacaccgctccaaagcaaaacccacggacccgcttcccctccccgagaagaagagagcagcatccatggcgcccaaggcggagaagaagccggccgcgaagaagcccgcggaggaggagcccgcggcagagaaggccgagaaggcccccgcggggaagaagcccaaggcggagaagcgtctccccgccggcaagggcgagaagggcagcggcgaggggaagaaggcggggcggaagaaggggaagaagagcgtcgagacctacaagatctacatcttcaaggtgctcaagcaggttcaccccgacatcggcatctcctccaaggccatgtccatcatgaactccttcatcaacgacatcttcgagaagctcgccggggagtccgccaagctcgcccgctacaacaagaagcccaccatcacctcccgggagattcagacctccgtccgcctcgtcctccccggcgagctcgccaagcacgccgtctccgagggcacgaaggccgtcaccaagtttacttccgcttaggctgcatgccttcctctagtttgttagtagtagtagtagcagtagattgatctgtttatgtggtagtttaagtggaaatgatgattgcaaatggatgtaagaattgtgcggggcttcttttggggaactcactgatctggaatagtaatgctttttatgtcatgtgaacgtgtgtagttggcggttgtggcgctgcttttggtaaactgttgcttatttatctgagatattaacgatgctcttctag

SEQ ID NO: 21443 - DNA, 503 bp, Oryza sativa
  unsure (1)..(503): unsure at all n locations
  Clone ID: TF_286949
gccgccgccgcgaaatctccaagccaaagcgccggcagagagccccgaggcctcctcctcccttctccgcgatggcccggacgaagcagacggctcggaagtcgaccggcgggaaggcgccgaggaagcagctggcgacgaaggcggcgcggaagtcggcgccggccaccggcggcgtgaagaagccgcaccggttccggccgggcaccgtcgcgctccgggagatccgcaagtaccagaagagcacggagctgctgatccgcaagctccccttccagcggctcgtccgggagatcgcgcaggacttcaagacggacctccggttccagagctccgtcgttggcgcgctccaggaggccgccgaggctacctctgttgtgntcttcgaggacaacaaccttttggcaatcatggcaaggtgcgtaacattatggccaaggacaatccagctcgcctgcgaatccgggtgaancgggttaaattagtcaataatntatngttat

SEQ ID NO: 21444 - DNA, 900 bp, Oryza sativa
  Clone ID: TF_OsC1067_12
actgttcgcctttcccgccagtttggtcgctctcgatttcgatttcccccaaatccaccgcaagagccaagtcgccgccgagaagcgaagaggagatggcccgtacgaagcagaccgcccgcaagtccaccggcggcaaggccccgaggaagcagctcgccaccaaggtgcgtatcggcgtcgtcgtttcatctccttctcccgttccgatctggtgctttgtgatttgggtggttctagggtttgcggttttgctgatttgtgttgttgtgtaggcggcgaggaagtctgctccgaccaccggcggcgtgaagaagccccaccgctacaggccggggacggtggcgctccgcgagatccgcaagtaccagaagagcacggagctcctgatccgcaagctccccttccagcgcctcgtccgcgagatcgcgcaggacttcaagaccgacctccgcttccagagccacgcggtgctcgccctccaggaggccgccgaggcctacctcgtcggtctcttcgaggacaccaacctctgcgccatccacgccaagcgcgtcaccatcatgcccaaggacatccagctcgcccgccgcatccgcggcgagcgcgcgtaagccgccgccttcgacgcggttgcgttgcgtagcgccgaagcgatctggggggatcaacgacgacgacgtgacgtggtcaacttgttgattcccctctcgcttccgcgttttagatctcgttttcattagcagctttgtaatagggtttggtcggttaattagtgtaaaaacagggttcggttaaagactcaaaatcaaatgttattgccgttctttggattttgcggttaagcaaaacagtgttgaagactattaatattcgtttactatatggagatttgttcgt

SEQ ID NO: 21445 - DNA, 459 bp, Oryza sativa
  unsure (1)..(459): unsure at all n locations
  Clone ID: TF_4878685
gagaagaagagagcggcatccatggcgcccaaggcggagaagaagccggcgggaagaagcccgcggaggaggagcccgcggcgnagaaggccgagaaggccctggcggggaagaagcccaaggcggagaagcgtctccccgccggcaaggccgagaagagcagcggcgaggggaagaaggcggggcggaagaaggcgaagaagagcgtcgagacctacaagatctacatcttcaaggtgctcaagcaggtccaccccgacatcggcatctcctccaaggccatgtccatcatgaactccttcatcaacgacatcttcgagangctcgccggggagtccgccaagcttcgcgcgctacaacaagaagcccaccatcacctcacgggagatccagacctccgtccgnctcgtcctccccggcggagcttgccaagcacgncgttcttccnagggcaccaag

SEQ ID NO: 21446 - DNA, 1567 bp, Oryza sativa
  unsure (1)..(1567): unsure at all n locations
  Clone ID: TF_OsC724_1
cggaattcccgggtcgacccacgcgtccgtcataatgtcagctttgaaataggaattgatttggattgtgtgtatatgtggtgagaatggaattctgtattagattgatcgtcaaacttgaatttgcatattgatgctttgtaatggcaaggtcaattttctcatataaatagtaattaattctggattttgattgtgtgtatacgtggtgagaatagaaatctgtattagattgatcgtcaaacttgaatatgcatattgatgctttgaaatggcaaggtcaattttctcatgtaaatagtaattaaccgctctagattttttaactatattgtcatgttacttcaatcatatgtgaatagaacatcccattaattagtggctttattgcattcaaaattggtcaggacctgtcactcctttccatcttgcatgctcaacatcttagtatgttatatgccacctgtcactcctttccatcttgcatgctcaacatcttagtatggttatatgctgtctgtaggtgttacatgttatatgactgcaaatcttttagctactgctcatgttttgngggaactgaagattaggttcgtaattttagaagctggtccgggagagaaaaaaaaacggaagtcagaaagggggggaattttgctgcggtttcttcttcttcttcctcctcctcgcgctcccccgattcgaagcgtgaagagaggaacggcgcttgcgagaggagagagatggcccgtaccaagcagaccgctcgtaagtccacaggaggaaaggctcccaggaagcagcttgccaccaagggctgctcgtaagtctgctcccaccactggaggagttaagaagccccaccgttaccgccctggaactgttgccctccgtgagattcgcaagtaccagaagagtactgagcttttgatcaggaagctgcccttccagaggcttgttagggaaattgcacaggacttcaagaccgatctgcgtttccagagccatgctgtccttgccctccaggaggctgcggaggcataccttgttggtctcttcgaggacaccaacctgtgcgccattcatgccaagcgtgtgaccatcatgcctaaggacattcagctggctaggaggattcgtggtgagagggcttaaattcccctcggcgattcctttgacaaatgaagcatgcgtcgtagtgttagtagtgggttttaatcttttgcttataagaacaatctgagtagggtgtattttgtggaacaatatgtttctcatgatggtgctgtattcgtcttattggtggatctgtcaaaaatactcagcatattgtcagtgtgtctggtgactcttattttgttagtctgattcgtttgcgtcttattctagcggtgctgcctctttggcactgtgcatggctagatacaattacattgtaattcacctgtctctaatccgtgttaatgtaagtgttccgttgctgtccgtgtaaaaaaaaaaaaaaaaaaaaaaaaaaaaaaaaacactgtaaaaaaaacctgcaaaaaaaaaaaaaaaaaaaaaaaaa

SEQ ID NO: 21447 - DNA, 760 bp, Oryza sativa
  Clone ID: TF_OsC11983_1
tttggtgtgtgtgtgttcttttttttttttttttagaaacgagcattcattcatatattccattccattccaacaagatttctcaagcaccaaacccatcacaccatcatccaaccgttcatcaaaacctaacctaacaacctacaaaggatggatattactaagatgggagggggaaaagaatcggatcaaagaacagggagcaacaaggttcttgattccgagtagcggacccaagaggggatcctagaactcctgggaggcggatccgatgtcggccttgtccttgccgcccttcttggggagcagcgtctggtggatgttgggcagcacgccgccggcggcgatggtgacggcgccgagcagcctgctcagctcctcgtcgttgcgcaccgccagctggatgtgcctcggcacgatccggttcttcttgttgtccctcgccgcgttccccgccagctccagcacctcggcggcgaggtactcgaggacggcggagaggtagacgggggcgccggcgccgacgcgctcggcgtacttgccggccttgaggtacctggcgatgcggccgacggggaactggaggccggccttggacgaccgcgacaccgacttggagcccttcgacttccccctcccgccgccgccgcccgcggaactcatctcctctacctgaatcgacggaaacggcgcccttgttcgcctggtcactcgccggagagatcgccggagcagtcgccgcggtggtggtgggaactac

SEQ ID NO: 21448 - DNA, 928 bp, Oryza sativa
  Clone ID: TF_OsC1067_10
ggcctcttggcacgaaatctccaagccccagcgccgccagagagccccgaggcctcctcctccctcctccgcgatggcccgcacgaagcagacggctcggaagtcgaccggcgggaaggcgccgaggaagcagctggcgacgaaggcggcgcggaagtcggcgccggccaccggcggcgtgaagaagccgcaccggttccggccgggcaccgtcgcgctccgggagatccgcaagtaccagaagagcacggagctgctgatccgcaagctccccttccagcggctcgtccgggagatcgcgcaggacttcaagacggacctccggttccagagctccgccgtcgccgcgctccaggaggccgccgaggcctacctcgtcgggctcttcgaggacaccaacctctgcgccatccacgccaagcgcgtcaccatcatgcccaaggacatccagctcgcccgccgcatccgcggtgagcgcgcttaaaattagttcaataatctgatcgcttcatcgttctcagctacctcttcctagtagaaccaggatgtactagtagtagcttgttgcaatgaactgtttatctgattgattatcaatggaaaaatgatgttcaaatcgggctattcatttatgtaaaaaaaaaagtcgggaatgtatctacattaacacggttgcgttgcgtagccccaaaccgatctggggggatcaacgacgacgacgtgacgtggtcaccttgttgattcccctctcgcttccgcgttttagatctcgttttcattagcagctttgtaatagggtttggtcggttaattagtgtaaaaacagggttcggttaaagactcgaaatcaaatgttattcccgttctttggaagcaaaacagtgttgaagactattaatattcgtttactatatggagatttgttcgt

SEQ ID NO: 21449 - DNA, 726 bp, Oryza sativa
  Clone ID: TF_OsC1067_3
ccggccgggatctcatcccaatcccccaaatccacccgagcattcgaagcttgtagaagaagccctagcctctcctcctcatcaccgatggcccgcaccaagcagacggcgaggaagtccaccggcggcaaggcgccgaggaagcagctggcgacgaaggcggcgcgcaagtcggccccggccaccggcggcgtgaagaagccccaccgcttccgccccggcaccgtcgcgctccgggagatccgcaagtaccagaagagcaccgagctgctgatccgcaagctgccgttccagcgcctggtgcgggagatcgcgcaggacttcaagaccgacctccgcttccagagctccgccgtcgccgcgctgcaggaggcggccgaggcctacctcgtcgggctcttcgaggacaccaacctctgcgccatccacgccaagcgcgtcaccatcatgcccaaggacatccagctcgcccgccgcatccgtggcgagagggcctaggcgtgatctgctcgagaggctgtgataccctggtagttctagtggtggttcctgtgtctagtctgcacatgtagagatttgatggggttccttggttggtgtttgatctcagatctgtcatggcctagttggggtgttgcgtatgtaatttatctgtcttactcttatgtgatcccatggtgttggaatgaaatggaagtgaagaattctacttatcccctttttttc

SEQ ID NO: 21450 - DNA, 707 bp, Oryza sativa
  Clone ID: TF_OsC1067_4
ccggccgggacctcactccaatcccccaattcccaaatcctccaagctctcgcgcttccgattccaagcagcagcagccagtccagttcccaaatggcccgcacgaagcagacggcgaggaagtccaccggcggcaaggcgccgaggaagcagctggcgacgaaggcggcgcgcaagtcggccccggcgaccggcggcgtgaagaagccccaccgcttcaggccgggaaccgtcgcgctccgggagatccgcaagtaccagaagagcacggagctgctcatccgcaagctgccgttccagcggctggtgcgggagatcgcgcaggacttcaagaccgacctccgcttccagagctccgccgtcgccgcgctgcaggaggccgccgaggcctacctcgtcgggctcttcgaggacaccaacctctgcgccatccacgccaagcgcgtcaccatcatgcccaaggacatccagctcgcccgccgcatccgtggcgagagggcgtagaatgcctccgttgccagatctggagttgtagagttagatcaggtgttaccagttttattttaacctgtgttccttatcgtagtggtgttcttgtgttatgcaccgtctgatgttaccatctcattatcatcagcaatggaaaatgttgttatccgtgtctccaaaaaaaaaaaaaaaaaagcggccaaaaaaaaaaagcggcc

SEQ ID NO: 21451 - DNA, 622 bp, Oryza sativa
  Clone ID: TF_OsC1067_7
actccgccgccgccgacttcgccgcgaaatttctcaaatccaaagctccgccgcgtcaagctctcctctcctctcctcctcgatggcccgcacgaagcagacggcgcgcaagtccaccggcgggaaggcgccgaggaagcagctggcgaccaaggcggcgcgcaagtcggcgccggccaccggcggcgtgaagaagccgcaccgcttcaggccgggcaccgtcgcgctccgtgagatccgcaagtaccagaagagcacggagctgctcatccgcaagctccccttccagcgcctcgtccgcgagatcgcccaggacttcaagaccgacctccgcttccagagctccgccgtcgccgcgctgcaggaggccgcggaggcgtacctcgtcgggctcttcgaggacactaacctgtgcgccatccacgccaagcgcgtcaccatcatgcccaaggacatccagctcgcccgccgcatccgcggtgagcgcgcctgattaatttattagtcgcttcatctgtgatagctctagtaccagaattgcttagtagtagtgatgtaatggcttgttgctgttgctgtcaattgttgctctgattataaatgggaaatctttctgatgttc

SEQ ID NO: 21452 - DNA, 668 bp, Oryza sativa
  Clone ID: TF_OsC1067_8
tcaaatccaagaaatactcgccgccgccgcctcgccttctccgccgcgccaagctctcctctcctcctcctcgatggcccgcacgaagcagacggcgcgcaagtccaccggcgggaaggcgccgaggaagcagctggcgaccaaggcggcgcgcaagtcggccccggccaccggcggcgtgaagaagccccaccgcttcaggcccggcaccgtcgcgctccgtgagatccgcaagtaccagaagagcacggagctgctcatccgcaagctccccttccagcgcctcgtccgcgagatcgcccaggacttcaagaccgacctccgcttccagagctccgccgtcgccgcgctgcaggaggccgccgaggcgtacctcgtcgggctgttcgaggacaccaacctgtgtgccatccacgccaagcgcgtcaccatcatgcccaaggacatccagctcgcgcgccggatccgcggcgagcgcgcttaggcgatccgccctcctttggttcttgcttggttcgtagggacttgtcatgttctaccagttcttgttaattattagatccttgccttgtcatgtcgtagtctttgattcttagttgcaatgtaaccgctggttattctgaaattgcaaccgaagtaatctgttttatccccaattttctgtcccc

SEQ ID NO: 21453 - DNA, 861 bp, Oryza sativa
  Clone ID: TF_OsC1067_9
ccggccgggcacgcctcaattcaaaaaatccattcgaatttcgcagcaaagagatcgagagagagatccatcaatccatcatccatggcgcgcacgaagcagacggcgaggaagtcgaccggcgggaaggcgcctcggaagcagctggcgacgaaggcggcgcggaagtcggcgccggcgaccggcggcgtgaagaagccgcaccgcttccggccgggcacggtggcactccgggagatccgcaagtaccagaagagcacggagctgctgatccggaagctcccgttccagcggctggtgcgggagatcgcgcaggacttcaagacggacctccggttccagtcgtccgccgtcgccgcgctgcaggaggccgccgaggcctacctcgtcggcctcttcgaggacaccaacctctgcgccatccacgccaagcgcgtcaccatcatgcccaaggacatccagctcgcccgccgcatcaggggcgagagggcttgatgccgttattgttcgagttcatggcttgttagatctagaagtgttaattaacccatggatctgtgttatcctgtaatcactcgcttgaattgggttcgcattgatggaatacaatctgttcttggcaaaaaaaaaaaaaaaaatcatgcccaaggacatccagctcgcgcgccggatccgcggcgagcgcgcttaggcgatccgccctcctttggttcttgcttggttcgtagggacttgtcatgttctaccagttcttgttaattattagatccttgccttgtcatgtcgtagtctttgattcttagttgcaatgtaaccgctggttattctgaaattgcaaccgaagtaatctgttttatcccc

SEQ ID NO: 21454 - DNA, 433 bp, Oryza sativa
  unsure (1)..(433): unsure at all n locations
  Clone ID: TF_LIB3434-033-P1-K1-D2
cccacgcgtncgtacgcagcaaaatccacaccgcttacgctccccgagaagaagagagcagcatccatggcgcccaaggcggagaagaagccggccgcgaagaagcccgcggaggaggagcccgccgcggagaacgccgagaaggccccggcggagaagaagcccaaggcggagaagcgtctgctcgtcggcaagggcgagaagggcagcgacgaggggaagaaggcggggcggaagaaggggaagacgagcgtcgagacctacaagatctacatcttgaaggtgctcaagcaggtccacctctacatcgacgtcttctccaaggtcatgtccatcatgaactccttcatcaacgacatcttcgagaagctcgccgacgaggccggctagctcgcgcgctacaacatgaagtccaccatgacctaccgggaga

SEQ ID NO: 21455 - DNA, 1098 bp, Oryza sativa
  Clone ID: TF_OsC1018_13
atgcctcaggtcctccccggggggtcccttttatatcgcagtcttgtccgagtaagactcttcccatccgtagacttcgtgaaggatttccttagtgtacgcgggaagtatccatatgcgcgtggtgaaaaaaatctctcaaaggccaaacgccaagtccctactcccatagtcccatggccgcgccgcaggccaaatttggcggcgcctgcaggtcaaaattttgagctggccgcctctcagaccacgaaaattcccactatcccgccaaatcaccgatccgcgcctcacgccacgtcaacgatccgctcctccccccgcgatccagatcctcaccgtccattccctcccccatccaacggcagccgcctccccactccatcctctcgtccccttttaaaaccccctcccctttcttccccaaatcccactccaatcaccaccacctcttctccaattccactcgcttttctctctctctcgtgcgtcgagccaccggaatcgtcgtcgtcggcggccatgtcggggcgcggcaagggaggcaaggggctcggcaagggcggcgccaagcgtcaccggaaggtgctccgcgacaacatccaggggatcaccaagccggcgatccggaggctggcaaggaggggcggcgtgaagcgcatctccgggctgatctacgaggagacccgcggcgtgctcaagatcttcctcgagaacgtcatccgcgacgccgtcacctacaccgagcacgcccgccgcaagaccgtcaccgccatggacgtcgtctacgcgctcaagcgccagggccgcaccctctacggcttcggcggctgattccttccttccttccttcctggtggcgtgcgggtggtggtggtggtgtaggagctagggtttcgatgggattcggggggaatttctgctttgtgttggcttctgtgtagcgactcttctgtttaaatgaattcgatgaatctgaactgaagatttggttcccctgtgattccgtcattttatatttctgtttcctgtgatgtgaatttgtgcgaagttcgtgaaactgcctttcggatgaaaaaaaaaaaaaaaaaatatgcggcc

SEQ ID NO: 21456 - DNA, 1015 bp, Oryza sativa
  Clone ID: TF_OsC1018_5
atgaggggactaggaaaccgtgcgcgcctaccggaaccacgaaattttcaatctctccccacaccgcaaaacgcgaaattttccacggcccccgcgcgcgggctccactccaccgaaaacccagccaaacgcgccagatccgcgcctcctccactcacacgcggatcgctccccgatccaacggcaggcgctgcccccccgcaccactcacgcggatcgctccccgatccgacggctgcccactcccctcccaactctatatatatccacccctcccaaaccaaccggcctccacatccaaatctcgccaccaaaaaaatccccaattccgccgtcgtcttcgtcgccgtcgccgcgaggatgtctgggcgcgggaagggagggaagggcctgggcaagggaggcgcgaagcgccaccggaaggtgctccgcgacaacatccaggggatcacgaagccggcgatccggaggctggcgaggaggggcggggtgaagcgcatctcggggctcatctacgaggagacccgcggggtgctcaagatcttcctcgagaacgtcatccgcgacgccgtcacctacaccgagcacgcccgccgcaagaccgtcaccgccatggacgtcgtctacgcgctcaagcgccagggccgcaccctctacggcttcggcggctaggctccccccaaatatttctctctcttcgtgtcgaggcgtcgcgtgttggttgccctgtgtagattgctgatttcaatgtagtacttagattctggcagtgaagaactgcaagtaaacttgtttgaaattcaccttgttgctattaatctaatgcaagtttttgcaattttttttggcggtcaattaaaaaaaaatcaattccaagtttgtcgatcatcttaggatgtcctcctagagaaaaagaagagaagaaaattgggagataaaaaaaaaaaaaaaaaaaaaaaaaaaaaaaaaaaaaaaaaaaaaaaaaaaaaagaaaaaaaaaaaaaaaaaagcggcc

SEQ ID NO: 21457 - DNA, 635 bp, Oryza sativa
  Clone ID: TF_LIB4371-007-R1-K1-B9
ctcgcgaatcccaccgcttccctttcctctcctctcctctccccgggaagaagacagcagcggcatccatggcgcccaaggcagagaagaagccggccgcgaagaatcccgcggaggaggagcccgcggcggagaaggccgagaaggcccccgcggggaagaagcccaaggcggagaagcgtctccccgccggcaaggccgagaagggcagcggcgaggggaggaaggcggggcggaagaaggcgaataagagcgtggagacctacaagatctacatcttcaaggagctcaagcaggtccaccccgatatcggcatctcctccaaggccatgtccatcatgaactccttcatcaacgacatcttcgagaagctcgccggggagtccgccaagctcgcccgctacaacaagaagcccaccatcacctcccgcgagatccagacctccgtccgcctcgtcctccccggcgagctcgccaagcacgccgtctccgagggcaccaaggccgtcaccaaattcacctccgcttatgcttcacccctgcatctatctatgtgctagttgcagagctatcgatgattggaaaatggatgctagatcgctagttaggcagtcagatgccagtgatctggaaca

SEQ ID NO: 21458 - DNA, 327 bp, Oryza sativa
  unsure (1)..(327): unsure at all n locations
  Clone ID: TF_2311071
cccgagcattcgaagcttgtagaagaagccctagnctcgcctcctcatnaccgatggcccgcaccaagcagacggcgaggaagtccaccggcggcaaggcgcntggnaagcagctggcgacgaaggcgcgcgcanagtcggccccngcaccgcggcgtgaagaagccccaccgcttccnccccggcaccntcgcnctccgggagatccgcaagtaccagaagagcaccnagctgctgatccgcaagctgccgttccagcgnctggtgcggtgagatcgcgcaggacttcaagaccgaccttcgcttccagagctccgccgtcgccgc

SEQ ID NO: 21459 - DNA, 513 bp, Oryza sativa
  Clone ID: TF_LIB4309-032-R1-K1-G12
gcttcccctccccgaaaagaagagagaagcgtccatggcgcccaaggcggataagaagccggccgagaagaagcccgcggaggaggagcccgcggcagacaaggccgagaaggcccccgcggcgaagaagcccaaggcggagaagcggctccccgccggctagggcgagaagggcagaggcgaggggaggagggcggtgcggatagatggggaagaagagcgtcgagacctacaagatctacatcttcaaggtgctcaagcaggttcaccccgacatcgggatgtcctccaaggccatgtgcatcatgaactccttcatcaacgacatcttcgagaagctcgccggggagtccgccaagctcgcccgctacaacaagaagcccaccatcacctgccgggagattcagacctgcgtgcgcctcatcctccccggcgagctcgccaagcacgccgtctcccagggcacgaaggccgacgccaagtttactcacgcttaggctgcctgccttcctc

SEQ ID NO: 21460 - DNA, 2209 bp, Oryza sativa
  Clone ID: TF_OsC1067_2
gtagcattcgaagcttgtagaagaagccctagcctctcctcctcatcaccgatggcccgcaccaagcagacggcgaggaagtccaccggcggcaaggcgccgaggaagcagctggcgacgaaggcggcgcgcaagtcggccccggccaccggcggcgtgaagaagccccaccgcttccgccccggcaccgtttttccaccggcggaaagccgcccagccatctggcaatcaggtcggcgagtcgacctcgccgccccctctcgatcgaggcccacttccggcgcggactgttcgcctttccacgccagtttggtcgctctcgatttcgatttcccccaaatccaccgcaagagaaagccaagtcgccgccgagaagcgaagaggagatggcccgtacgaagcagaccgcccgcaagtccaccggcggcaaggccccgaggaagcagctcgccaccaaggcggcgaggaagtctgctccgaccaccggcggcgtgaagaagccccaccgctacaggccggggacggtggcgctccgcgagatccgcaagtaccagaagagcacggagctcctgatccgcaagctccccttccagcgcctcgtccgcgagatcgcgcaggacttcaagaccgacctccgcttccagagccacgcggtgctcgccctccaggaggccgccgaggcctacctcgtcggtctcttcgaggacaccaacctctgcgccatccacgccaagcgcgtcaccatcatgcccaaggacatccagctcgcccgccgcatccgcggcgagcgcgcgtaagccgccgccttcgacgcggttgcgttgcgtagcgccgaagcgatctggggggatcaacgacgacgacgtgacgtggtcaacttgttgattcccctctcgcttccgcgttttagatctcgttttcattagcagctttgtaatagggtttggtcggttaattagtgtaaaaacagggttcggttaaagactcaaaatcaaatgttattgccgttctttggattttgcggttaagcaaaacagtgttgaagactattaaaattcgtttactgactaacaaggttcaacggcctggcgtggctcttcctcggggtgcccaccagcagcacgctgctgtacagggaggagttcgagcggatgaaggagatcgcgccggagaggttccggctggacttcgcggtgagccgggagcagacgaacgcggcgggggagaagatgtacatccagacgcggatggcggagtacaaggacgagctgtgggagctgctcaagaaggacaacacctacgtctacatgtgcggcctcaagggcatggagaaaggcatcgacgacatcatgatcgacctcgctgcaaaagacggcatcgactggcttgactacaagaagcagctgaagaagtcggagcaatggaatgtggaagtctactgatggatatatatatgttaataattaattaatccctttttatctcgattttcatgcatgcatgcgcaacctgcatacgccatcttgttgtactcgatctgatctcatctgatgagatgcatgtagatattatactgacgattcgtcgactataaagtggtttcccattttctgctgtattttgacaaaaaaaaaaaacaaaaaaacacctactcggcggttgtgcagagggggtgtgttagatcaggtagacctgtgttcgttccccctctcattatcatcaaatgttgttatccaaaaaaaaaaaaaaaaaaggcggccggccaaggacacccagctcgccccccgcatccgcggtaaacgcgcctgattaatttatcagttccttcttctcagctcgcttttcctagtaaattgcttagtagtagtgatgtacttgttgttgctgttgcttttttagttgctcttcttataaatgggaaatgttttaatcgggcttttcctttttgtcccgaaagcggttgcgttgagtagcgccgaagcgatctggggggatcaacgacgacgacgtgatgtggtcaacttgttgattcccctctggattccgcgttttagatctcgttttcattagcagctttgtaatagggtttggtcggttaattagtgtaaaaacagggttcggttaaagactcaaaatcaaatgttatcgccgctctttggattttgcgcctacccaaaacagtgttgaagactattaatattcgtttact

SEQ ID NO: 21461 - DNA, 964 bp, Oryza sativa
  Clone ID: TF_OsC631_7
cccacgcgttcgcgaatccccaccgcttccgtttcctctcctctccccgagaagaagagagcagcggcagccatggcgcccaaggcggagaagaagccggccgcgaagaagcccgcggaggaggagcccgcagcggagaaggccgagaaggcccccgcggggaagaagcccaaggcggagaagcgtctccccgccggcaaggccgagaagggcagcggcgaggggaagaaggcggggaggaagaaggcgaagaagagcgtcgagacctacaagatctacatcttcaaggtgctcaagcaggttcaccccgacatcggcatctcctccaaggccatgtccatcatgaactccttcatcaatgacatcttcgagaagctcgccggagagtccgccaagctcgcccgctacaacaagaagcccaccatcacctcccgggagatccagacctccgtccgcctcgtcctccccggcgagctcgccaagcacgccgtctctgagggcaccaaggccgtcactaaattcacctccgcttaggcttcacccctgcatctatctattgctattgctaatagttgtagtttgatctgtttgtgttagttttagtgctatcgatgattggaaaatggatgttagatcgttagcttggtagtcagatgtcagtgatctggaacagtagctctgattttaaaccatgtgaatgtgattcctgggtatgtgatgtttgaccgccctgtgcctgctggtcaacgaatgataactagatctaatttttgtggaactatttacatggttgctacttgcattctgttcaactgttgtaaattcctctgtcactcgttggagttttattctctgaagcatgtgtggaattgcctgggcatgcttttgggaaactatagtctgtagtcttatgttatgtttggttgccctgagcttgttggaattaatctatctaattttgcgc

SEQ ID NO: 21462 - DNA, 842 bp, Oryza sativa
  Clone ID: TF_OsC724_3
ccggcctttaggtcattgtctccggaagtcagaaagggggggaaaaggaactcgaagtcgccgccggatttgggatttggagagcgcgcgaggtaaaccaaagttctttttccgatggctcgtactaagcaaactgctcgcaagtcaactggaggaaaggctcccaggaagcaacttgccaccaaggctgctcgtaagtctgctcccacaactggaggagtgaagaagcctcaccgttaccgccctggaactgttgctcttcgtgaaatccgcaagtaccagaagagcactgagctgctcataaggaagcttccattccagaggcttgttagggagattgcccaggattttaagactgatcttcgtttccagagccatgcggtgcttgcccttcaggaagctgccgaggcgtacctggtgggtctcttcgaggacaccaacctgtgcgccatccatgccaagcgtgtgaccatcatgcccaaggacattcagctggctaggaggatccgtggtgagagggcttaggctttctcatctctgggaggggctctggtgtttcatctgtgactacttcctgcttttgctgctgaactcttatttggtgtcgtgaatggtgctaatactactcacatgtagtagtagattgttagtgaagtactctgtttctgtgttctagaactggatattttgctagtaagttgtctcgactgttgatttcatccatccatctgatggatgtgtatctagtagtttctcatctgaagtcctgaaatctgaaccttgaatttacctgtggaatggaacttagaaaaactgtgttaaataatcaaaaaaaaaaaaag

SEQ ID NO: 21463 - DNA, 554 bp, Oryza sativa
  Clone ID: TF_LIB4371-038-R1-N1-A3
gggacaaaaattgggggaaaaaacaaattacttcgggggcaatttcaaaaaaaccagggggtaccttgcaactaaaaatcaaagactccgacggggcagggcaggggtctaataattaacaaaaacggggaaaacatgacaaggccctaccaaccaagcaagaaccaaagggggggggatcgcctaaaccccccccccggggatccggcccccgagctggatgtccttgggcatgaaggggacccccttggcggggatggcacacagggggggggccccaaacagcccgacgagggacccctcgggggccccctgcagcgcggggacgggggaactctggaagcggagggcggtcttgaagccctgggcgatcccccggaccaggccctggaaggggagcttgcggataaacaactccgggctcttttgggacttggggatcccacggagcgcgacggggccggccctgaaacgggggggcttcttcaccccgccgggggccggggccaacttgcccccccccttggtcgccaactggttcctcggggccttcc

SEQ ID NO: 21464 - DNA, 1014 bp, Oryza sativa
  Clone ID: TF_8334787
gtcgtcgtcgtctccggcctccgcttcctcgccgacggaatcctagcttagccatggctggtaggggcaaggcgatcggctcgagcgccgccaagaaggccacgtcgcggagctccaaggccgggctccagttccccgtcggcaggatcgcccgcttcctcaaggccggcaagtacgccgagcgcgtcggcgccggcgcccccgtctacctcgccgtcgtcctggagtacctgaccaccgaggttcttgagctcgccgggaacgcggcgcgggacaacaagaagacgcggatcgggccgaggtacatccaagtaccgcgtgcgcaacgacgaggagctgaggggcctggtaggtgccccgtccatcgtgaagcgggtgcgtcgggccgagtatggtggcgcggttccgtgcgcatcaaggccttgtctaggtctcctagcgcgtcttgtagcgccctggctttgtatcaaacgcacgatggccgtgcctccccgggagtagggaattggccgctaagcgggcattgggctcccccggtgtgctgctccgcgccactgtgcgacgaagtatgagtagacgttcgtattcggtatcgccatccctacagactgactctggagtctccctttctatgttcgtgtgtggggtgccaggtgtggggtggttcctcccaggcgcgcgcgctgcattatgtcgatccagtgcggtagaccttgaagacatgtccaacgaagtctcttcggcgctctggccagaactgagaaaaccgctttgtctacgacgtaactttcggtcgtttcttatgatcctctatcgctgcggtctctcgtcggtgcttccggatcgcggctgtgcacccactcgacgccgacttcggcggaccactgactgagctccctatacctggtacgtaagcgcgtgtacagcggtgattgcacgtcggttctcactgcagcaatgcagcgtgtcttcgtgggggtagtttcttgaccgcgcgactgatagtgcatcgtt

SEQ ID NO: 21465 - DNA, 419 bp, Oryza sativa
  unsure (1)..(419): unsure at all n locations
  Clone ID: TF_3759981
ggcgcccaaggcgangaagaagccggccgcgaagaagcccgcggaggaggagcccgcgcaggagaaggccgagaagccnccgcgggaangaagcccaaggcgnagaagcgtctccccgccggcaagggcgagaagggcagcggcgaggggaagaaggcggggcggaagaaggggaagaagagcgtcgagacctacaagatctacatcttcaaggtgctcaagcaggttcaccccgacatcggcatctcctccaaggccatgtccatcatgaacttcttcatcaacgacatctttcgagaagctcgccggggagtccgccaagctcgcccgntacaacaagangcccaccatnaacttccggggagattcagacttccgttccgcttggttcttcccngcgagctttcaaagcacgccgt

SEQ ID NO: 21466 - DNA, 381 bp, Oryza sativa
  Clone ID: TF_uC-osroM202014h03b1
tcctaattcccccaaattttcgtctcccctttgggttccccgtgaagaagagagcggcatccatggcgcccaaggcggagaagaagccggcggcgaagaagcccgcagaggaggagcccgcggcggagaatgccgagaaggccccggcggggaagaagcccaaggcggacaagcgtctccccgccggcaaggcctagaagagcagcggcgaggggtagaaggctctgcggaagaaggcgaagaagagcgtcgtgacctacaagatctacatattcaaggcgctcatgcaggtccaccccgacatctggatatactccaaagccatgtccattatgaacttcttcatgaacgacatcttagagaagctcgccggggagttcg

SEQ ID NO: 21467 - DNA, 1045 bp, Oryza sativa
  Clone ID: TF_OsC1018_3
accgtatccttccccaaaatccccaatccccgagctgtttcacctccagcgagcgagcgcggcggccatgtcggggcgcggcaagggcggcaaggggctcggcaagggcggcgcgaagaggcatcgcaaggggctgcgcgacaacatccagggcatcaccaagccggccatccagaggctggcgaggaggggcggcgtgaagcgcatctccgggctgatctacgaggagacccgcggcgtgcttaagatcttggtcgcatcgcacccccgcgaatccccccccacaggccaacagcaaagcagaggcgaagggaagaagaagaagaagaagcggcggcggcggcggccatggcgtggcgtgcgaaccccgcccggcgcgactccaatcaccaccacctcttctccaattccactcgcttttctctctctctcgtgcgtcgagccaccggaatcgtcgtcgtcggcggccatgtcggggcgcggcaagggaggcaaggggctcggcaagggcggcgccaagcgtcaccggaaggtgctccgcgacaacatccaggggatcaccaagccggcgatccggaggctggcaaggaggggcggcgtgaagcgcatctccgggctgatctacgaggagacccgcggcgtgctcaagatcttcctcgagaacgtcatccgcgacgccgtcacctacaccgagcacgcccgccgcaagaccgtcaccgccatggacgtcgtctacgcgctcaagcgccagggccgcaccctctacggcttcggcggctgatcgatcttgcctccctccgccatctctcccatgtcgtctggccgtgcccacaagtcttgcggtcaagaaaaaaagtttgatggaaagccgtggaatccaccttgttcagttcgctgtttagtttttctagtgtttacctgaatcatgaaattgtgaagcaaatgatgtttgcaactgggatttgaattgaaacatgtttcagagccaaaaaaaaaaaaaaaaaagccggccgatgtgtgaaaaaaaaaaaaaaaacccgcggcc

SEQ ID NO: 21468 - DNA, 630 bp, Oryza sativa
  Clone ID: TF_OsC20534_1
tcttctttttttttttttttttttttttttttttttttttttttttttttttttttggaaaaaaaatttaacattttttaaatttatttttttgaacagacccaagcccagatcacagggttcaacgccccccccttagtttaaatcaacgggtttggatttttaacagacccccttcccgtccaatttattccagttaaacaagcaaagggggggccccccccctaggcctttttgggggatttcccgggggcctttttgggcgatttggcctttttgccgggggggggggccttttccgccgtttttttgggcaaaacccccgggttgttgttgggcagcccccctccgtgcgcgagggtcaccccggccagaagtttgccgagctctttgtttttcctgatccccagcaacacggggggggggatgatcctgttttttttggtgcccttggccgggttcccggggagctccagccccttggcggggaggtactcgaggacgggggcgaggtaaacgggggccccggtgccaatgcgttgggcgtagcggccctttttgaggatagcggccgatacggccgaggggaaactggagcccggccttgacggagcgcgaccccgctttttt

SEQ ID NO: 21469 - DNA, 4469 bp, Oryza sativa
  unsure (1)..(4469): unsure at all n locations
  Clone ID: TF_OsC1141_1
ccggccgggtatattaaagttgttgtggttaaaaagctcgtagttgaacaattccacacaaggtcttcttctacatctccacccaaattccaaatctctcggtgatcggagcggttagctgcggcgatgtcggggcgcggcaagggaggcaaggggctgggcaagggcggcgcgaagcgccaccgcaaggtgctccgcgacaacatccaggggatcaccaagccggcgatccggaggctggcgaggaggggcggcgtcaagcgcatctccgggctcatctacgaggagacccgcggcgtgctcaagatcttcctcgagaacgtcatccgcgacgccgtcacctacaccgagcacgcccgccgcaagaccgtcaccgccatggacgctcgtctacgcgctcaagcgccagggccgcaccctctacggcttcggaggctacacgagtacagattcgatggtgttgggcgtaacagcgctagcattattatggcgcgtgctccgggtgaggcgttggggctgccactccttgtgatctactcgcaggccggagaaaaaaaaaaaaaaaagccaaaaaagaaatcccaaaaaaaaaaaaaaaaaaaaaaaaaaaaaaaaaaaaaaaaaaaaaaaaaaaaaaaaaatcctccgccgggtggcgacccgccggcccggccgggatcacagaaaccataaacacacaggcatctgattagagaaatctaatggcttcttcttccttttccttcctgcttgttgctgctctgcttggattggcctcatggaaagccattgcctcagaccctagccctctccaagacttttgtgtcgctgatctgaattcgccagtgcgagtaaatggatttgtttgcaagaacccaatgaacgcgagtgccgacgacttcttcaaggcagccatgctcgataagcctagagacacaaacaataaggttgggtccaatgtcactttggtcaatgtcttgcagcttcctggtctcaatacccttggcatctcgatagcacgtcttgactttgcacccttgggtttgaacccaccacacacgcaccctcgtgcaaccgagatcttcacggtgcttgaaggaacactctacgttggctttgttacgtccaacccagataacaggctattgtccaaggtgctcaacaagggtgatgtgtttgtgttccctgaggggctcatccacttccagttcaatcctaacccacacaagccggcagttgccattgctgcactgagtagccaaaatcccggggttattactattgccaatgcggtgtttggatcgaacccacctatctcagatgatattttgatgaaggcgtttcaggtggataagaagatcatagatttgctccaagctcagttctagaagaacaactactgattgtcctgttggttgcaccattaaggacagtatactacatgcacctgatgctatgtaactatcatatatgatacgtagaataagtggggttttatgtgctgaaattgttatcatgcatgatatgctaaagcagtatgttattggacatggaaaaaaaaaaacagtggcgttcttttccctcgtaattaaaatgaaaagcaaacctcttgaagtccaagaaaaaaaaaaaaaaaaaaacagcaaaaaatttgcggccagnanacatnaaaaaatccttatcctcctgccaaatggagcgtgccgctgctgatcggagtggcgcggaggagggggagagcgaatggagggaggagctgcggcagcagcagtcgcaggtcgacgcactgcgggagaggctcgtggaggtcaaggtcgggatgaagtgctccgaggaggactcgaggaaggagctggatcacctctgccgcagggtgaagaccatcgccacgctgctggcctacctcaaatccaaggccaggatcatggcgataccgcacctcgcgcacacgtcctgcgggattaggcaccaggatggcgtggggtacgtcgacaggaacggggtgccactggctgattggtccaagggcggcgagtccgcttcctgcgagggtttagatgatgaaacgtcggcggatagtagtcgtgttgccgaacatggcgatgccaatgagggggatgtagatgtcgaagacattctgaagtcgatacatgtggtgaccgatgtcatggagacccttgtgaagagagtgattgttgctgaatcggaagccgctaacgagaaagagaaggtgaggatgggtctggaagagattaggaggaagaccatacaggttgagtccatgtcggccaaagttgaggaaatggagaaatttgcagtgggtacgaatggtatgctgaatgagatgaggcagagggttgaagacatggtgttggagaccactcgacaaaggcaacgtgcggctgaaaatgagcaggagcttagtcgtgtgaagcatgacttcgagtctctcagaacctatgtcggcactctcgttaatgtcagagaaactcttctttcatcagagaagcagtttgaaacaatggagaaactcttcgacaggctagttgcaagaaccaaccaacttgagagtgagaaagcacaaaaagaagccgaagtccagaaggtggtggaggagaatgtgaggctgcgtgcgatgattgataagaaggaagcgcagcttcaggcgatgagtgagcagtgcaagttcatggcgctgagccaagaagagctccagatagatgtggcgaaacaacggatggtgccaactgctggcgacctacgcgggcacgcggcgcagcgccccacccaagtcgtggacctcgtggtggtgaagggtagtaggcgacggcttcactactacccggccgggacttgtactgcgagccacacgccgcgcccgggcaaaacccacgcgaccccttcctcctccgcctcgacccgatccgatctgagccagagccaaccatggcggcgactagggtttggctctccgccctcctcctcgccttcctcctcgccgccgcccccgtcgtccaagttgccagagctcagtccgaggaagaagctgctacagctgaagttgttgatggggctgatctaggaatcgtcagtgatgatacacaagtttccagcgatgggcctctaagtccggctcctggtgtggagacagtatgtgtttttcccaaaaacgctggcaaaattgtgctagcaggtgaagaaactgaactactggttggcctgcaaaacgagggtgaatcaactttgaatgttgttgctatccattcaactctccatcttccttttgaccataagatgtatggacaaaaccttactgttcagaacttcttcaatgcatcagttcctgtctctgtacaagcaacctttccgtatacattcgccgtgagcaagttcttgcagcctggagcatatgatctagttggttacatagtgtatgagattgatcagaacccataccagaatgtcttttacaatggcactgtagaggttgttgaggctggaggtttactcagcgttgagtctgtgttccttattacccttggagttgcccttcttggtctcttcggattgtgggcatatggtcaagtacaacagctctcaaagaaaacaaagaaggcccccaaggtggaactgggaactggaactactgatgccaacatggatgagtggctggagggcactgcatttgcacagggaagcaaatccaagaagaagaaatagattggaggcccttgaactctagttaatcattttcaggatctagaatgagacagttgagggtagcccttcacaagtaacttttgcagacgatagatgagaaaatggaggtgttttaaaccgtagtttcgtggctgctgcacatgtttgttgacaccaaatttcgaccttgttgtgtacttttacatgaaagttttttcttgaaaaacacagttttgttcaaggtatatgctatggatgtgatctctgatcttatttgatctgtgacatgccgaataacataagttcgatctgagagatgctgaatcacataaatttttattagttgcaaaaaaaaaaaaaaaaaaacgtcccaactagctggatacttcctccgtcccaaaaaaaaaggcaaaccctgggttttcgtgtccaactttaacgatggacggtcaaacgttggacacggaaaccagggtttgtctttttttggacggagggagtacatatgacaagctgttacgcttgttcaatgatgccacttacgaattaccgtcactgcattgttgcaacaagaagagcagctccagatagatgtggcgaaacaacggatggtgccaactgctggcgagtccgttccaggtactctgtgctctgcaaacaaattgtttaccttaatgtaggtgtgatgtgttgggactgtaaacctgacatctttgtattcttgtaacttggaatttgtgtaaaaaaaaaaaccagggcacatttgtccg

SEQ ID NO: 21470 - DNA, 1367 bp, Oryza sativa
  Clone ID: TF_OsC12950_1
ctaagagctagtgaacttggtgacggccttagcaccctcggagacggcatgcttggcgagctcgccgaggaggacgaggcggacagaggtctggatctccctggaggtgatggtgggcttcttgttgtaccgggcgagcttggcggcctcaccgacaagcttctcaaacatgccgtcgatctcctcgtggtgggtgaccacgtcacgtcgctcgccagtctggcacgtccgcatcttatcaacctttggacctgccgcggatttctcagccatggcgggtgcatcgcctttgccggctgtagattccttgaccgcggccgtcgtgtcggtcttgccgggcgctgtagattcttttgccgcggtttctgtgtcggtcttgccggataccgtggattcctttgctgcggtctccgtgccggtcttgttagcagtggatttctttgttgcggcctccatgctggtcttgtgggatgcgggggattcctttgccgcaaccttcttgccggtcttgccagctgtggatttctttgtcaccgtagccgtgtcggccttggcaacgacagattccttacccgtcttatcggctggagatttcttagccaccgtggctgcgtcagccttggtaacggcgtattccttacccgtggcaggtgtgccagccttaccggctagggatttcttagccaccgtggccgcgtcggcctcagtgttggtcttgccggacatcgtgaattcctttgccgcagccttcttgccggtcttgccggcggtggattccttagccaccgtggccgcgtcgaccttggcaatggattccttacccgtggcaggcatgtcagccttggcagctggtgatttcttagtcaccgtgatcgcgtcggccttggcagcggcgtattccttacctgtggcagtggcagacgtgtctgccttaccagctggagatttcttagccaccgtggccgcgttggccttgccagcggcagattccttactcgtggtaggcgtgtcagccttggcggctggggatttcttagtcaccgtgaccgcgtcggcctttgcagcggcgtattccttatatgtggcagacgtgtctgccttaccagctggagatttcttagccaccgtgaccacgtcggtcttgccagcgacggattctttacccgtggtaggcgtgtcagccttactggctggagatttcttagccaccgccgacgcgtcggccgggtaatccttcactgccagggcgagcggcggccgtgctaccacggcgagggcgaccagcagcagcgacgcaacggcgaggccacgagccatcgttgttgtccgttggtcctgcgcctaaaagatccgtggcgagagagaca

SEQ ID NO: 21471 - DNA, 464 bp, Oryza sativa
  Clone ID: TF_jC-osflLIB3479022d02b1
gccatgttaggtcgctctcgatttcgatttactccaactccaccgaaagagatagccaagtcggctctgataagtgtagaggagatggccggttctaagcagaccgaccgtatgtacaccggcggtaaggcctctaggatgcagctcgctaccatagtagagaggaagtctgttacgaccaccggcggggtgaagaagccccaccgttacatgccggggacggtggcgctgcgagagattcgcaagtaccagatgagcacggagctcctgatccagaagctccgcttacagctcttggtgcgagagatcgcgcatgacttcaagaccgtccttctctttcagagccacgcggtgctcgtcctacaggaggccgtcaaggcctacctctttggtctgtttgaggacaccaacctatgtgtgatgcactccaagcgcgtcaccatcatgccgaatgacatctagct

SEQ ID NO: 21472 - DNA, 705 bp, Oryza sativa
  Clone ID: TF_OsC3999_2
actgaacacaaacaaatttcaattgagaaaccacatattgaagcacatgggatccagaagacaaagcgagacacttcatcttctcattagaactaccctagtgtcttgcaagctaaaatcgaaaacatccagttaaatgcctagtgatacgaactaatctcgaatcgaacaaactaagtactgcatatacagtgaccaatgaatggaaggacatgaagctaggagcgcgcctgcttcttgggggacttggcggctttgtccttggacgccttggccggcttgtcggccttctccgcggtcttcttcgggagcagcaccgggttgatgttcggcagcacgccgccgtgcgcgatggtgaccccggcgagcagcttcccgagctcctcgtcgttgcggatcgccagcagcacgtgcctcgggatgatccggttcttcttgttgtcccgcgccgcgttcccggcgagctccagcacctctgcggcgaggtactcgaggacggcggcgaggtagacgggggcgccggtgccgacgcgctgggcgtagcggcccttcttgaggtagcggccgatgcggccgacggggaactggagcccggccttgacggagcgcgacaccggcttcttcttcggcccgcccagcttccgccccaccgccttcttcgccgccttgccgccgacgccgacgtccatctccgggaaacgtgag

SEQ ID NO: 21473 - DNA, 2205 bp, Oryza sativa
  Clone ID: TF_OsC631_4
atggcggctctgacggaggacatcctcctccagatcttctcccgcgtgggcagcatcaaggacctcttcaagttcgccgtgacatgccggcggtggctgcgccgcttcaccgacccggccttcctccgcgggctgtgcctggacagcggcgagggccaccgcgcgcgcctcctcggcttcttcttccagcagacgagattctatcgctgcgaaaagatgatcaagatgcgggtgacgcagcagagctcggtctgtccgcccaccttcctgccggcgccgtggtcgccgctcggcctcacggatcgcaccctcacctccttcctcgccgccgacgacgacaccttcaactacgccgagcccctcgcagcgcgctgcggcattgtcctgatgcggcttgtcccccgcaccgcgctgatgatagcgtgcagccacctcctcggcgtctgcaacccgatcaccggggaatgccacgttctcccgcctctgaatctctccggcctccatcgctacttgaccagctacgccatcatcacgtccaccgacagcgacctagatgggaagcagccgccatcatcatcatcgtcagggcgctccacgttctcgcagctgtacctcgtcgtccaacacaagaaagactgtaacgagtacttctactcctactctgctgctacgtgcagctggagcgctcccaccatgtgcgtggacggccgccgcttctccctggtgggtgagagatccgccgtcgttcacaagggcgcggcgcactggctgtttattgatcgtgtatctagcgcaacccaagatgacatactgtacaaactcaccgcggcggtggacacctcagaaatctccttgacaaggctcccctttgtgctggaggctcaccgctcctctgcgataccattggcggtgccttacccagactattcccatatatgtcagccccgcgagaagtggtttaacttcaacaggggatcaatgctcgtgctgtacaggagcaacggcgtcttcatcctcgacctcgagaagaaggtgatggaaaagctattgtctagacatggaaaagctactgctgaaaggccttcgagttctgaaggatacatatggaaattgagtttgttggtgatcacagttacaggtctgactccatggcaaaaagcccaaaacctgaacccaaagaaagaacagcccaccaccacagcgctccaaaaacggggcccactgcacatttttctttgcaacgtcagcgatccgcacggaaacgcatcgcagccgtctaaccgaaaaggcaccggacgtcacacattcatccacgtcatcgatccgcgggacaagcctctccaccaatcagcgcccacttttacccactataaactcaccgcacccgtgtcctccttccacaccgcaatctcgcaacacatcagcacacaccgctccaaagcaaaacccacggacccgcttcccctccccgagaagaagagagcagcatccatggcgcccaaggcggagaagaagccggccgcgaagaagcccgcggaggaggagcccgcggcggagaaggccgagaaggccccggcggggaagaagcccaaggcggagaagcgtctccccgccggcaagggcgagaagggcagcggcgaggggaagaaggcggggcggaagaaggggaagaagagcgtcgagacctacaagatctacatcttcaaggtgctcaagcaggtccaccccgacatcggcatctcctccaaggccatgtccatcatgaactccttcatcaacgacatcttcgagaagctcgccgccgaggccgccaagctcgcccgctacaacaagaagcccaccatcacctcccgggagatccagaccgccgtccgcctcgtcctccccggcgagcttgccaagcacgccgtctccgagggcaccaaggccgtcaccaagttcacttcctcttaggctgcacctggtgctattgtgctagtagtaatattagtttgatctatttatctactagctgtagtgcatcaatgatgggaaatggatgttggggatttagtgactgtaagaagaattaggtggggctgcttttgaggaacttctgtttcatggattcgaaatacactagtaatgcttttgtatcatgtgaatatgtgatctctcctatgttgtctttcgttgccttgtgctgaacttgtgtttgttttaatt

SEQ ID NO: 21474 - DNA, 611 bp, Oryza sativa
  Clone ID: TF_OsC1021_2
cccactcgtccgaaggcgccggcggggaagaagcccaaggcggagaagcggctgccggcgtcgaaggcgtcgtccaaggagggcggcgccggcgacaagaaggggaggaagaaggcgaagaagagcgtcgagacctacaagatctacatcttcaaggtcctgaagcaggtgcacccggacatcggaatctcctccaaggccatgtcgatcatgaactccttcatcaacgacatcttcgagaagctcgcgcaggaggccgcccgcctcgcccgctacaacaagaagcccaccatcacctcccgcgagatccagacctccgtccgcctcgtcctccccggcgagctcgccaagcacgccgtctccgagggcaccaaggcggtcaccaagttcaccagcaactaggcctgtctctctagggtttcgatgccatgcttctctccttccctttcccctcgtgtgcagtgtgctaggtggcagtagttgcaaacttgtgcctgctttgtaaattgtgcttgatcataatgggcagcttggatttgaagtaatagacgtgtcgagtgttatttattggtcggtggctggttcgcatcttggggttttcttttctcttt

SEQ ID NO: 21475 - DNA, 341 bp, Oryza sativa
  unsure (1)..(341): unsure at all n locations
  Clone ID: TF_287205
cgcgcttccgattccaagcagcagcagccagtccagttcccaaatggcccgcacgnagcagacggcgaggaagtccaccggcggcaaggngccgaggaagcagctggcgacgaaggcggcgcgcaagtcggccccggcgaccggnggcgtgaagaagccccaccgcttcaggccgggaaccgtcgcgctccgggagatccgcaagtaccagaagagcacggagctgctcattcgcaagctgcgttccagcggctggtgcgggagntcgcgcangacttcaagaccgacctncgnttccagagctccgccgtngnccgngctgcaggaggccgccgaggcta

SEQ ID NO: 21476 - DNA, 497 bp, Oryza sativa
  Clone ID: TF_uC-osrocyp016d02b1
tcttaaagacaagattgctttcctagagcttctgtaactgaggattctgaatacaagcaaagatggcccgtacaaagcagaccgcccgtaagagtactggaggcaaggccccaaggaagcagctggccacgaaggctgctcgtaaatcggctcccacgactggtggagtcaagaagccccacagataccgcccaggaactgttgcccttcgtgagatcaggaagtatcagaagtcgactgagctgctcatccgcaagcttcctttccagaggcttgttagggagatcgctcaagatttcaagaccgatcttcgcttccagagccacgcagtccttgcccttcaagaagccttagaggcatacctcgtcggtctctttgaagacacttacttgtgcgcaatccatgccaagcgggttacgattatgccccaagacatccagctggccaggcgcattcgtggcgagcgtgcttagatagttgagcaagattttttttaa

SEQ ID NO: 21477 - DNA, 806 bp, Oryza sativa
  unsure (1)..(806): unsure at all n locations
  Clone ID: TF_OsC631_5
ccggccgggttcggaaccgcaaatcgttgcgatccacacacagcaaaagaaccaccaccgtttccccttcccgagaagaagagagcagcatccatggcgcccaaggcggagaagaagccggccgcgaagaagcccgcggaggaggagcccgcggcggagaaggccgagaaggccccggccgggaagaagcccaaggcggagaagcggctccccgccggcaagggcgagaagggctccggcgaggggaagaaggaccgcgctgggaggaagaaggcgaagaagagcgtcgagacctacaagatctacatcttcaaggtgctcaagcaggtccaccccgacatcggcatctcctccaaggccatgtccatcatgaactccttcatcaacgacatcttcgagaagctcgccgccgaggccgccaagctcgcccgctacaacaagaagcccaccatcacctcccgcgagatccagacctccgtccgcctcgtcctccccggcgagcttgccaagcacgccgtctccgagggcaccaaggctgtgaccaagttcacctccgcttaggctcataggcccctttctcgtcttgctgctaatggtagttgtggtaggttggaattttggatggtatggtactgtgctgtagttattctggcttttgactatcttgggttcatgtaagaaatatcctggtggatttaggacaatattgttatctggatctggtaaagtagtaattatgatgatgatggctttaaaaaaaaaaaacccgcggcnnnnnnnnnnnnnnnnnnnnnnnnnnnnnnnnn

SEQ ID NO: 21478 - DNA, 574 bp, Oryza sativa
  unsure (1)..(574): unsure at all n locations
  Clone ID: TF_LIB4831-018-R1-N1-F7
acgccgcaatctcgcgaatcccaccgcttccgtttcctctcctctccccgagaagaagagagcagcggcagccatggcgcccaaggcggagaagaagccggccgcgaagaagcccgcggaggaggagcccgcagcggagaaggccgagaaggcccccgcggggaagaggcccaaggcggagaagcgtctccccgccggcaaggccgagaagggcagcggcgaggggaagaaggcggggaggaagaaggcgaagaagagcgtcgagacctacaagatctacatcttcaaggtgctcaagcaggttcaccccgacatcggcatctcctccaaggccatgtccatcatgaactccttcatcaacgacatcttcgagaagctcgccggggagtccgccaagctcgcccgctacaacaagaagcccaccatcacctcccgcgagatccagacctccgtccgcctcgtcctccccggngagctcgccaagcacgccgtctccgagggcaccaaggccgtcacccaattcacctccgtttaggcttcacccctgcatctatctatgtgttaactttagtgc

SEQ ID NO: 21479 - DNA, 701 bp, Oryza sativa
  unsure (1)..(701): unsure at all n locations
  Clone ID: TF_23513677
cgaaaaccgaaaaaaaattatgatcttttagaggtattcccattcgtgaccatgaccatgcccatcatggaattaatgtacaacccgaaaacgcggagaaatataaaaaagcaacccgttgttgaccctagaccgtgaccccaatattcatgaacccaacgtgccgaccgaaaaaaatcagaaaacgcgacaaaatatcaaccgccaatttacaactcttgcgacgcgttcttgccacccttgccgccagtcttcttggggaggagattctgatgaatgttgggaaggacaccaccctgggcgatggtgacgtggccgagaagcttgttcaactcctcatcgttgcggatggcgagctggaggtgacgagggatgatacgggtcttcttgttgtcgcgggcagcgttgccagccaactcgagaatctcggcagcgaggtactcgagaacggcagcgaggtagacgggagcaccagcaccgacacgctgagcatagttgcccttgcggagaagacggtggacacggccgacggggaaagcgagaccggccttagaagagcgagatngggcgttcttgccgctgctggccttgccaccggacttgccgccgccagtcattttgaatgagttctcgggtgggaacacgtggggaaaatggatgtcgttgtgccggaggcgaaagactccctcgtgccgaattct

SEQ ID NO: 21480 - DNA, 513 bp, Oryza sativa
  unsure (1)..(513): unsure at all n locations
  Clone ID: TF_rsiceg_9458.y1.abd
cgggctgcaggaattcggacgaggacacagcaaaagaaccaccaccgtttcccttcccgagaagaagagagcagcatcagtggggcccaaggcggagaagaagccggcggcgaagaagcccgcggaggaggagcccgcggcggagaaggccgagaaggccccggccggtgaagaagcccaaggctggagaagcggctccccgccgtgcaagggcgagaagggctccggncgaggggggagaaggaccgcgccgggaggaagaaggcgaagaagagcgtcgagacctacaagatctacatcttcaaggtgctcaagcaggtccaccccgacatcggcatctcctccaaggccatgtccatcatgaactccttcatcaacgacatcttcgagaagctcgccgccgaggccgccaagctcgcccgctacaacaagaagcccaccatcacctcccgcgagatccagacctccgtccgcctcgtcctccccggcgagctcgccaagcacgccgtctcc

SEQ ID NO: 21481 - DNA, 562 bp, Oryza sativa
  unsure (1)..(562): unsure at all n locations
  Clone ID: TF_8954983
attcggcccgagccgcggggaagaaccaagcggagaacgtctccccgccggcaangccgaaaaaggcacggcgaagggangaagcggggcggaanaaagcgaaaaacactccagacctacaanatctacatcttcaaggtgctcaagcaggtccaccccgatntcggcatctcctccaaggccatgtccatcatgaactccttcatcaacgacatcttcnagaagctcgccggggantccgccaagctcgcccgctacaacaagaagcccaccatcacctcccgcgagatccanacctccgtccgcctcgtcctccccggcgagctcgccaagcacgccgtctccnanggcaccaangccgtccccaaattcacctccgcttaagcttcacccctgcatctatctatgttttanttttaatgctatcnatnattggaaaatggatgtttnatcgttaagtttggtatcanatgtcantgatctggaacagtactctgattttaaaccatgtnaatgtnattcctgggttttttnatttttgacccccttgtntctgctggtc

SEQ ID NO: 21482 - DNA, 725 bp, Oryza sativa
  unsure (1)..(725): unsure at all n locations
  Clone ID: TF_OsC631_6
ggaaccgcaaatctntgcgctccacacacagcaaaagaaccaccaccgtttccccttcccgagaagaagagagcagcatccatggcgcccaaggcggagaaggagccggccgcgaagaagcccgcggaggaggagcccgcggcggagaaggcccagaaggccccggcggggaagaagcccaaggcggagaagcggctccccgcggggaagggcgagaagggcggcgccggcgaggggaagaaggccgggaggaagaaggggaagaagagcgtggagacctacaagatctacatcttcaaggttctcaagcaggtccaccccgacatcggcatctcctccaaggccatgtccatcatgaactccttcatcaacgacatcttcgagaagctcgccgccgaggccgccaagctcgcccgctacaacaagaagcccaccatcacctcccgcgagatccagacctccgtccgcctcgtcctccccggcgagctcgccaagcacgccgtctccgagggcaccaaggccgtcaccaagttcacctccgcttaggcttttcctctgtcctcctgtctcgtcttgtcgctgctaatgctagttgtagttgtggtagtttgcagatttggatagtttggtactgtggtgtatttaccctggctattgactatcttggtggataaggaacactatcattgttattatggagaaatagtagttatgctactttaatc

SEQ ID NO: 21483 - DNA, 683 bp, Oryza sativa
  Clone ID: TF_OsC631_8
cggacacacacccagcgaaatccaagaagagagaagcagccatccatggcgcccaaggcggagaagaagccggcggcgaagaagcccgcggaggaggagcccgcggcggagaaggccccggcggcggggaagaagcccaaggcggagaagcggctccccgcggggaagggcgagaagggcggcgccggcgaggggaagaaggccgggaggaagaaggggaagaagagcgtggagacctacaagatctacatcttcaaggttctcaagcaggtccaccccgacatcggcatctcctccaaggccatgtccatcatgaactccttcatcaacgacatcttcgagaagctcgccgccgaggccgccaagctcgcccgctacaacaagaagcccaccatcacctcccgcgagatccagacctccgtccgcctcgtcctccccggcgagctcgccaagcacgccgtctccgagggcaccaaggccgtcaccaagttcacctccgcttaggcttttcctctgtcctcctgtctcgtcttgtcgctgctaatgctagttgtagttgtggtagtttgcagatttggatagtttggtactgtggtgtatttaccctggctattgactatcttggtggataaggaacactatcattggtattatggagaaaaagtagaaatgctactttaatc

SEQ ID NO: 21484 - DNA, 246 bp, Oryza sativa
  Clone ID: TF_LIB3432-001-P1-K1-F5
acgcccacgcttccggaggaacggcactcgcgagaggagagagatggccgaaaccatgcaaacaggtcgtttgtccacaggactaatggctcccaggaagcaacttgccaccaaggttgctagcaagactgttcccaccattgaaggagttaccaagcccaaccgttaccgccctggaactgtactcctccttgagatacgcaagctccataagagtacttagctttggataaggaacatgacttt

SEQ ID NO: 21485 - DNA, 1569 bp, Oryza sativa
  Clone ID: TF_OsC631_1
gcacgagggactcacgcacagattcttccccggccacggcaccgatcaagcacgacccccgatccccaaaccagaaacacactcgcctcgcctcctttcgctcgtttcgtccaacaccaccacccaccaccaccgatctcgatggcgcccaaggccgagaagaagcccgcggagaagaagccggcggaggagaaggccggcgagaaggcgcccgcgggccgggaagaagcccaaggccgagaagcggcctgccggcgtccaagggggagaagggcggcgagggcaagaaggagcgcggcaggaagaaggccgaagaagagcgtcgagacctatcaagatatacatccttccaaggtgctcaagcaggtgcacccggacatcgggatctcctccaaggccatgtcaatcatgaactcgttcatcaacgacatcttcgagaagctcgccggcgagcgccgccaagctcgccaggtacaacaagaagcccaccatcacctccagggagatcccagacctccgtccgcctcgtcctccccggcgagctcgccaagcacgccgtctccgagggcaccaaggccgtcaccaagttgaccagctcttaggcgctctagtgtagtaggtgtttggtgattttctcttcgtttttcgtctgtagcgagtccatggcaagcggtggttagttgccctggatcgatctctgatttctttctcttgtgtctagtgttcctgtctagtgcttgctgattactgtaagaatctcttggttgtgcccgttgagttctgatcttaaaattaatggtgatggttgcaacctctggttgctaaattgttactatcaaaaaaaaaaaaaaaaaaaaattgggaaaccatagtctgtagtcttatgttagggttggctaatacgttggcttaaggttgggcgaattacactatctggaattgtatcaactaaaccggcacaaaacataatagaaatggagcacaatcccccttttccaggcctcgcctcacagtagagccccccccccctcgccccttccccactttgtggctgcctccctggggcatcgagcccccctgctacgcgcctttgcacggtgatcggcaggcctttggccccgcctcactcatactctccccccctatgtcagccctgcggggaggcgctgtactccgcccgtgcagcagatggcgtgcctcacagtggcgagtgcgtcggcatccgcctcccccggtgctgggtgtcggtaaagggcgtggtctgcgcgcggcccctctgctgggttttgccgagcaggacggccgtcgcctcgctgttggtctccgggcagtgcggtgggcgccagctccgcggtctttgtggtgggtctacaggataattacagatgttatgcagtgggaaaatatatgttctagaataagcaagtttaagttaaacaacagcatattacatggatcatatgcaaactgtgcaaactggcgagtgatatatcttgttctgtagcacggcattgtcattttgatatggtttgacctttactggtttccactgtaacatcccttcactgg

SEQ ID NO: 21486 - DNA, 625 bp, Oryza sativa
  Clone ID: TF_OsC631_11
gcatctcctccaaggccatgtccatcatgaactccttcatcaacgacatcttcgagaagctcgccggggagtccgccaagctcgcccgctacaacaagaagcccaccatcacctcccgcgagatccagacctccgtccgcctcgtcctccccggcgagctcgccaagcacgccgtctccgagggcaccaagtccgtcaccaaattcacctccgcttaggcttcacccctgcatctatctatgtgttagttttagtgctatcgatgattggaaaatggatgttagatcgttagtttggtagtcagatgtcagtgatctggaacagtagctctgattttaaaccatgtgaatgtgattcctgggtatgtgatgtttgaccgccttgtgtctgctggtcaacgagtgataactagatctaatttttgtggaactatttacatggttgctacttgcattctgttcaactgttgtaaattcctctgtctctcgttggagttttattctctggagcatgtgtggaattgcctgggcatgcttttgggaaactatagtctgtagtcctatgttatgtttggttaattggttgccctgagcttgttggaattaatctatgtataattttgtgc

SEQ ID NO: 21487 - DNA, 464 bp, Oryza sativa
  Clone ID: TF_uC-osflM202054d03b1
gcgtctgtttggtcggtctggatttcgatttaccccaaatccaccgcaggagccaagtcgccgtcagtatgcgaagtggagatggcccgtacgaagcagaccgcccgcaagtccacctgcggcaaggtcccgaggaagctgctcgccaccaaggcggcgtggaagtctgctccgaccaccggctggtgtgtagaagtcccaccgctacaggccggggtcggtggttctccgctagatccgcatgtactcagaagagcacggagctgctgatccgcaagctgcctttcgagcgcctggtacgcgagatcgctcaggactgtaagaccgacctacgatttcagagccacgcggtgcttcgcctacatgagggccgcctggcctacctcgtcggtctcttggaggacaccaacctatgtgccatgcacgccaagcgcgtcatcatcatgcccaaggacatgcagctc

SEQ ID NO: 21488 - DNA, 1251 bp, Oryza sativa
  Clone ID: TF_OsC1021_1
atgccgcccgaggccgagaacaagccggcggaggagaaggccccagccggcggggacgagtgcgccgcgagggcggctgccggcagggaacccgccgcggagagaggcgtggcggccggccgtctatggtgtcgggagaggagggcggcggcggcgacaagaaggggaggaagtaggcgaagaatagcgtcgagacctacaagatctgcatatttgaggtcctgaggcaggtgcaccctcacatcggtatctcctgcaaggccatgtcgatcatgaactccttcatcaatgacatcttcgagaagctcgcgcaggaggccgcccgcctccaccgatacaacaagaagcccaacgtcaccccccgtgagaaccagacctccgttcgcctggtcctccgcggtgggctcgccaagcatgctgtctccgagggcaccaaggcagtcaccaagtttaccgagcaagaaggcctgtctctctaggtggaagattacattttgtggcaaacttccctttcccctacgtctgcatgagtgcttaggtcgcagtagctccatacgttgtccctaactggtgcagtttgcttgattttaatgggcactttgtacttgaagtaatctggctcagttccaacatagacctatgagcacttctcctgtcctgaatgcgtaattttgtgacttttgttgagcccagtattggtttgcgaacaacattgtttgttttttttttaagatccaaagaaagctttcaaacaggaaaaatagtgttggaaggaaaggttgaaaggatgaggccgggttggaaggtcatatgtgggtggaatgctgcatgccccatatgccactcaccgaggtactatccctctccccgccaactactctccgtagtcgagcgcagtcgagttccagacggcgaaggttggcggcccagaccttagcgacgacagcagctggcggccagacggcggcggaggtcgcgcggccccctgattccacgccgccggccgaatccggcgaggaaggaggcgtaggagtccacacgggggaagaaggcaaagcggctgccgccggagagggatccgaccccttcttccccatcatcgctgctccctcgttgccgtcgccaacacagcctcccttgctcctgcctcgtcatcgcggagctctcttggtgacggaggaaatcggacggcgacgacggtgcaggtgggaggcggcgacagcgcgggacggcgatggcgcggataggtaa

SEQ ID NO: 21489 - DNA, 318 bp, Oryza sativa
  Clone ID: TF_LIB4833-031-R1-N1-C8
gccgggactgttcgccttgcacgccagtttggtcgctctcgatttcgatttcccccaaatccaccgcaagagccaagtcgccgccgagaagcgaaggggagatggcccgtacgaagcagaccgcccgcaagtccaccggcggcaaggccccgaggaagcagctcgccaccaaggcggcgaggaagtctgctccgaccaccggcggcgtgaagaagccccaccgctacaggccggggacggtggcgctccgcgagatccgcaagtaccagaagagcacggagctcctgatccgcaagctccccttccagcgcctcgtcc

SEQ ID NO: 21490 - DNA, 355 bp, Oryza sativa
  Clone ID: TF_LIB3431-006-P1-K1-G6
ctcctcaccaactcaaagtctcttcctcacgaccggcggagagcggcggggtttcttatgtctgggagaggcaacgtcctctaggttctcgataatggcggctcgaataggcacaggaaggtgctgctcgacaacatccaggggatcacgaagcctgcgatccggaggctggccaggaggggcggcgtgaagcgcatcttcgcgctgatctacgaagagacccgcggcgtgctcaagatctttctcgagaacgtcatacgcgacgccgtcacctacacggagcacgcccgccgtaagatcgtcaccgccatggacgtcgcctactccttcaacgccaggccgtactctttacgga

SEQ ID NO: 21491 - DNA, 381 bp, Oryza sativa
  unsure (1)..(381): unsure at all n locations
  Clone ID: TF_2442431
cgacgtgcnananatntttcgtctcccctttcccttccccgagaagaagagagcggcatccatggcgcccaaggcggagaagaagccggcggcanagaagcccgcggaggaggagcccgcggcgnagaaggccgagaaggccctggcggggaagaagcccaaggcggagaagcgtctncncgccggcaaggccgagaagagcagcggcgaggggaagaaggcggggcggaagaaggcgaagaagagcgttgagacctacaagatctacatcttcaaggtgctcaagcaggtccacnccganatcggcatcttnctccaaggccatgtccatcatgaactccttnatcaaacgaaatctttcgagaagttcnccggggagtt

SEQ ID NO: 21492 - DNA, 899 bp, Oryza sativa
  Clone ID: TF_OsC1067_5
tcaaatccaaagaaatcactcgccgccgccgcctcgccttctccgccgcgccaagctctcctctcctcctcctcgcagacccgcacgaagcagacggcgtgcaagtcagggactcgaggaagcagctggcgaccaaggcaacgtgcaagtcagctccggccaccggcggcgtgaagaagccgcaccgcttcaggccaggcaccgtcgcgctccgtgagatccgcaagtaccagaagagcacggagctgctcatccgcaagctccccttccagcgcctcgtccgcgagatcgcccaggacttcaagaccgacctccgcttccagagctccgccgtcgccgcgctgcaggaggccgccgaggcgtacctcgtcgggctgttcgaggacaccaacctgtgcgccatccacgccaagcgcgtcaccatcatgcccaaggacgcggcgcgcaagtcggccccggccaccggcggcgtgaagaagccccaccgcttcaggcccggcaccgtcgcgctccgtgagatccgcaagtaccagaagagcacggagctgctcatccgcaagctccccttccagcgcctcgtccgcgagatcgcccaggacttcaagaccgacctccgcttccagagctccgccgtcgccgcgctgcaggaggccgccgaggcgtacctcgtcgggctgttcgaggacaccaacctgtgtgccatccacgccaagcgcgtcaccatcatgcccaaggacatccagctcgcccgccggatccgcggcgagcgcgcctgattaatttattagtcgcttcatctgtgatagctctaggaccagaaatgcttagtagtagtgatgtaatggcttgttgctgatgctgtcaaatgttgctctgattataaatgggaaatctttctg

SEQ ID NO: 21493 - DNA, 592 bp, Oryza sativa
  Clone ID: TF_jC-osflLIB3477P002f05a1
attcggctcgaggcaatggcacgtaccaagcaaaccgctcgccttcccacttaggaaaggctccgaggaagcaattggcaaccaaagccgctcgcaagtcagccccggcgaccggcggagtgaagaagccccaccgcttcaggccaggaacggtggctctgagggagattcgaaagtaccagaagagcaccgaacttctgatccgaaaactcccattccagaggctcgtcagagaaatcgctcaggatttcaaaaccgatctccgctttcagagcagcgccgtttcggctcttcaggaagccgcggaggcttatctcgttggactctttgaggacactaacctctgcgctattcacgctaagcgagttaccattatgcccaaggacattcaactcgctcgcagaatcagaggcgagagagcttaagtttagggtttcgtgtcatttgacattaaaattaggttactgcttattgtaattcgtgttttcttcaaatgcctctttattgtaagattcatcttatttcatcaggtatattcccatatggatctgcacaactgagtttatgttgaaaaacgagataattctctaat

SEQ ID NO: 21494 - DNA, 942 bp, Oryza sativa
  Clone ID: TF_OsC200302_1
gcgatggagctccttctccccaccgccgccgcctccgcgccgccgcccccgcccgcgttccccgccgacccgcacctcgtcgaccgcgcagcccggttctccgcgttcgcctccccttcgccgccctccccgccgcctcctcctccccctcccccttcctcctcctccaagcgcaagcccgaccccgcctccaaggggaaggcggctgcgaagaaggggaagacggcggcgagcggcgaggacggtggcgacggcggcgaggacgagaagccggcgtacgtgcacgtgagggcgagaagagggcaagccaccgacagccacagcctcgccgagcgggcgagacgcgagaagatcaatgcgaggatggagcttctcaaggagctggtccccggatgcactgtttctgttcggtccaaaggcacactaggagtccaacaaagagtaatgccaagcgttggtgtgcagcagcagcagcatgtggtagctccattctttatatccaaaactgaggtatcaggaacagcactggtactggatgagatcatcaatcatgtccaatctcttcaaaggcaagttgagtacttgtcaatgaggctcgcagctgtaaatccgagggtcgactttggtgggctagacaacttcttgactacggagtgtggaaggataacaggcttgaactacaagaatggaatggatttggagcaggtcacctggccagacatgggcgtccatggagcaaggaatctcatgcaactacaacagcagttctggcatggtgatttagcacacccgctccagccgccttcacagtgggaaaagcggacggataccaatccccctgtctttagcaattcaagttcctccctcttcggctatgatctagcaagctctgccttgattggaccacaacttttgtctctttcgttgttccagagtgtttag

SEQ ID NO: 21495 - DNA, 606 bp, Oryza sativa
  Clone ID: TF_OsC149298_2
atggctgagggagaagggcagtgcaagggtggaagtgggaaggggaaaagagaggaagctattatttgtatgattgtatctacatggacaaaaaaaaggaaatggggcatcgctgtcaggctggttcctctctacttccttgagagcctcttccactgccttttccacttcacaagccgcaatctgtggtctcgacgttcatctccgtccacagcctgttcccggacatgctcgaccggatcccgcgcgccttgacgctcatgcccttgagccgccggagcgcggcgatcatggagtcgatcgacgacgacggctcgtcgacctcgaactgcaccgtgacgcacggctgctgctcgtcgtggcccatgatctgggccttcagctcctcgttcctcctctgcagctggtccctcgcgaccttcagctcgtggatgtagatcgccgccgactgcacgatcgagttcttgtcccccttggagcgagaggagaccatggcgtagaggtcggcgtagctctggctgagcttctcgcggcgctggcgctcgcgcatcatgtggcggaaaccgcggctgctctccacgtcggcgccctgcccgcgccgccgcc

SEQ ID NO: 21496 - DNA, 942 bp, Oryza sativa
  Clone ID: TF_OsC359_6144
ctaacgactattgtaccagcaatattgaggatcaacgtgcgtgtgcacgaccgccgtcgagtaacgcgactccatcatcagcctctgcctcttgctcctgccgccgccgccgtacaccgtctccggcaacgccaccttggccagcgcctgcctcacggcctccttgagaggcctagcctccgccgcagcatcctcctcctcctcctcctccctgcagagcacgaaggcgtgccgcgtccggccgccgaggcagctcatgtcggcgctcagcggccgcagccggaggcggcggaacgtggcggcgatgtcggcgaggaggcccggccggtcgtcgcagctgacggtggcgcggacgtaggtgcgcgcggccgcggtgtgctcgccgccggcgtagcattggacggtcacctcgttggcctccggtgggatggtcgccgccgtcgacggcgtggtggcctcggtggctctcgtcttgaggtgcttcacttggttcaccacgctggctagcaaggtggccttgtccatctcttggaacatttcctctgagtctatctctctcatctgattcctgcgtttttcctgtggtccaatcaaacggcaattcctgtgttttgtaatcctctgttttacaattgtattcctgtcagaatcctgcttagcatcagggagtatcctcctcagtgtagccaggtgagcattaatcctctcccgccgccgcctctcagcctcgctgtggatcgtcatcgccgtcgcctgagccgccgcgctcctccccgacgacgatgacggccgcggcggcggcggctccggcgccaggccgccctgccgccgtggcagcacaaccgtgcctctgtacactgaagaaagatcatcatagccaccgtggtgcagatgctgctgctgcttcccttcttgccaaatctgctgctggcatgcagccat

SEQ ID NO: 21497 - DNA, 1219 bp, Oryza sativa
  Clone ID: TF_OsC281849_1
gtggatccccgggctgcagggcctaaagcgagacaattaatttaataagcgccccccaccaccagccatggagcaccaccacctcctgctgcaactctcgccgccaccgccgccgccgccgctgccggcggcgcacctcatgatgagcccgagcttcttcgacgccggcgtgttcgccgatgtcggcggcgactggatggaggacctcatgcatctcggcgagctgttcggcgtcggcgtcggcggcgacgatgatgataatggcggtgtcgacggcggcgtgggcggcggtgatgatcggatgcaagagtggcagaataattgcgagggcgccggctcgccggaccaccagcctagctgcggtgatggggatggcgatggcgatggcgacgtgagccctcgtgatggggagctcggcgacggcgacggcgacaactcggcgacgaggaagaggcgggaccggtcgaagacgatcgtgtcggagcggaagcggagggtccggatgaaggagaagctctacgagctccgagctctcgtccccaacatcactaaggtacgtactcagtgcttgattgctcgcgtcggcgtcgccatggcggcgccgccatgcgccattgccaacacaagcttaatgattgcttggcagatggacaaggcgtcgatcatcgccgacgcggtggtgtacgtcaaggacctgcaggcgcacgccaggaagctcaaggaggaggtcgccgcgctcgaggaggcgcgcccgatcaggccgcctccgccgtccgccgccgcgcaacggccgcagagacagccacgccgcgtggcggcggcggctgcccagctggcgagggccgcggacgccgccgccgtgacgacagcggcggcggcgccgcacggcgcgagggtggcgcacgtcggcgcggcgcaggtcggggaggggcggttcttcgtgacggtggagtgcgagccggcggcggccgcggcgagaggaggaggaggaggcgtggcggcgccggtctgcgccgccgtggagtcgctgtcgtgcttcaccgtggagagctccaccgtcgggtgctcgccggaccgcgtcgtggcaactctcaccctcaaggttagtgaagcagaggaggatgtgtcggcgatcagcgagtgcacggtgaagctctgggtgatggcggctcttctcaaggaggggttccggccgcaaccgacggtccagatctcctga

SEQ ID NO: 21498 - DNA, 542 bp, Oryza sativa
  Clone ID: TF_OsC133207_2
gcgggaggagcaagatcaacgagaagatgaaggcattgagagcctgataccgaattccaacaaggtgatccgtcgcaaaaaggcgacgtttaattttaacgttcatgaactgggattctgttgggtttgcgctggaaatttatcagtgtttgtgtgctggttttgtgggttgcagactgacaaggcatccatgcttgacgaagccatcgagtacctgaagcaactgcagctccaagtgcaggtcagcagatagatcatagatgtctggatgatgctaaaaattgctgatgcattgagtttggtctcagattggtagaaatgtggttgtaggattgcagtgagtgcatcctgtcttacagattattcttccaatctatgtcgtgattagggtgcgccgtagatgctctagtgaagaagaatccttatactttcttgttcttgcaggattttagttgcgatgtgatatgttcatgcaagatgttagaagggtccactatgtacatagacaacagtacttgatcaatgccaaactcgttctgtcc

SEQ ID NO: 21499 - DNA, 2271 bp, Oryza sativa
  Clone ID: TF_OsC56584_1
gggtgcggtgccaaactgatcagatcacacacttcgcacgacggtcaaacagagcccttgcttgctttgcttgtgtcttcaacttcagagaccccctcctaccctcaaaaaatttcccctttcttttcctccgtttcttgcagcgacaagagaaatactaatactcctcctcctactactgctactgtgcaaggggaaggacacgacgacgaattggagagcggcgtcctctctgatccttttttttcctttattgcatctctctctctctctctctctcgccatttttcttctaggttggtctctggatcaggccattgagggggaaagaaaaggtgcgggttttggggggaggttgttcttgcgggaggccgttgatttcgccgtgtgatcggagagtttggtattgagggagtgaaaaggagatgaatgagaaggacgccactgatttggaggagaggagtgaggccagtgagcacggccaagctctgagtttccatggtggtgccatgttcttgcaagaggctcagattgcttctcctgcagctgcaaataatgcattgacctccatggcgaatcctttccctatccctcctgggttgtggaattccaccttcacacaacatgggtcggccggcgcgccgccaccgtttgtggctactcccgggtttgtagattccacggcggggtttccttgctacaatggaggcaatcttggagccatgatcaatcaccctttccctggtatccaccagcctttgggtgatttccaaaacggcgtcgagccatgtagggagattgaggatattgagattgaaggatccaagaatgtgtcacaaactggtgagaagcagcaaggggatggtgagacaacgcatgccgtcgattcctcctccaaggagctaagcatgccagggcgcaatggtggcgctggccatgatgaggggactagggtgtcttgttccaagaagaggaaaagatcaggacaggatggtggggtgaagcatgcagaaggtggtgagcaattagcaactgtcggttcagcgcagaagaatgaggatgatgaaaagggtgaaccaaagaggtcttctgtggcgtccgggaaatccagtgggaagcaaataaaggataatgcaggttcaccaaaggaagactatatacatgttaggagggagaagatcagtgaaaggatgaaatatcttcaggatcttgttcctggttgtagtaaagtaactggtaaggctgttatgctggatgagataattaactatgttcaatcattacagaggcaggttgagtttttgtcgatgaagctagcaagtgtcaatccaacactggacttcaacatagaacgcattttatctaaagatatttttcaatgtcgaggcactactgcatcatctgcctttggcttcttcccagacattgttcatccccgattacacccaccaaaatatacacaagttgggatgcccagcattgtgaaccccactgatgcatttggaagagtaatccatgctccattaggaactaacagtgcattcaaagaacctaaacatcagatgcccaacaatttgaatggagagttccaggacgtcattgagatgccttttactcatgaccatcatggatcaaatgatcaaccctgagattgattccacaactgaagcaagagatcaatatgtgccatgggctttcagcaaaactgtgatatatgaggcatgttgatatcatggtactagctcacagctgatcactgaagtataagcatccaaaatgcttagttagtgctatttttctcatgttcatagcagcaattgacctcctgtggaagcctctctttggatgttccatttgctgttatagaaagttgggagataaaaaaaaaaggatgttcacatggagatctcaagcaatttgttctccactgaagtagtctacagtcttgaaatggcgagaagcttcattttgcaagaaggtgatttttctgtggtctcgtcaaccccaggattattacatacactagctagcattgtgaggctacagaaattgttctttgttgtacttgcttagcccatgttccatctgtcaagcaacataggcagaaatgcagtcgctgattttgtatttgttgaaaaaaaaaataaatgggcttggcctgatgtagcaagcatttgaattttgcaacgggtgcatattggcacagatgtttttattccagcaaagctgtgaattctgaaagagaagaaaagagaactgtgatctagtgtt

SEQ ID NO: 21500 - DNA, 933 bp, Oryza sativa
  Clone ID: TF_OsC260146_1
agctcagccagcgcttcatcgccctctccaagatcgtccctggcctcaagaagatggacaaggcgtcggtgctgggcgacgcgatcaagtacgtgaagcagctgcaggaccaggtgaaggggctggaggaggaggcgcggcggcggccggtggaggcggcggtgctggtgaagaagtcccagctgtccgccgacgacgacgacggctcgtcctgcgacgagaacttcgacggcggcgaggccaccgccgggctgccggagatcgaggcccgcgtgtcggagcgcaccgtgctggtcaagatccactgcgagaaccgcaagggcgccctcatcaccgccctctccgaggtcgagaccatcggcctcaccatcatgaacaccaatgtgctccccttcacctcctcctccctcgacatcaccatcatggccaccgctggagagaacttctcattatcagtcaaagatatcgtcaagaagctaaatcaagcattcaagttatccctgtgaaggacttgctttcctgatcaagtctaatctagatcaaatctttggttggtaatcttcctactacctttttatcattagccttgagagaaatctgaggctgatggttctaattaggtcctttccctgcttctgcttctgaagagagtttgcttgcaatccaccacagagcacaccccctcaaggatttagccattaaccacctgtttttgctgcatgggtgcagagaatttgcagattacctaaatatccacctacaagtcttctattttctctcccatcacatttttttgcatggattgagctagtcactccatgttcttgggagagggtagaaatgtaaaaaagagacctgtctttttctagggcctgtttatcaaggggagtttgactttttcaaaaaaaccttattttcatttctccccttctg

SEQ ID NO: 21501 - DNA, 1276 bp, Oryza sativa
  Clone ID: TF_OsC3973_1
agaccaaaataatacatgcaaaccatgacataccaaagacctcccaaaagctaacacgagtctttaccaatccaaattaaacagtctaaaattaaaaggaaattaattaaagagctactcagtactcatgcatccaagaaccctagctagctagcaacactagaaactttcatcactatcgatcggtcggtcggctaattagctagctcgagctagttagtactcatccaccacttcaatcagcctgctggccactgcacttgcaaacactggagatcccgaattagttggttgttgtgaccttggtgttgaacatgtagatgtggcagtcgccgatcttgccgccggagaggtggacgaggtcgaggcggaggtcgtccagcgcgcgcgacgcggcggcgagacagccgtcgcggcggcgcttggtgagcttgatgttcacgtcgtcctccacgatccgcacgtccacgaacgtctccttgctccgccgctggatgtacgtgctccggatcggcgcctgccgcggcggcggtgccaccgcgcccatcgccgccgccgccatcacctcgccctccgagctctccgccgcctgatccatccccgccaccaccgacgacgtcgccgcgtccaccacgtccccctgcatctccctccgccgccgcttcttctccaccagcagcgtcagctcctccaccgtcctccctagctcctggatgtactcgatcgcgtctgagatcaccgtcgctctatcctccttggtgcggttggggatgaggagcatgagggcgttgtacttctcggtgagccgcaggcggcgctgcttctccttcttctcgacgccgttggccggcccgccgccgtggaagccggcggtggcgcggctacgcttcctgccgccgccggaccgcggcgtcggggagctctcgaagggtccgaccatgaaggccgactcgtcgtcggccgggccgaacacgagcgacgacgacccggccgtccttggcccgccgcggaagtacgcctcggtggccgccgccgccgccgccgccggcgggtagtggccgccgtagtagtcgcgcagcatggccaccgtctggtggtggtgcggcgccgccagctggtcgtactgcatcgccgccggcggcggcggctgctggtcggcgccgccgaagaagtagtcgacggtgggctgggaggaggccgaggcggcggtggaggaggcagccgccgcggcggcgtcgagcgagtggaggaggtggaagttgagctcccccggcat

SEQ ID NO: 21502 - DNA, 1078 bp, Oryza sativa
  Clone ID: TF_OsC19797_1
ccccgggctgcaggaattcggcacaacgagcttttgcagatcgagcgaaccttcaacacaaaccggccagcttgttcctctcctctctctctctctctctctctctctcggtcgcagccagctaacttcgagtgtgaagaacactcacgctagctagctttctcaaggccacatacgctagctccgcctccacgcgcggcgtacgtctagtttgattgaggctgaagagagtgcgtgtttggtagaagaggctagctgttgacgatgtcgagcagaaggtcgtcgcgtggctccatctcggaggaggaaatcaacgagctcatctccaagctccagtcgctgctccccaactcacgccgacgcggctccagccaggcgtcgacgacgaagctgctgaaggagacgtgcaactacatcaagagccttcaccgggaggtggatgacctcagcgaccggctgtccgacctcatggccaccatggatcacaacagccccggcgcggagatcatccgcagcatcctccgctcctgatcggcaagcagcagcagcaagcggcaccggccggccggccggcctatgtcgacgacgagataggcccgggccggccgggcaacgcccgcggcgccaattaatcaagcgtacgtcctgccggcgccattctccggccaccagagagcatttagctagggtatatatatctacatatataaaatatttatgtcgtatgtccctccccaaatgtacgagccacgcttacacgcgcgtgtatcgatctctcgatctctctctctaagctccactcgaagtagggcattagcactaggggcctaagcagaggcttatcctcgctttagctcatattttcatcgcttgatgtgtcctctctgaacccccacatcttgtcttgtttggtttttccctctcccttccaatctatgtaaatttagctggtgtggtttggatcgagttgtgtcctctacagacaaccgaccgaccactactacctagaggaaattaatatcatcatgggtgtactgctccagctttaacttcaattcagttggctacgtactacgag

SEQ ID NO: 21503 - DNA, 1094 bp, Oryza sativa
  Clone ID: TF_OsC76770_1
taaaagttggaagaagcctttgagagttctgcactctgcacgcacagacaaacgccacagagcggctgcagcgctgcagctaatactagctcgaaacttctttgacccgaagaaacatccccaactggcagctaggtatcatggtgaaggaggaggagatcatcacagaggcagcaggagcaagaggctacatggagatgcttgggcttggagaggaggccgccgactacctgatgtgcctgtctccttcttcctacctgtcttctcctgctgcttccaccaccacagctgtggcttctcctacctgtgcctcgtacttggctcctcacccttaccaccacctgctaagcttcagtggtcaggatcagtaccacggtgatgacgtctttgggttacagtattacggcggcgatcaagtaattccggcggtggttccgcagaagtccagcccgaccaccgagtgctcctcctccgtctcctccatgtcgtcctcgccgacggccaccgccatttccagctctaagtcaccggccttcaagaagaagggatcgagaggttgtgatcagaggaaggctactgctcctgctgctgccacaaccacaaacaagagacccagggtgaggagggagaggctcggagagaggatcatagcgctgcagcagctggtttctccgttcgggaagtctgatacggcctccgttcttcacgaggcgttgggatacatacgcttcctgcacgaccaggttcaggtcctgagctcgccgtacctgcagcgcctgcctccctctgctcgcgtcccggagcaggagagaggcacgccggcggcggaggagcaaccgccggcgctgcggccgagcgacctgaggagccgtgggctgtgcctggtgccgatctcgtgcaccgagcatgtcgccggcgccggcgccggcaccggccacggcaacggcgccgacctatggtcggtggcggcgggcatggcgaaggcgacggcgaccgtgacggccgccgtggagaggagcaaggaggcagccgccgccgccgccgccactgccgcattgctgcgtgctgatcgtccagggcagcagctggcctaa

SEQ ID NO: 21504 - DNA, 1274 bp, Oryza sativa
  Clone ID: TF_OsC43374_1
gctctccactcatcgtcacacgttttcgtacgttacaccactgatcgatcaataatcgctcatcacccgatcgatcgatcgatatattctggcaaatctgtatatagatcgagcctcttattctgcttcttcaggtaagtcggcgtcgagctgatttgttaacgggtaggacgacgtcaagagcggtagctcgagctccgttcgcagccatggcggatgagcatgagtggtggaatagcccttgctctgcgcgcaccggcgacgacgaagccgcgtgctcgacggcggacgccgatgagtcagcggttgggagtactccgatgagcttcggccatggcggccagcctgctagtttatctgacgccgccgcctcctcgtcgtcgtcatcgttccttcttgccggacaacacatggattattggacgcaggacttcatgggaggtagagcagcggcagcggccaccgcgagcttcgacacgctgctccagctccagctccaaggcggcgacgcggcgagccgccgcttgctgctcggcgaccacgccgcagcgccgccgcgtcacctcgtcgtgccaggggcgccctacggcggcggcggcggtgatgacacggcggcgccgccgcgaggcttgtcaccgacaccgtacgaggcggccgacaacctgcagcagcagcaatcgttccccggcggccaccacgtcgtctccaacacggatcgcctccatgatcatcatcaggacgccggctcgccgtcgccggcgacgagaagctctcctggctcgccggcggcagcgaagaaaccacggatcgaggcgccgtcgccgatgccgactttcaaggtgaggaaagagaagctcggggacagaatcactgcgctccagcaactcgtctcgccttttggaaagacggataccgcatcggttcttcacgaggccatcgaatacatcaagttccttcacgatcaagttgcctctctgagctcaccgtacctgaggtgtgggcgccctgtgcagctacaacaccaacagggttcccataaggtgaatggtaactgtgaggggaagcagctggacttgcgcagccgaggcttgtgccttgttccggttgcgagcacttatactgtggccagtgagacggcgacagagttttggcaccctacctttggaggcacatttaggtagatataggtattagtttagtaatttacacctgctaagcaatgtgtacattgtccccggaatggattacgaaacaaacacccaatgttgaagctt

SEQ ID NO: 21505 - DNA, 1229 bp, Oryza sativa
  Clone ID: TF_OsC43754_1
ccttccaatcaaatcatgttgcttaagttcctatggccgagctctttctcttcctcctcctcgccgtcaccgccaccacccgaggccttctggttcttcctcttcactcttacagcagggctgccgcccagcgggctggtgagggagaaggcgatgtgcttctcagactcaagcctcacaatgaatgatggaatgttgacgagctgccttcccaccctgatgtggtgctgcctgataaggacacgtgcatggtggattgacttggccatgccattcttgaagacgatggtcttcacaaaaccgagtataaagacttgcccatctccgaaaaaacggtgagaacgaatagagtgactttatacccaattttacggttgagagacgattcacgcgcggccaccgtgggagcatcacgggaccgattttgccaagcgtccttacttggctgaggccgtgttacatggtcagaaatcccgtgttcttgtgacggttcgctgtcttcgctggtcgcagactcagggaagagctgaagttctcttggcgtggcggcatagtgctgctcgatgataaccggtagctgctgaggaaatgctgccgtcgtggtgactggtaaatgtggcaggtgctgtactgggaacactccggttgtcggataaggtaccctgagagctggtctggtgtttacatgactccaaacaggattgccttccatccgcgtcctaagctcgttttgaagctccaagatttcagtacgaagcatgctgttatcgtcgtgcagttcatttctctccaatgcaacataatgagattcattcttcagtgaactattctccttccggagagattccacttgtgaaagtaaatcttttagtattcgtgtagtttcacccagtacacatgccttcccattgttctgcctgtcaggttctagcaagtttcccagctcattaaagaggtcattctgcttgtcccgcttaagtttctccctctctgatttatggattctctttggagccttcttatcacacttcttgttcactataccgctctggaccagcctcccctcgccgccgccaccagcggcagcggcattcaccctgtccctgggcaccatctcgacctccccctcccagatcggagccgcggcggcctcccggttcgagggttccttgcgctacttgtcttcgtcgtcttcctcctcggcctcggcttcctcggctcgtggctgg

SEQ ID NO: 21506 - DNA, 1313 bp, Oryza sativa
  Clone ID: TF_OsC149298_1
ttttttttttttttttttttttgagtttatgtgggatgtgaaattgatccctttgtgattggaactggttgtgtctgtgttatgacaaatctgattcccttttcttttttaactgataaacaagctgcttaaatcttttttgtactcttctctttcttttttccttgtagaaaagagaggaagctattatttgtatgattgtatctacatggacaaaaaaaaggtacattgacaaggagatatggagattttttttccacttgctccatcacaagcttttaaaaaaatgaacaaatgggggtcccagcaggatcatgtttcaaaaccgatcaaaacacattttgcacatgagatgtctgtgtccagcctttgcttccaggaaatggggcatcgctgtcaggctggttcctctctacttccttgagagcctcttccactgccttttccacttcacaagccgcaatcgtggtctcgacgttcatctccgtccacagcctgttcccggacatgctcgaccggatcccgcgcgccttgacgctcatgcccttgagccgccggagcgcggcgatcatggagtcgatcgacgacgacggctcgtcgacctcgaactgcaccgtgacgcacggctgctgctcgtcgtggcccatgatctgggccttcagctcctcgttcctcctctgcagctggtccctcgcgaccttcagctcgtggatgtagatcgccgccgactgcacgatcgagttcttgtccccctgcaggggcgagaacggctttgtgtcggcgccagtgtagtaaacactccatttaagaggtattaaagggggatttcgaacattctgaagcttggagcgagaggagaccatggcgtagaggtcggcgtagctctggctgagcttctcgcggcgctggcgctcgcgcatcatgtggcggaaaccgcggctgctctccacgtcggcgccctgcccgcgccgccgccgctgcggcacctcctcctcctcctccatctcctcaccctcccccttctcccccccgccgccgccgccgcccatcctgcccagcacgtccatcaccctccggtggatgttcgtcccaccggtggtgacagcccccgccgccgccggcgctccggcgtgcaccgcgccgccgtactcctggaacgcgctctgcctcgcctccgccgccgcctgctccggctccggctccggctccggcgacgcaatgaggccgaacggcagctccggcgacgccggcacgtggtgggggaagaagaacgcggcctcgtcggcgtggaacgcgccgtagtacgactccat

SEQ ID NO: 21507 - DNA, 1256 bp, Oryza sativa
  Clone ID: TF_OsC51580_1
cggacgagaacaaaccaaaccttagctcctctcgctttggcttctcaccccgcacagccaactcttcccgtccatctcaatctccactgataatcgagacacaggccatgccgtgggtgcgcttcctcgtccggttggtcgtcttcttccgcgtcatcgtgtgagagcaagctaaagctactcgatccgtcgatcggccggcggtgactgactgagaatgtgcattggtttccaagggagcaggaggagtagcagcgagacgagcgccgccgacgcggtgatgagaagtggcgccatcgcgtactaccacacgctgaccaaggtttgccaggccgagtacttccgtcaccttctcaagcccgtgacgtaggttgaccagtacataatcctcctcccttcttcacccgacgagagagctagctgcgcagcttctctcacaagaaaaaaaacagaggagacaaacagagtttggaagttaagagcagaagaagatgcagggagaccacgggtactacggcgggagggactcgccgccgcaggggtacggctacggcggcggctacggctacggaggcgggtatggctacgacgccggtgggtactactccggcggcggcggcggctacccgtcggctggggcggcggcggcggcgtacgaggacccgatggtcgggaggaggacgcacgacttcccggcgccgatgaacgagctggagttccagccgtcggccacgtgccccaagaactacgtcatcttcgaccagacgtgcaccaagagccgggtcatgttccacccctcgctggcgcacaagttcggcggcgggtcgtcggcgtacgacaacaacgtgtacggcggcggcggagcgcacgacgccgccaagggcgcgtacagggacagcgtcggctacgacgacgacgacagctgctcggtgcggcagaaggaggacacggacgagatcgacgcgctgctgagctcggaggacggcgacgaggacgacgtggtgagcacggggcgcaccccggggtaccgggacggcagctccccggactcgacgtgctcgtccagctacggcggcgggcaggcgaggcccgggcgcaagaaggagcgcatgaagaagatggtgcggacgctcaagggcattatccccggcggcaaccagatggacacgccggccgtgctcgacgaggccgtccggtacctcaagtctctcaaggtcgaggtcaagaagcttggcgtgcgcggctccgacaactga

SEQ ID NO: 21508 - DNA, 1937 bp, Oryza sativa
  Clone ID: TF_OsC21243_1
ccacgcgtccgatatggaacataagttctttcattcaaccgttggctgaggcaaagatacagatttggagcgaaggtgcctagcactgttttgccaaaatgattgttggggctggttactttgaggattcccacgatcaaagtctcatggcaggatctttgatccatgactcaaatcaagctcctgcaagcagtgaaaacacaagcattgatttgcagaaattcaaagtgcacccgtactcaacagaagctctctcgaatacggccaatctagctgaagctgcaagagcaattaaccaccttcaacatcaactagaaattgatttggagcaagaggttcccccagtagaaactgcaaactgggatccagctatctgcactataccagatcatatcatcaaccatcagtttagcgaagatccacaaaacatattggtggagcaacagatccagcagtatgattctgcactttatccaaatggtgtttacacacctgcaccagatctccttaatcttatgcagtgcacaatggctccagcattcccggcaacgacatccgtattcggtgacacaacactgaatggtactaactatttggatcttaacggtgaacttacaggagtagcagcggttccagacagtgggagtgggttgatgtttgctagtgattcagctctccagttagggtaccatggtactcaatctcatctaataaaggatatctgccactcgttgccccaaaattatgggttgtttcccagtgaggacgaacgagatgtgattattggtgttggaagtggagatctttttcaggagatagatgacaggcagtttgatagtgtacttgaatgcaggagagggaagggtgagttcggaaagggcaagggaaaagctaattttgcaactgagagagagaggcgggagcagctaaatgtgaagttcaggaccctaagaatgctcttcccaaatcctaccaagttcatcagtatgatgttctttactgataacagtgccatgttattaagggttgttttggttttaagccaaattatgccctaccaaattgttggcattttgaaaagttatttggcaaagtttggcttgccaccaaagttggtcaagttttggcactaccaatatattgacatggtaacaaatcaaaacacccctaattgtgttcatcctaaccaaaatgacagggcctcaatagtaggtgatgccattgagtatatagatgagctcaatcgaacagtgaaggagctgaagatcctggtggaacagaagaggcatggaaataacaggagaaaggtgttaaagttggatcaagaggcagccgctgatggcgagagctcatcgatgaggccagtgagggatgatcaagacaatcagctccatggagccataaggagctcatgggttcagaggaggtcaaaggaatgccacgttgatgtccgcatagtggacgatgaagtaaacatcaagctcactgaaaagaagaaggccaactctctgcttcatgcagcaaaggttctagatgagttccagctcgagcttatccatgtagtgggtgggattataggtgatcaccatatattcatgttcaacactaaggtatcagaaggttcggcggtttatgcatgtgcagtggcaaagaagctccttcaagcagtggacgtgcaacaccaggccctcgacatattcaactaatctttagcaacagtactgattatttgaacaatgtcctagattttcagttaccttgctgagcaaacttatttgaccaggattggagagaattttatctttagcactagctacctagcaaaactttttaacaatttggccatgtaacggcttgctgctgtccggttgtacaccttaactagcctgactaggaaagctttgatgcttgtcttgtgtatttgatcatgttatctc

SEQ ID NO: 21509 - DNA, 303 bp, Oryza sativa; identical to SEQ ID NO: 11903
  Clone ID: TF_OsC341353_1

SEQ ID NO: 21510 - DNA, 1469 bp, Oryza sativa
  Clone ID: TF_OsC99421_1
cggcacgaggactgcccagcggcaagatccaggcgccatctttctgctgcaacggcaggccgctcggcttggcagcagcgtcgacagatctccagtgtcctgtgtcccgggcgccaatgcagcttttccaaggagaggagccggctcatgacttcctctcgctccgcgccggcggcggctcgacgtcgtcgccgccgttccagcaccgggaggagcagcattccagccattcatcgcgaggatacggtatggagatccgcagatcactgaggccactggacctggccaagcagcgcggccgcagcagcggcaatggcacggcggcggggagtgccgtcgacggcgcgtcgccggcaggttcggactcggaggagcacgtgctaccgggcggcgtcgggacgttcagcatcaggcacgcgtccggtactccgtcgagagaagaggccggtagccatggcggcgtcaggaggagtgcgttcgcatttgcacctgcgcttcatggcgccaggatggagaatgcacatgaaacaggaggaagatctgggagtagggctcaccgtgcgccgtcgacgatgtggcaagattctgccattgatcaaagatccataggccagacaccatatgaagcatttaattccaagacaatttcatataagtatatggtgcaagaaatgtgttctaaaatgcaattcttcatgctctccttcaggcttgaaatacttcgtgaactcctgccacacactgatcagaagagagacaaagcttctttcctttcggaggttattgaatacataaggtttttgcaagagaaagtccaaaagtatgaggaagccgatccagaaaggaatcacgaggattccaaatccatgccatgggcaaaagtctactatagatcatgctggagaaacacaaagaacaccagtcaagtccagggggaagatttgtcaccatccacacaggacatgaacaacgaacagtacggtcccaagcacatatcggcagcacaacctgctctcttcaacacacagagtgtaaccagtacaaccaccagttcctcccacatggcaacaggcacaccacaaaatttggaaaagaacagcacacccagcaatcagccaccatggctgagcatgtcaacaatgcgccaagagtctgaaccaggcaacaaaatgccgaacaagcatgagaaacagacccttcacgatgaaaaccatagtatttctagcgcttactctcaaggattattcaacagattgacagaagctcttaaaaagtcaggactagatccatctcaagctaatatagctgtagagatcaacctggccaaacgagcaagagataatactagtgacaactcaaagatcgtctgcttaataattattttgtacctttgtcctgacttcacatcacagatcaatgaagatgaagagcccatccaaataaccaagaggcggtgcaataaaagctag

SEQ ID NO: 21511 - DNA, 1841 bp, Oryza sativa
  Clone ID: TF_OsC194068_1
ctgcctcatggaggttagatcaggctgcttcttccatctatgtttagatcagctgttgcagtgagccagttagctacgacgacgacggtgtggatggatcgtggcttcaacgagatgatcttgagcgagagcgtgtggaatggcggcggcggcggcggagatggagatggtggggcggtggtgctgccgccggaggtgggtggtgtcaatgcggtggacgggagcggcatgacgatgctggagaggctggtgctcgacgaggccctggcggcggcgatactcgagctgcagggcatccaggcgccggggtgcggcgggggcggcggcaaggtggcggtggtgccgccgccgacggccggtgacggcggcgtcgaggcggcggtcgccttcgcggcgatggcgacggggacgcctgcctacgctgacgttgacgcggatgtcctgcagcgacagcggcagcatcaccatcgccaccagggcgcgatggggatggctgccgagtacgacgtcgcaccagcaacaccggctgtcacgttgagcgctgtaccaccaccaccaccaccacctgcgttcgcgaccgcagccgcctccgttgacggcggcggcgccatggacgcgacggtcttctccggcatcggcaacgacgacgtcgtcgacgcggtgagcgccacggtggcgatgactactgccactgcaacgaccagccagtgcgaacgagtcagaggaggcggcggcggcggcggatgtggacgtaagcaacgccggccgggaagaaagcggaaggccgccgagccaaccgccgccgccgccgcggcggacatgtcgtcgcaggacaaccctctctgcagcctcctggcgtcgaacaccgccggcgccgacggcggcatccagatcgcgttcagcacgagcgccccggcgtcgaagcgggcgaagccgtcgctgagcagcagctcgtcgagcatcagcttcgacggcaggggccccggcggcaactgcggcggcggcggcggcgacgacccactgtacgagcccgacacggaggcgctggcgcaggtgaaggagatgatctaccgcgcggcggcgatgcgccccgtgaccctcggcgccgaggacgccggcgagcgcccccgccgccgcaacgtgcgcatctcctccgacccgcagacggtggcggcgcggcagcggcgggagcgcatcagcgagcgcctgcgcgtcctgcagaagctcgtccccggcggcgccaagatggacacggcctccatgctcgacgaggccgccaactacctccgcttcctcaagtcccagatcagggagctgcaaaccctagaccgccggaactacccgaacgccgccatgtccatcaacaccgccgccgccaccaccatggcgacatccagttcaccaacctacaacaacagcaacgccgccatgccagccttcgccttcccggaaaccctaggatgcggaggaggaggagtcgagcagctgatctaatccatttagctagatagattggagacgacgacgacgacgacgacatggaagccatgaaggcgcatggcggcatgcatgccaagcactgttgccaatgtgttgtcccatgtgagaccatcatatgatagattcatcattgttaggcatggtgattaactagctacgatcatatcgatggaatcatcatgcatgtcatggaccctattagctagcttttttttttctcttctcttttttcttcttcttctccttgtcgtcataatttagttctgatcagtttgatgatcatgtatgcttgcatgtccagcctacgtgctttattttcgagctaaaaaaaaaaaaaaaaa

SEQ ID NO: 21512 - DNA, 1525 bp, Oryza sativa
  Clone ID: TF_OsC255497_1
tgtctccgattgcatcacatccttgacagctgctggactgtcatctttaactacagattccttgagaatttcctcgtcgcagctgctggaggcaggttgttgagaagactttgcacggggaagaagacgacgacgaccactgctgctgctgctgctggaattatgccctgtggccaacaagctgacatccctcttctcgttgagaccctgcaggatgccagccacggcatccatggcactgcaccccgacgacgaccccagcactatcttcagatgaagctcttgacacttgttcggtgaactgccctgatctgccgctgatctgctcgtgttgacctcaatcttggcaagtagcagcaagctcgcgatctcccccaccttctagaaccttctagaaccgccgaatgccgctccaccaccaccgccaccaccaccactccgccgccgtcgccgtcgccgtagccgacgacgacgacgaggccaagccgcgccgcccctactccaccttcgcctccccgcgcgcgcccacctccgccttctccgccgccttctcaacccaccgcctcctcgtcctcttctccgtcgcctgcctcctcgtcgccgcggcctccctcgccttcgccttctccgcccgcgccgcgaccctgcagccgccgcccctcgccgccgtggccgaagccaccgccaaggtcgccttccgctgcggccgcgccgaggacaccctccgcgccttcctcgcctcctcctcggggaactactcctccgcggcggaggggagggagagggagaaggtgctcgccgtcgtcggggtgcacacggagatcggatccgccgcctgcagctgctgtgattcagatagcttcctgttcttctcctccagctcagctatcctcgccttgaggacgttcacgtagtcctttgctctcatcagcactgatgctttgtccttcttggtggcgggtgggagcacgtccctgagagccttgaagctatcgttgagcttctcccggcgcttgcgctccgacaagacgtgctgcagctgcagctgctggttctcgccgccgccgccgccggcggtggccgctggcgaagcccgcgcggccatctccatgatctggtagtactgcgcgagcctcgccgcgtggatctttgacagcaccgatatggccttcttgaacgccctctgtccaccgccgccgccggtggcggtggtcgccgcccctggccgccggaggagatgcttcttcgggcccaggtaccgggagtacggccggaacgcggtggcggcggcggcggcgccatggccgccgctgctccgccgtgctgcttgtcccggccgtggtagtagtatctgcgacgacacctccgttgtctggtggtggcaagaggcggcggcggcggcgagcatgagcgacgagttgtcgtcgcggctcgtcgtcgtcgtcgtcgtcccggcggagaaggagcggaaggaggacgacgacggcgacggcggcgtggcgtactgatgatcgtgctcctccat

SEQ ID NO: 21513 - DNA, 716 bp, Oryza sativa
  Clone ID: TF_OsC217180_1
acgacaaccacctcgcttgccattctggactgcgggtgagatcgatggtgacggacggggagtgctcggcggcggcggtgaggaagggtgggtcgccggcggtgcggagccacagcgaggcggagcggaagcggcggcagcgcatcaacgcccacctcgccacgctccgcaccctcgtcccctccgcctcccggatggacaaggcggcgctgctgggggaggtggtgcggcacgtgcgggagctgcggtgcagggcggacgacgccacggagggcgccgacgtcgtcgtccccggggaaggcgacgaggtcggcgtcgaggacgaggacgacgacgagggcgagcgcgacgaggggtgttatgtcgtcggcggcggcgacaggcggtggcggcggcgcgtcagggcgtgggtgtgctgcgccgacaggccggggctcatgtccgacctgggccgcgccgtgcgctccgtcagcgcgcgccccgtgcgcgccgaggtcgccaccgtcggcgggaggacgcgcagcgtcctggagctcgacgtcgtcgtcgcctccgacgccgccgacaacgacagggccgtcgcgctctccgccctccgcgccgccctccgcaccgtgcttctcaaccgcgaggagctcctcgccgccgccgccgccgccgccaccgacggctacaagcggccacgcttctcgccgaggtgtagcagcctaacctaa

SEQ ID NO: 21514 - DNA, 2147 bp, Oryza sativa
  Clone ID: TF_OsC2385_1
gggcggccgccgcgacgcgtcaggcgggggccgccccccgcgccctggtgccagcccgtcgccgccgtacatccccgaggtcaccagtggtcgctccccttcgccgcgcgcgccgtggccgtcgcggccaccggccggcatgggactccacggcaatcagcggaggcacgacttcctctcgccgtacgacgccgccgccaccgccacggactactcgccgctcccgcgccacccggactccaagccctcggcgccggcgccgccgcccgctcaagatttcttcctcaagacacacgacttcctgccgcaggtagagaagagagccgaccagacaccaccgccgccgccgccgccgccgccccacgccgcggtcaccgccgagaagcagctgctccaccagcacgcgttggccgccgccggcgcgttcaccatcaaccacgccgtggccgcggccgccaccgccgtcaagcaggagccgcccttcgcgccgtggtgccagcccgtcgccgccgtagatccccgaggtcaccagtggtcgctccccttcgccgcgcgcgccgtcgccgtcgcctcctccaggccgcagcagcagcagcagcagccaccgccgccggagaggaagggtggcggtggattcatggacgccggctccagatccagtggcggcgcgggcttcgacgacgacgacggccatgccgcgcgccgcgaggtctcctcctcgctgaaagagctcacggtcagggtggaagggaaaggtgggagctgcagcggcagcgctggcacggatcagatgccgaacacgccgcgctcgaagcactccgccaccgagcagcgcaggcgcagcaaaatcaacgacagatttcaacttcttagagacttattgcctcataatgatcaaaagagagacaaagcatcatttctcttagaggttattgaatacatacggtttttacaagagaaagtacaaaagtatgaggtttcatacccggagtggaaccaagaaaatgcaaaggttgtgccatggacaaacatctatttccgttcttcctggaaaaatgcgcagaacaaaggccaagttcctgcagatcattcacctgaccctccatccccttttaaagagctctctgatccggcatctaatagtcaagcaatgggccgtcagcttagggttgggtgatggcgctgaagaacatcggcaagcctcaaagcgacacaaatcagataacagctgatggtttgctcctgaaaagcccagatattcaaccattttgtggtcctaactgtgtacggggagccccaaggttttatgtatattatgtttacctgtgacgtatcgagtaaactgcgacaagttaaataattctgaccttgccatcgatgagggaacaatcagtctatcaagccaatattcccaagagttgcttaacaagttgaatcatgccctggaaaactcgggtatagatttgtcccaagccagcatctccgtgcaaataaatcttggcaagagggctatgaagagatctactcctgctgcaacctccacttctaaggtaggatttatgtctcgtattgacactaagagccactacattatgtttgtggtaattgaaattggagctggcaatggatgttatacatggagctcactgatccggcatctaatagtcaagcaatgggccgtcagcttaggttgggtgatggcgctgaagaacatcgacaagcctcaaagcgacacaaatcagataacagctgatggtttgctcctgaaaaccccagatattcaaccattttttgctcctaactgtgtacggggagccccaaggttttatgtatattaagtttacctgtggcgtctcggcaaaacaaggccttgatgtattctttcatttaatcacttcgccgttctagcccctagggaaaaaaggaagcttccattgcagattgtgaagctgcttttgtccatatgcttccattcatatgagaagtttctccccccctctgacagaatgtcttttgtaacataattcagaaatgagctatccaaagttccatcagttccccttgtgatgtgtaatgtgttatttgtccctgaagattgaagttacccaagaccaacctgtaatctgatgatggggtatttgcagtcc

SEQ ID NO: 21515 - DNA, 1965 bp, Oryza sativa
  Clone ID: TF_OsC252614_1
atgcccggctcccgagaaatgtcaatcattagtggaggtatgtggtccgacggcaacgacttcgccgagctgctgtgggagaacggccaggcggtggtgcacgggaggaagaagcacccgcagccggccttcccgccgttcggcttcttcggtggcaccggcggtggcggcggcgggagcagtattagggcccaggagcggcagccttgcggcatcgatgcgtccgccaaggcggggggcggctgcagcgccgaggtcatcgctccgtcggtgcacggctgcggtgctgggttcggcgccaccatgcgcgacaacggtgatctcgacaccgttcggaggatccattaccccacctttgtcgatgaagacgccgtcgcccctccggctcccgcggtgtcggacgaacacatcatctccatgggaacggggcagtgcgttccggcagtggtggtagcaacagcgatgcagccctagcaagcctcaccgccggcccacttcccccatggcgccatcggtttcgggtacgggatgggtgtcatcgccatgagcaggaatcccgcccttcagatgccacccgtcccgggggctcccaccacccgagccgagccgcagccgcagccacagctcgccgcaggcaagctgggcacaagcaccatgccaatgtttggggttcctgtgcaaacaattccttcgtcagcgtctagtgtaccaccatttgcatctttggctggtcttcctgtgaggccgagcggggtccctcaagtatcaggcgccatggctaacatgagtgcaagaccagcaacaggggttagcgaatcaacagcagcaatgtctgaacaaggaagctatacagggagcaaatccaggtgattcacaaatgcagatcatcatgcaggcgcgtacacagaattcgctcatatggtcccgggcgtaaaccagaaccactagatgttcagtgactggccaggccgagccaagcctgtccacaaaaccgaggcgaggaaggcacctgaggccacggtcgcgacatcgtcggtgtgctccggcaacggagctgggagtgacgagctgtggcgccagcagaagcggaagtgccaggcccaggcagagtgctcagctagccaagacgatgatcttgacgatgaacctggagtattgagaaaatctggaaccaggagcacgaaacgcagccgcacagctgaggttcacaatttatcagaaaggaggagaagggacaggatcaatgaaaagatgcgcgctctgcaagaactcattcccaactgcaacaaggcatgctatgttttgcagattgataaagcctcgatgctggatgaagctatagagtacctcaaaacccttcagcttcaagtacagatgatgtccatgggaactgggctgtgcattcctccaatgctattaccaacagccatgcagcacttgcaaattccaccgatggctcatttccctcatctcggcatgggattggggtacgggatgggcgtcttcgacatgagcaacactggagcacttcagatgccacccatgcctggtgctcactttccctgcccaatgatcccaggtgcgtcaccacaaggtcttgggatccctggcacaagcaccatgccaatgtttggggttcctgggcaaacaattccttcgtcagcgtctagtgtaccaccatttgcatctttggctggtcttcctgttaggccaagcggggtccctcaagtatcaggcgccatggctaacatggtgcaagaccagcaacaaggcatagcgaatcaacagcagcaatgtctgaacaaggaagctatacagggagcaaatccaggtgattcacaaatgcagatcatcatgcagaatgttcctgtcctaaaaagatcaatggctgaggaatttcatatggtagaagatgctaccaggttacaagctgtaattcttgacttccagtgcagtttcctatga

SEQ ID NO: 21516 - DNA, 2097 bp, Oryza sativa
  Clone ID: TF_OsC101165_1
gcacgaggcttagctagtactaatcatcattagtgtatagctaagctagctccattatcttgcgcttcttggttttgtctgggaactattgtataggtctatatcgatctccatggatgaggtgtggtgcagcctggacagcatgccggccgacatcgccgccggcatccaccagccgccgccgcccgacctccacgacccctccttctggccggctttcgccgactgtgctgcgagcttcatcgccggcggcggcggcgacaatgcgtgcttcgacgagctcatggcgggagggtcgtcgggtgacactaggatggtggccatggacgacggcgacgacgggagtggcttcttggtgggggacgccgaggccgagcacctgatgctgtcgtcctcgtcgccgtcgtcgctctcctcgggccgctccctctccatcgacagcgccggctccatgtcctccttctcgctcgacgccgccgcggcgctggcgatgtcgaccctcgccgtcccgcacccgtacccgccgcccgtcgcgcacggcatgttcgcctccggcgacggtggcggcggcggcggcggcgcagtcgacgaccacgaggacgccatcatgcgtgccatgatggccgtcatctcctccgcctcggcctccccctcctcctcgggcggctccgcctcctcgcccaccccgttcagccgggacagcggcgcgcaccaccagcctgcaggtcagccagccatggcggcgccgcagcagccgcgtggagggaacggcggccacgtggtggtgaagagcagcagcagcagcggcggcctcgccgtgccgatggatcagaagcccggcggcggcgggcggggacggcagcaggaggaggcggcggcggcgagcgccaccaacagcagccagctctaccacatgatgtcggagaggaagaggagggagaagctcaacgacagcttccacacgctcagatcactcctcccaccttgctccaagctttacacagtatttgagtggttaccaggaaacaacctgtttcatggaaacggaagtgacaacaaggacaagacgacggtgctgatcaacgcggccaagtacctcaagtcgctggagacggagatcacggagctggaagggacgaacacgaagctggagaagcacatcgccggcggcggcggcgcggcggacgccgccatgagggctcgccgggcgcagcagagggccaaggtgcagatcagcaaggcggcggactcgcagtcgcagcagctggtgagcctgacggtgatggtgatggtggagtgcgacgtggtggagctggtgctccacatcctggaatgcctcaggtggatgaaggagatcagcgtgctgtccgtctacgccgacacctactcgccgcagcttcttctcaaggccatcgccaacatcaagctccagatcgtgggaggagattggaacgaggcgtcgttccacgaggcgatgacgaaggcggcgaacgacgcgaccatttcctgcgccccgctcgcgatcacggcagcacagtgattgctgattagtgagtgattagcagcgagcggcggcggtggcgacctaccggttaattcaatccatcctcatcgtcctcgcgcgcgtgcagtcatggttgaacgttgaacccagtaaaaaaaatatttatgtatggagggcgatgggttcgctacgtcataaccgatctcaatagttggaggaggaaaacgaggacaattcaaatacttcgagagtggggaagaatattgttagatatatattagggtttggttattcattcctttttccgtcttaaaatataataagttttgatgatgtataaacatgtataaatatatagctaaaagttattatattttaggacggtgatagtaattacgtagcgtatttttcaggtgtgccctagttgcagccgcaagctaggttgcagacgatggtgctttagtagcgctagcctagctagtataggtatatgtatatgtatatctctatgtatatacatgcatggtggtggttttgagtgattgttaaaaaaaaaaaaaaaaaaactcgagactagttctctctctctctct

SEQ ID NO: 21517 - DNA, 1310 bp, Oryza sativa
  Clone ID: TF_OsC51267_1
aactagtggatccccgggctgcaggcaatgaacctctccaccccaccccgcgacgcgacgcgacgagccgtacaccgaccgccccgcgccgctgctgccggagccggagagagaagctgaagccgaagcagaggcagccgcagcggcaaaactcaaaagacgtcgtcaaaagctctgccgcgcttgcagctttctcgggctcaaggaaaagccatcacaaaaccagagacacacagagagagagagagagagagagagagagagagactgaagaaaggtggcaactcctgcagcagctgcagcagcaagcgctagtgtttgtggtttgctggtgctgtggcgaggcgatgatggatgggcgaatggggctggatcgctgcgagagcgaggttggcgtgcggtgtccgcgtttgattcgatcggatgctggtggtgatttggcggcgctggggtcgtcggagtcggagcagcccaccaggccggcgcggccgcgcggcaagaggagccgcgccgccgaggtgcacaacctctccgagaagaggaggaggagcagaatcaatgagaagatgaaggccctgcagagcctcattcccaactccagcaagacggacaaagcctccatgcttgacgatgccatcgagtacctgaagcagcttcagctccaggtccagatgttgtccatgaggaatggtctatatctgcccccagtgaacttatctggggcacctgagcatctgccgatcccgcaaatgagtgctgcacttgaccagaatagtgccaaagcatcagatccttcagttgttttgcagccggtgaaccagacttcaggagcacttcttccatttgagctggcaagccaacataaacctctattcttaccaggtgttcctaatgcaaccgctctggagcctcggttccttgtagagtcttcgcgttccaatcttcaatccttacggttcactgaacccgctgagatgatctatcctgatgagatgatgttaaagcaccgcctgacttcagctagtgagagcacaattgtgccaggaaccgatgagaagtcggttaggcagaacacatacatgatgaatgctgatcgttttgatagatatgcactcagcaaagaccagttgcagcacattatgccgaaaaacacagaaagtgtacttgatatgccacacttgcaaagaatttaagctgaggattcagtttcttcagttggacagctgacgatccagcttccactcttggacaggttgcaaaccagtgacaccaaagttagggtcgagggtagaatcaaagtaaacccatga

SEQ ID NO: 21518 - DNA, 1125 bp, Oryza sativa
  Clone ID: TF_OsC21348_1
atgtccggtaccccggcggacggcggcggcggaggcggcggaggcggcggagggagcggggacgactggttcctcgactgcggcatcctcgaggacctcccggcggccgcgtgcggggccttcccgtgggacgcatccccgtcctgctccaacccgagtgtggaagtaagcagctatgtgaacaccacctcttatgtcctcaaggaacctggcagtaataaacgtgtaaggtcagggtcttgtggtaggccaacatcaaaagcttccagggaaaagatcagaagagataagatgaatgataggtttcttgaattggggactactttggagcctgggaagccagtaaaatctgacaaagctgctatcctaagtgatgccactcgcatggtaattcaacttcgtgctgaagcgaagcagctaaaggatactaacgagagtcttgaagataagattaaagaactgaaggcagagaaggacgagcttcgtgatgagaagcagaagctgaaagtagagaaggagacattagagcagcaggtgaagattctgactgcaactccagcctacatgcctcaccccacattgatgccagcaccgtacccacaagcaccacttgcccccttccaccatgcccaggggcaagccgcggggcagaagctgatgatgccttttgttggatacccggggtacccgatgtggcagttcatgccgccttccgaagtcgacacctccaaggacagcgaagcgtgcccgcctgtcgcgtaatgcttcatcggttgcgttatgtgaattaatcgtaacctgaaaccgcttagttgctcaatccattggttgggcatcgtcgtccctgattcacattcactattgttcttgtgttagtagttcgtttttgtatggaagtaagctgacatttgtggcgctctatagaggctactgcccccttttaatgtacaatacaatttttccggagaaaggaagaatgctcattcttgttctctgcagaaaaaaagtgacaaattcagtagcatcatatacaccatttcttatcacccaaaaaaaaaaaaaaatgtatgctgttctggggattgttccctctcgctccaaatcttgttaaaaaaaaaaaaaaaa

SEQ ID NO: 21519 - DNA, 365 bp, Oryza sativa
  Clone ID: TF_1086541
atgtccgagagaaggcgccgggagaagctgaatgagatgttcctcattctcaagtcactggtcccgtccatcgacaaggtggacaaagcatccatccttgcagagccgataccctacctcaaggacctggagaggaggttccaagagctcgagtccgggaagaagatgtctagcccgcccaagaggaacccgtgctcagagacgatcatcggcggtgccgcccgcgccggtcccggagctgttaaagggcaccaccactgggtgctctccgagtcccaggagggcaccccaagcgacgtgcgtgtgatcatcatggacaaggatgagctgcacctggaggtgcactgccggtggaaggagctgat

SEQ ID NO: 21520 - DNA, 1150 bp, Oryza sativa
  Clone ID: TF_OsC308912_1
cccgggctgcaggaattcggcccctcggtttgattggttagggagcaaggcgatggatgctaatggcggcaatgggtttggagtagagagcaacgcttcggctgtccatggtggcatggcgatggcttggcaatggcatggcggccagatgagcggcggcagctcgtgcgctgcggcgccgccgccggtgcaacagccggcgatggattctctcgcgtggtcgtcgacggtctcgccgagcaccggcgctgccacggcggcgagcggcgccggcttcttgctgccaccggcagccgtgcgcggcggcttcggcagtttcccggtcaactccggcggcatcgtcgagccggccggtgactgctcgtcggagtccaagaagaggagatcagacgagattgctggaacggatcacgcgaacgcatcgaacgcgcttgccgattctgggaacgagaccgagtgtagcaaagatgtcaacggcgaagtgatcggcccgccggcgacggcggcggccggcggcaagtcgaaagggaagggagccaaggacgccggcgaggcgcagaaggaagggtacagccatgtcagagctcggaaggggcaggcaaccaacaaccacagcttagcagagaggctgagaagggagaagatcagcgagaggatgaagctcctgcaagaccttgtccctggctgcagcaaagtcaccgggaaggcgttgatgctcgacgagatcatcaactatgttcagtccctgcaaagacaagtcgagtttctgtcgatgaagctctcggcagtcaacccaagaatcgatctcgacattgaatcacttgtcaacaattccaaggatgttcttcgttttcccgggcagccttcctctgctcccatgggattctccttctccacggagatgatgccggggctacaattatcacgaccgggcatccttcagggaggtgtccatggcatgatcaatccagatgtgttcaccagcctcatgcagaagcagcagcaaaatgacaagggagcattcagagagcctcagatgcatcagactttggatggatcattccgtaacaccgcacaaatgccgtatccacaggtcatgagttcagaagagctaagcatcaggcaagatcaagatgggtttcacatgtga

SEQ ID NO: 21521 - DNA, 1205 bp, Oryza sativa
  Clone ID: TF_OsC6539_1
gcacgaggcaaaagtctcatccccaaatccccaattcttccccgacctctcgctcgcggaggaggagcgagaatccccgaaccctaggcccgatctcccgcacccgccgcgggcgatggacggaggcggagaccccgttgacgagttcctcatcggcggcggcggcgaggacggcgacctcggcgtcttctgcgacggtgtgccgacgctgccctgcgatggaggacttgggattgatgatgtcagtggagatacttgttgccttgaccaatctgttttagggaaaagaggtagagatgaatcatcatcatctggtccaaagtccaaagcttgccgtgagaaaattcggagggatagactgaatgacaggttccttgagttatcttccgttatcaatcctgacaagcaagctaagttggataaagcaaatatcttgagtgatgcagctcgtctgttggcagaactcagaggcgaggcagaaaagcttaaagaatctaatgagaagctacgagaaacaatcaaggaccttaaggtggagaagaatgaactccgtgatgagaaagttactctgaaggcagagaaggagaggctggaacagcaagttaaagcattgagtgttgctcctacaggatttgttcctcatctccctcatccagctgcattccatcccgctgcattccctccatttataccaccttatcaagctctgggcaacaaaaatgctcctacgcccgcagcattccaagggatggcaatgtggcagtggttgcctccaactgctgtggacacaactcaagatccaaagctttggccaccaaatgcttaattaggtgcagactagctatgctgctattcatccattggcagatcaaaatgtgttcggtcttcctggagagtaaaatagtccgcgatgctgtccattacgtggtaaactgttcttttattggagttctgtttttaactcgtcctattgaggggcgatgcctgtaattaatctggatcgtaaccctcttgcctggtgaatgctccacaaactctcatgtccctcgcatgagtttgttcaagtgtggaagttgtgactgtgctattattttagcattggcttggcagtacttgttctgtttctagcaagagtttcgcatgtgagcacatgcatagcaatatagtatgttctaaattagttcattacaaaaaaaaaaaaaaaa

SEQ ID NO: 21522 - DNA, 1344 bp, Oryza sativa; identical to SEQ ID NO: 11968
  Clone ID: TF_OsC348863_1

SEQ ID NO: 21523 - DNA, 1422 bp, Oryza sativa; identical to SEQ ID NO: 11972
  Clone ID: TF_OsC359_7148

SEQ ID NO: 21524 - DNA, 1995 bp, Oryza sativa
  Clone ID: TF_OsC2018_9
atggcatctgctcctccagttcaggaagaacccctacagccagggacgaaccacttcaggagcctgcttgctgctgctgtgaggagcatcagttggagttatgcgatcttttggtccatttcaaccagttgcccaggagttttgacttggaatgatgggttctacaacggcgtggtaaagacgaggaagatatccaactcagcagacctcacggctggtcagctcgtcgtgcagagaagcgagcaactgagggagctttactactctctcctgtccggcgagtgcgaccaccgggcgaggaggcccattgccgcgctatcgccggaagatctcgcagacacagaatggtactacgtcgtctgcatgacctactccttccaacccggccaagggctgccaggcaaaagctatgcaagcaatgcatctgtttggctgcgcaatgctcagtctgcagatagcaaaacatttctacgctcgctattagctaagacaatcatctgcatccccttcacgagtggcgtgcttgagctggggaccactgatccgactttcattatagcatatgcctgccacaacatggaacaggttttggaggacccaaagttggtaaaccgaatcgttgcatatttccaggagcttcagtttccgatatgcttagaggtactaatgagcactagcccttctccgaacgaaacggaagatgccgacatcgtgtccgaaggcctcatcactcacaacgccatcgaagaggggcagatggttgtctctgatgagtgcgtgtccaacgccaaccgcgatccaatcaccatggagatcgacgagctctacagcatctacgaggacctggacctggacatggacctggacctggacaccgtgcgctttctcgaggataatggctggcctgtgaaccccagctcttttcaactggtcccggcgtcgtcaacggaggcggtggcggcggcggcggcggctaatgatgtcgacggtgttgcgaattctcaagtgtcgtgcttcatggcttggaagagcgcgaagtcaaacgagatggctgtgccggtcgtcaccggtatagagtcacagaagttgctgaagaaagttgtggactgtggtgcacggatgagcactggtcgtggtagtagagcagcgctaactcaagagagtggcatcaagaaccatgtcatatcagagagaaggcgccgagagaagctcaatgagatgttcctgattctgaagtcaatagtcccctccatccacaaggtggacaaagcatccatccttgaagaaacgattgcctacctcaaagtgttggagaaaagggtgaaagagttggagtccagcagcgagccatcacatcagcgcgcaaccgaaacaggacagcaaaggcgctgtgagatcaccgggaaggagctggtctctgagatcggtgtcagcggcggcggcgatgcagggagagaacaccaccacgtgaatgtcaccgtcacggacaaggtggttctcctggaggtgcagtgccgatggaaggagttggtgatgacacgagtgttcgacgcgatcaagagcctctgtcttgacgttctctccgtgcaggcgtcggcaccggatggtcttcttggactgaagatacaagctaagtttgcttgttctggttcagtggcacctgggatgatcagcgaagctctccagaaagctatcggtggctagacatttttaggttgggttttttttttaaaaaaagtatgcagttaatattttttttctttttactatatacgaaagtggaaggttccaaccctccacgcaatagccaaaaataataaaagcgacatcgtcttctagaaggaggccagagaatgtgtatggatgtaaatggaaaaatcggacagaatcacgaacagaggagatcagaaacacctggaattcagaaaaaatggtgagagttggcgaccaatttgagttgctgtactcctttgtgcccaataaaaaaaaaagaag

SEQ ID NO: 21525 - DNA, 1320 bp, Oryza sativa
  unsure (1)..(1320): unsure at all n locations
  Clone ID: TF_OsC91_2671
ctacaagcatcctcctccatagccggcgttcttgaacagctcctgctttatcatgtccgcgctcatcctctccctctgcatctcggagcaggaggcgtgcatgccgaagtcgttgaagcagctgacgacgcactgctggatgtcgaggcccagcgtctccagcgtgctcaccgtggacaggagcagccctggcttggccgcgcagtagatctccacccgcgtgtcgcccccctccttcctctccacatcgaactgcacctcacaaactccattaatcccatcatcctcctcattatatatccagcaatggatggatgcagctaccttgggtgtgttcctggccagcatctcgttggggttgagctccctgaagacgctgagcaccccgggcgtctcctgctgctgctgctcctcgatctcctcctgcagctgcctgatcctctccagcaactccttcatgtagtcgatcgtgtccccaagaatcgatgtcctgtccatcttgctgatcttgggcaccacggaccggagcatggagaggcggtcgttcagccgcttgcgccgccgccgctccgccatcaggttcttcgacggcatcccttccaccctcttcttcttcgacgccggcgccgccgccgctgcgctgaacccgccctccgcctgcagcccgggctccaccttgcacaccccgagcccgccgccatccaccaccatactcgccttgggctcaaccacatcaagaaaccccatgtcgccgccgccgccgtactcgccgccgccgccgccggcattgggcccgaatgcggcggcggcgttgccgtagacctcgctgaggcagtcgaacccggccgccggcgccggcggcggctgctcgtaggaggccgtgaaggtggggaggacgctgaccgtggtggtggactggtgccgttcttggaagccgtccatggcggcgcacgccggcgagaagaagtcccccatggcattgtactcccacgcgtccctcctcagcgagaagagctcctccaagaacgcctgctcatccagctccatctccttcctctcttcttccctttgctttgcttcagctgcagctatagcttagctaagattgcttgtgtgtgtgagagagagagagagcacagcagcacagcttagctagctgcacaggtggttattggtgtgaaatggaggggatggagaaggtgagaggacaggggggggattaatatatggagnagtttgtaggagacaattattccctgtaataaatgatgaacagtggtattaaggatttgattagggagggggggtgcatatgcattt

SEQ ID NO: 21526 - DNA, 2449 bp, Oryza sativa
  Clone ID: TF_OsC38156_1
gcacgaatgactgagatattgtctcctacaaaaaccatcctacttgcagattgcagcagtaaaaaggcccacgcttttaacccaagaaagggtggtggatgtaaagatgcaaaggggatcagcttaccttgccaaccctgtgattctaaagtgttttcacatcctcttgcaaacagaaacagaaatggtctagtaataaattgtgttctacggcagctgcagcagcagcagcagcaactgcacaaaataaagtcagcagcaaggcagcaattcattgttttttttttttttttggcttgcaaagcttttgctttgttttaggtgcttcttttccactcctttactgttcccccacttttccttgctttgtcacgcacacgaaaagctcctgcctttaccttatctccgctcgccttccctcacccccgtcgtagtgggatttggtggctgctcgcctctcgcgtttcttttgctggattggggcgttcttgggagctcgggaattcgggtggtttggttgggtttcgtggagaattgcggcagatctttgagatgaactgcgggccgcccgaccagttgccgccggcgacggcgccgtcgtgcttcctcaacctcaactgggaccagtccatggacgcggcggcgggagggcacctcgacccggcgctcagctccatggtgtcctcgccggcgtccaactcgacgggcgctctccacgggatctcgccgcagccgcactacggtggcgggacgccgctcagctcgccccccaagctcaacctgtccatgatggggcagttccaccactacgccgcgccgccgcaggtgggcggcggcggaggcggaggcgggggcctgccaatcctcgagaacctgatgcccatgggccacctcgaccagttcctcgccgaccctggcttcgccgagcgcgccgcgaggctctccggcttcgacgcccgcggcggcggcggaggaggaggctacggcggcgccggcccggcgcaattcggcctccctgacgccggcgcggccggcgcatcgaaggagatggagctcgggaacacccgggacgagtcgtcggtgtctgatccggcgcccggcggcgccgagattccgcccaagggggcttccgacggcaatgcacggaagcggaaggcctccgggaagggcaaaggcaaggacagccccatgtccacctccgccgccaaggaggattccagcggcaagcgttgcaaatcgacggaggagagcaatgcggccgccgaggagaattccggcaaggggaaggccgcgcagagcaacagcgagaatggcggcggcaagaagcaagggaaggacagctcgtcgaagccccccgagccgcccaaggactacatccatgtccgcgcccggcgcggcgaggcgacggacagccacagcctcgccgagagggtgagaagagagaagataagccagaggatgaagctgctgcaggatctcgtgccgggttgtaacaaggtggttggaaaggctgtcatgctcgatgaaatcataaactatgtgcagtcgttgcaacggcaagtcgagtttttgtccatgaagttggccactgtgaatccccagctggacttcaacaatttgcctaacctccttgctaaagatatgcaccagtcatgcagcccgttacagagctcacattttccactagagacctcaggtgcgccgctgccctacattaaccagcctcagcaagggaaccctctcggttgtggcctgacgaacggcatggacaaccagggttctatgcacccattggacccggcattttgccggccaatgggctcgcaccatcctttcctcaatggggttagcgatgcggcttctcaggttggtgctttctggcaagatgatctccaaagtgttgttcagatggatatggggcaaagtcaggagatcgccacctcttccaatagctacaatggatcgttgcaaacagtccacatgaaaatggagctttgacatgaccaaataaaggttcgatccaaagctctgacgcccattgtacatacagagaagtcagcttgccgcggcagcactctgagattcaaccctaacaatgttgggccctagcagtgttttagcttctaatttcccatcttggtgtaatgattctttgaacaaaaatgaaacgcaccatgtacggtagtcgggtgtagtatatatatgtatgctacaagatcgtacataagtcgggtgcagtatatgatgcttcattcagacccttttaccctctcaagcagagagggacgacgtgtaatatcattatttgtattctcattatatttgtagctgatatatatctttaagatccttcttcctgtccatggatcgatctccttaagctgaaactatcccctttttttccccaaaaaaaaaaggggggctcgtgccgaattcctcagcccgggga

SEQ ID NO: 21527 - DNA, 1037 bp, Oryza sativa
  Clone ID: TF_OsC156944_1
agcgttcaatcgatcgatcgatccccgcggctcggtttgtgttgcgttcttccagatcgatttgatagatgggtgctcatggagaccaccgccaccaccaccaccatcaagaagccggggtgctcgtcgacgaggaggaggaggaggtgatcgagcaggcttgcggtggcccgacgagcggcgtggtggagcaagaggtggggggagacggtggtggagtgtgccaagatgctgccggcatggtgttcgaggcgaccagtagcgtcgggagcgtgagcgccaccatggggccgccgccgatcatgtgctggccaccgccggcgcagcctgtccacggtgcaatccaccaccaccacaacctaggcggcggcggcggccagcagagcccgttcttcccgctgctgccgcccctgccccctcagcccccgccgccacccccgttcttcgccgacttctacgcgcggcgggcgctccagtacgcgtacgaccactccggcggcgcgtcgtcgtcgtccgacccgctcggcctcggcgggctctacatgggtcaccacggctcccacgtcgccggcatgatgatgccgccgcccttcgctccgtcgccgttcggcgacctcggccggatgaccgcgcaggagatcatggacgccaaggcgctggccgcgtccaagagccacagcgaggccgagcgccgccgccgcgagcggatcaacgcgcacctcgcccgcctccgcagcctcctccccaacacaaccaagacggacaaggcgtcgctgctcgcggaggtgatccagcacgtcaaggagctgaagcggcagacgtcggagatcacggaggaggcgtgcccgctccccaccgagtcggacgagctcaccgtcgacgcgtcgagcgacgaggacgggcgcctcgtcgtgcgcgcgtcgctctgctgcgacgaccgcaccgacctcctgccggacctcatccgcgcgctcaaggcgctccggctgcgcgcgctcaaggccgagatcaccacactcggcggccgcgtcaagaac

SEQ ID NO: 21528 - DNA, 1574 bp, Oryza sativa
  Clone ID: TF_OsC7742_1
acacgctcctcgctgctgctagtctcctccctcccatgcacgccgcccatggtggaggtggaaggcaaccagtaaccatcttgccaatctcgagttctcagcttgtggtcacaggtggagattggccacttcttgcctacctggagagggccctcatagcgccggcagctgtgctgtcccctcagggctacctgccgtccgctgccagaatgtgcacgacgccgcgctcgtggctgggatccggcttggacgtggaggaaatcgagtagtaccgtggtgtgctgctgcgtgcggaggccagagtgtcggttcacggcggcggcggcggtgtcggtggtggtatgaggtggcactgggtcatcgcgtcgacgtgcgcgcgcaccactgctgcttcgggcgccgtggaggggttctgggaccagaggccgtaccccgtgtcgtcaccgccggcggcgccgacgccagcagcgtccggcggtggtggcggccacgccaaggcggccgcgcggaggcggcggcggcggcccaaggtggtgaagaacaaggaggaggccgagagccagcggcgcaaccacatcgccgtggaacgcaaccggcggcggcagatgaacgagtacctcgccgtgctccgctccctcatgccgccatcctacgcgcagcggggtgaccaggcgtcgatcgtcgccggcgccatcaacttcgtcaaggagctggagcagctgctccagtcgctagaggcccagaagcgtcgcgccgagcacgcgccgccggcgccgccgttcgccgggttcttcacgttccctcagtactctaccacagttggtgacaacaatgcggccggctctggcgccgccgacggcgagggcggctgcggcgcgcggcccggcgcggccgacatcgaggtggccatggcggagagccacgcgaacgtgagggtgctcgcgccgcggcggccgaggcagctgctgaggatggtggtggcgctgcaatgcctcggcctcaccgtgctccacctcaacgtcaccaccaccgccgaccatttggcgctctactccttcagcctcaagatggaggatgaatgccggctttcgtcagtcgacgagatcgccggcgccgtcaatcagatgatgtcggagtctgaagatgaaaagagcctctcggatgaaataacagatacatcacacctaccatgggatcccttctggaccaggaaatgcaaatacccgagcggtgggcggagcgacaacgggtggcagagaacggaggggtggcgggcggtgggcggagcgagcgccgggcggagaagaggagcggcgggtggaagcgaagcgtcggcggggcggtgggtggagcagtggggtggcaggtggaagtggagcgtcggtggggcggtgggccgagcgacggcgggcaccaggggcggtggccgcagcgagaggagcggtgcacgacggcgggagataggagagacggccggcggacgagaggagcaccgcgcggtcggcctcccttcctctccctctgtcatccgcggtgaagagatggggtggaaaagagggcgctcagagcagtag

SEQ ID NO: 21529 - DNA, 1349 bp, Oryza sativa
  Clone ID: TF_OsC64413_1
tcaattagtttttttttttgcttttttttttgataaagaagggcaaagattgccactggcacttcatattataaggattattagtacatacactgggaattagcatcttagggaaggggggaaatgctatgtgcatttacagacacttgtagcatttatgtcagacagatactgattgagatacataacagcaatatggatgcaatctgttcatcatgtcaatattttcagctatctccagaaagacgaccctttgtgcaaagcctacattgaattccttatcatgtttctggtcattctaaattccatcagaggttggtggttgttcagccccagaatttggcagaacagtgctagctgacgctttcggtatctggttttgctgtgctacttgaggcccagaagcatatagtcctgagtagtggcgcaggcatgcacgcgagattcctgcgcaggggaattggtggcttgaagaggtgagcacaagggaccatcactggttccattcgagtagtcgtccacatgatctgaatgtacatttggggtgacttcagatactcgattgcttcatctaatatagatgccatgtcggtcttgttgcaatgaggtatgagttcttgcaatgcgcgcatcttctcgttgatccgatcccttcttctcctctctgacaggttatgaacttcagctgcacgagttctcctctttgatccatatcgccgcgacgacgatttggtctcttcggttgcctcgcattcagcatcctcactgcgactgtctgaatcttctctgcctttcctcttgtgggcactggcgctctcgctgggcaagccggaagcgccgaagttgctgccggagccgcccgacgacgacgtgccggcgccgtcgtgggtgctcgaccggcgcggccgctccggcggcaatgccgcgccggcgtcccggcagcgctgcgccgccgtctccgggatgtggttgctgccgcagaaggccgaacagatgtcgccggtccagctcgacccgatgccgctcctcatcggcggcctcgccgccgggggcggcaagtccggcggcggagcgtggtgagagctcggccccgccgccgcggccgccgggaacgcgtcgccggtgacgctgcgccagagctgcgtgtagaggtccttctccagcgcgtcgtcgagggtgtccgggaaccacgcggcggtctccgtgtcgtcgccggtgagcacgctggcgctctggccgcggccggaggaggagacgaccctcgcctgcgccgcctgcggctgcgccacgacgccgccgttgtgccatagcagctccaccagctcgttgtccgtgctgcaaatcgccat

SEQ ID NO: 21530 - DNA, 1197 bp, Oryza sativa
  Clone ID: TF_OsC547_362
atgggctctgctccgttcggtgacgccgtcgccggcggtgggctctatgagtaccaggggtatcacggtggcttcgccggcggccatggtctcggccaaccggccggccgagcgcccgcgttggacgacggtgaaactgaggggatggacgcatccgccgccgccgcagtcgccgccatggagatggcaaagaggaattgtggaggcggccgggaggagaaggcggcgatggcgctcaagagccacagcgaggcggagcggcggcggcgggagaggatcaacgcccacctcgccacgctccgcaccatggtgccctgcaccgacaagatggacaaggccgcgctgctggctgaggtggtgggccacgtcaagaagctgaagagcgccgcggcgcgcgtcggccggcgcgccaccgtcccgtccggcgccgacgaggtcgccgtcgacgaagcgtccgccaccggaggcggaggagaaggccccctcctcctcagggcgacgctgagctgcgacgaccgcgccgacctcttcgtggacgtcaagcgcgcgctgcagccgctcgggctggaggtggtcggctccgaggtcaccacgctgggcggccgcgtccgcctcgccttcctggtctcgtgcgggtctcgcggcggcgccgccgccgccgccatggcctcggtgcgccacgcgctccagtccgtgctcgacaaggccagctccggcttcgacttcgcgcccagggcggcgtcgctgctgggcagcaaacgccggaaggtctccacgttcgagtcatcgagctcctcgtcttgacaagtttcagagaaaattacgccaaagtcaaaaagatctgatcggttgcagtgatttttgcttctgataaattaatcgatcatggttgtaaaagaaagatacaaagctgaagtgagtttcttctttaatttctttctttctttctttttggcaagattaattactgaagtggcttctcaacattggttagcacttagcattttgctgctgcttatcttttcgaagagcgttgtgctccatgcatgattaattaccttgcatttgacatatatatatttgacattttcacatttcactgcaacttcagtttaactagtaactaggagctttgctccttcatgcatgatgcatgacatcaaaaaaaaaaaaaaaaaaaaaaaacccacgcgtccg

SEQ ID NO: 21531 - DNA, 1700 bp, Oryza sativa
  Clone ID: TF_OsC71941_1
ccatccatccagctagctgctaattggccagctcatacataatcagaaagaagaagaagagggtgctttgtaatatctgcaccatatctttatacacaaattaactattttaatttgttacggttatatcaaaatataatcatctcaaatagtaggtaccaaaagaatcacatcgccctacaggcagactatgattaagaaatatcctctcttaagagcctaatgatgactgttagcttcaagagttcagagagcttcactagctttgccaatgggagttttgcacttgggtctcttccctatgtacagattgtcattcttttccttgatcagtgtggcctaagcaggttagaactccattttcatgtggcctgcttgctgccaaccatggaagtttggtgctgaaaccccattctcctggctctgtccattctcaatatggaaaacactttggagatcatcctcccagaagttcctttgctgcaagtttgcgccggctgttccatcttgaaaagcatactgtgcagcatttgtagcctgagatagagccaggtccaactgattcagggtgcactggctttccatgctgttttgagcaaactgttggaaaacatctccttgttcggcaaaccgaaaagcagaattggagctttctaatgagaaaaccgagcttgctgaagggccgcatgcttggaacatatctttctgcagcagagtaggcaggttactgaaatcaagtggattcacagttgctagcttcatggacaggaactcaacttgccgttgaagcgattgcacgtagtttatgatctcatcaagcatgagtgccttgccaattaccttgttgcatcctggaaccaggtcctggagaaccttcatcctctggctgatcctctctcttctgaccctctcagcgaggctgtggctgtcagtggcttggcctcgcctcgcccggacatggacatagtccttgggtggctccaccggcttggcattcttccccttcccttgcttctgcccgccaccgccgccgtcctcgacggagctgtcgctcccggcctgctccgccttcggcttcaccgagctctccttctcgccattgcccgtcttgcacctcttgccatctgattccttctcttccccaaccggaggctccttgcctttgcccttggcggcggcggccgccgccgccgtggacttcctgttcttggcattggcggcggcgtccttcatcgccgacgaggccgggtcggacacggaggacgcctccctggagccacctccggcgaagtcgccgggagccggaggaggcatcccgaagagccccgcccccgcgccgccgtaccgctgcccaacaccgccgccgccgttgttgaagctggacagccgcgcggcgcgctccgcgaaccccgggtcgccgcagagcttgtcgaggccgcagtcgccgccgccgccgccgcctcccggcgccacgatggcgtccagcaccggcacgccgaagtcgagccggggggaggagctgaggaggctggaaatgtagtcgcccccgaccctgccgccgtccatcgccgccgccgtccaagaaacggcacggtgccccttctcttggctcctgtaggggggagagcttggggtggtcggcaatggcggaggaggaggtcaaagaggcggaggcggtgaaggtggaggttcagcccttt

SEQ ID NO: 21532 - DNA, 975 bp, Oryza sativa; identical to SEQ ID NO: 11988
  Clone ID: TF_OsC52485_2

SEQ ID NO: 21533 - DNA, 273 bp, Oryza sativa
  Clone ID: TF_rsicef_8683.y1.abd
ccttacccacggccacggcgacgacgaacgcgagcccgaagcggtccaaggtcgccgccggcgccggagacgacggcgacgccgacgccgacgcggcggaggagaagccggagccagccaaagactacatccatgtgagggcgaggcgggggcaagccaccgatagccatagcctcgccgagagggtgaggagggagaggataagcgagaggatgaagcttctgcagtcgctcgtgccaggctgcaacaagatcaccggcaaggctctcatgc

SEQ ID NO: 21534 - DNA, 1411 bp, Oryza sativa
  Clone ID: TF_OsC50284_1
agctccaacacgctcacccatgcaacccaacgcccgccaaatgcgcggcggcggcggcggcggcggcggcgggcaggacgacttcttcgaccagatgctgtccacgctgccggcggtgtggtccgagctcggctccggcaagcccgcctgggacctcacggccggcgccgtaggaggaggaggaggagcctccgatgaccactccgccgcggcgttcgacgactccgcgctcctcgcctcccgcctccgccagcaccagatcgacggtggaggcgacaagcccatcatgctccaactcagcgacctccaccgtcatcacggcctcgccgccggcgatgacagcggcggcgctgccgggttccttcccctgtcgctgttcgctgaccggtcgcaggacgacatcgacgccgccttcaagtcccccaatggcgctagaggtgaccatgcgctgtacaatgggttcggggccgccggaatgcatggcgccgccgccatgcagccgccgccgttcgggcagggaggatcaatgccggcgcagagcttcggtggcggagcggccgcgagcggcggcggcggcggcgggtcggcgtcggcggcagcggcggctggggcatcgtcgggcggaggggcggcggcgccgccgcggcagcggcagcgggcgaggagagggcaagccactgacccacacagcatcgccgaacgtgtataccactctcccaccacctttcccttctcgcccccattttttattgcctccatgccatgttgtctccggagggagaggatagctgagaggatgaaggcgttgcaggagctggtcccaaatgccaacaagaccgacaaggcatcgatgctcgacgagatcattgattatgtgaagttcctccagctccaagtcaaggttctcagcatgagcagattggggggagcttctgcagtcgcgcctctagtggctaacatgtcatcagagagtaatgggaatggcaatgccaccagcagcagcgggaacggcgaggcggccaatggcagcagcaacggcgacaacaatggtggcggcacactgcgggtgacggagcagcaggtggcgaagctgatggaggaggacatgggctccgccatgcagtacctgcaggggaaggggctatgcctgatgccgatctctctcgcaacggccatctcctccgccacctcctcgtcgctcctcccccgcactgggggaggcgctggagggtccctacatgaaggtggtaatggtacatcaccaccattggtgaatggcaccgccaccggatgtgacgacgccggagtattcttttctgttaaatttgtcgtggagctgtcgtttctcctgctgaatgaagactgtagaggtaaggaggaatcgaaattattggtccagaagggaccctga

SEQ ID NO: 21535 - DNA, 2696 bp, Oryza sativa
  Clone ID: TF_OsC366116_1
atggtttcaaaacggtgcagtgcatcgactgggaaccgtatcggccgatacagaatcaagcgtcgatacatactggttttgagttcatgtcaagctcgggttaagaattcaaaattattgccatacaaggatggagtccaaaatacagcaattgtatctattaattgggccgatttggtcagatcgcatcagctaggtcggtacgatacgtcatcggcctatcgatcgatcggctatcgtgttctaacttcattttattatttatccttgttggttgcagaatcaaaccaactatcacatgaacacacgcgcacacacgaacgtcgcctagtgctgaaatataaaagcgctcgacgacaaggtctcacatgccgcgcacgcgtctactcaagctcaacacaccaaccacttggcgataatactagtataatagttccacgtgacgcgacttacatcagcaaaagcacacgtgacacgttacacccgtgcgcgcgtaacgaccggtcgtcgtgctgcgcggctggcgcgcttcgtgtgtgtcgtactcgatcgtactacgtagtaaagcacggtagcagcgccgtaggttgtatatatataagcgcagagacgcgtgggagctggcgccacggcatgcatgcacagccatggagaacgacgacgacgtggagcatcccttctactacttcgtccacgacgacgcggccgccggcgtcgacgaccacgaggagttgctggcaagcctcggcttcctcctccctcctcctcctccgccgccgccgccaccgcagcctgatcagggaaggagcgccttcgcggcgtaccagagtaccgcggcgatggcgtcgtcgtcgtcgtcgtcggagtctctgagccggcggtaccactcctctgcgtcgaacgtccaccggagaatgcacaggttcctcaggagcatctatgacgacgccggggacgacgcgggggcaaccgcggaaatgcagccggcggagggcgagcagcagcaggcggcgccgagcggcggcagcgcgcggttccggcacatcatgcgggagcggctgcgtcgggagcgcctcagccagggctacgccgacctccaagccatcctcccaaccggcgcatcatcatcaaaagtactcgtaaaatcactcatcaggaactacatgagcggtggcaagaacaccatcgtcgccgcggcggcaaactacatccgggagctggaggggaggaaggggtggctctgcgcgcagaacgagttgctggagcggacgacgccgaagcccggcgccggcatggtggtgaaggtgcgcgccgagagtgagctcggctcgacggtggacgtgttcgaggcggtgctccggcggctcaaggccatggacgagctgcaggtgacggcgatccagtcgtggttcggcgccggcgggatgtggatggacgtcgcggtggagtccaagagacgtgccgcgtgtacgtacgccccacctcgctggaaactgctgagagagaccagacgagtcaaacgaggtcgcagcagtagaattgtcaaattaatcttccttcagctatcggttgcgtctacatcagcaaatgattctccaatcgcgagccgtcacgcgatctgtactacggagtatagtgcctttcagctcgatcgcccccctacttccaggcctcggcacggccacgcgccgtgttcgcaccggccatcacacgcgcgcggtcacggccgcaaaattaaaggaagtcagcgatttggggcgtttttgcggggagtacgtgcgtgctctcgattagcgggaggcgcgcggcatgtcgacgcgcacgtacgtacgtacgtatacgcacgccggtacacggtgggttcgagcaatggaccgaccgacacatgtcatgtacgtgcagacggtgcagcggttgatcgcgtaaggccgattgctgctgtgtcttcttcctgtccgatgcacacggcgcgcggggtcacacccgcaggggagagtggggaggggggaggtcagggacgagatgccgcacgtcgacgtacgcacgcacgcacgccaggagagcaatggaccgctggacgccatgtcatatcacatatgtcacctgacatacgtgcagtggttgatcgggaaacacagttgcttgtgtgttttcgtcgccgtgctgttcgctacgtgttgtacaggaatgaacacgactgctcgatagtagcagggcgccaggatgacgatgggaagcggcagcggcgggacgacaacgtttgtcgcggagtggttggtcgagcggggatgcagagcggcggtggagaatacgttcgatccagcggcggcccttcctctccccaccgtcgcggcgacgccatggacgagctcgattgcggtgagcaccaactcaacggcaccaccagtgtggagatccaccttgaggatggccctcgagtatgtgcttgtactgcgttggcatcagctctgagattgccagcgctccacccactgcccttgcaccctgcccaagtgccaatcgaggttggtggcgtggaaggtggcgatggcggtaaggttgaagctggcgccgttgaggacgtcacaaaggaagttaaaggcgaagaggagcacgaagaggtggcaaacggtgacaaagagagcgtagtggatcccttcctagatgttgaggtaggaggtgactaccgctattga

SEQ ID NO: 21536 - DNA, 1188 bp, Oryza sativa
  Clone ID: TF_OsC43939_1
aagcgaagaaagagcgcgtccgcgtcgtcgtcgtcgtccgcctgcctgcctgcctacccacgtcgcgctcgcgtgcgcgctgccgcttagtcgcgccaaaaaggcggggggaggggaggcgcgtgcctgcccccgatcgcatatcgcattctccactcgcttgcgtttgccgttgcgtttgcgttttgcgtagcaagggaagggagagagctcgtgcttttggattggccgcgatgagctgcgggggcgccgggcagagcgggtggctgctcgagtacgggctggtggaggaggagatccagggctccgacttcatctacatggtcgacgaccccgcggccgtctccagcgtgctactgggcttcgacgttcccaggaaggaggacggcagcggcggccaggacaactctgcctccaagaaaagatctcgtccagaatcgagcgcaccgccgggcaccaaggcttgccgcgaaaagctccggcgagacaggctcaatgaaaggttcaacgagctcagcgcgatcttggagcccggcaagccgccgagggccgacaaggtctccatcctgagcgacgccgcccgtctcctgagccagctgcgcgccgaggcccagaagctcaagagctcgaacgagtcgctccaggactccatcaagagcctcaaggccgagaagtcggagctgcgtgacgagaagacgaggctcaaggccgagagggagaggctggagcaaatgctcaagggcgtcggcgccgccacaccggcggctccagcgccgttcgtcccgcaccacgccgcggcggtggcggccgcaccggcgtaccatccggcggcgttcgcgcaggccggcggcaagtacgtgccgtacgccaccagctacgcgccgccggccgcgttctggcagtggataccgccgacgtccctcgacacgtccaaggaccccgtgatgtggccgccggttgcatgatcagctgctgctgtcaccgaaaatgccgtagaaattgaccaaagagcacctgatgaaagcctcgggtgcagttatgtgattgtgttgtggataaatgatcaaggatcaagggatcaccagaagaaatttcctggtgatcattgctcgccggagcagtctatgtaacaacccaattgctaaagtaattaaggcaattattattacatcaagatggtgtttatgt

SEQ ID NO: 21537 - DNA, 912 bp, Oryza sativa; identical to SEQ ID NO: 11989
  Clone ID: TF_OsC83673_1

SEQ ID NO: 21538 - DNA, 1775 bp, Oryza sativa
  Clone ID: TF_OsC798_1
ccacctccgcccggtagcgccagcgccgctcgtcggcgatgtacggctcgccggtttccaaggatctgaacctcccggtgcagccgccggcgatgagctcgtcgggcttgctgcggtacagatcggcgccgagcacgctgctcgccgagttctgcgacgacttcctcccgcccgccgccgcgccccgcgccgccagccccgacgccgacaacgtcttctcccgcttcctcgccgaccaccagatccgtgacaagtctccccccgccaccgccgccgccgccgccgctgccgcgcacttccccgacgagcccaccatggccacccagcaccaccaccagcagcagattcaattccagcaccacccacggcagatggccccgggcgaagggcacgaccgcacccaaagggcatgcagcagtggcatcggcaccgccggctcttaaacggctggtggccttggtggcgggatgaactcgctgatcaatttggcaaattgattcatggagcacatttgcattttcgaagcatgtggcatgctttcttcagcgttcatcaaagaagctgggtttgggtcgcacatcgtagacgtagcgaacgccaccgccgaagcctgctccaccagcggcactgggggcttgatgaaggggcagctcagattctctccgcggtagggctcgctcatgtcgcagctctcgtagttggactgcgaggagattgcagggaggagccccgagggcgcctgtagggatggaggcgcaggtggccggggttacctctccgggtacccgatgagctccgggtgggaggagtcgtcgctcatgtcggacacgaacatctccggcgtgaagcgccagcgcgactcgtcggagccgtcccagaacggcggcggcggcggcggcctggcgcaccagttcagcctgccgaagacctcgtcggagatggcggccatcgagaagttcctccagttccaggacgcggtgccctgcaagatccgcgccaagcgcggctgcgccacgcacccgcgcagcatcgccgagcgggtgaggaggacaaggatcagcgagcgaatcaggaagctgcaagaactcgtgccaaacatggacaagcaaaccaacactgctgacatgctggatttggctgttgactacatcaaggatcttcagaagcaggtcaagggattaaacgacagccgagctaactgcacctgctcagcgaagcatcagcagtactctggctagaaagctttgtacaagtcatggagacttcagaaaagaacacaagattgttttggagattaggcaggactgagacgatctctgaagatgtgtaatggttaatttcatttgtttgggggggtttaattagagaggcacatggaagaaaaggctcttgtgtgccaaagcacctgtataagcaaagggcaatggagcagtggcatcatcaggattcaagtgataaaaagaaaaaggaaaaacaagggagaaaaagggtgggagatgggtgaaacaattgtatagttttcttgtaacttttgccatatatacccctgcatgccccatgtccagtgcattttcgatagaaatttattactgctagtagtttgtaggttagtagtctcatttaacaccatggctctcgccgacctgctcatctcactaataaatattattgcagtggctttgccccttgcttttttgcggtcaagttgttgccaaggagtatatgatcatcatcaagtggtgaaagccattttttcaaaaaaaaaaaaaaaaaaa

SEQ ID NO: 21539 - DNA, 565 bp, Oryza sativa
  Clone ID: TF_rsicee_12437.y1.abd
gcacgaggagaaataatcgaacctcatatagcattattgagttaatcgtcattaattcatataggtggggattttggatagatggctgcatgccagcagcagatttggcaagaagggaagcagcagcagcatctgcaccacggtggctatgatgatctttcttcagtgtacagaggcacggttgtgctgccacggcggcagggcggcctggcgcgggagccgccgccgccgcggccgtcatcgtcgtcggggaggagcgcggcggctcaggcgacggcgatgaggatccacagcgaggctgagaggcggcggcgggagaggattaatgctcacctggctacactgaggaggatactccctgatgctaagcagatggacaaggccaccttgctagccagcgtggtgaaccaagtgaagcacctcaagacgagagccaccgaggccaccacgccgtcgacggcggcgaccatcccaccggaggccaacgaggtgaccgtccaatgctacgccggcggcgagcacaccgcggccgcgcgcacctacgtccgcgccaccgtcagctgcg

SEQ ID NO: 21540 - DNA, 1790 bp, Oryza sativa
  Clone ID: TF_OsC2018_11
gagccttgtggacagagaaattaaacagttaagttctagatttctatcgtggtgatggcatctgctcctccagttcaggaagaagccctacagccagggacgaaccacttcaggagccggcttgctgctgctgtgaggagcatcagttggagttacaccatcttttggtccacttcaaccagtctcccgggagttctgacttggaacgatggattctacaacggcgaggtaaagacgaggaagatatccaacttagaggacctcaccgctgaccagctcgtcctgcggagaagcgagcaactgagcgagctctactactctctcctgtccggcgagtgcgaccaccgggcaaggaagcccgtcgccgcactgtcgccggaagatatcgcggacacagaatggtactacgttgtctgcatgacatacgcctttcgacccggccaagggttacccggcagaagctatgcaagcaatcgatctgtttggttgtgcaatgctcagtctgcagatagcaaaacctttctacgtgcgctcttagcgaagagcgcgtctattcagacaattgtctgcatccccttcatgagtggcgtgcttgagctgggaaccactgatccggtttcggaggacccaaacttggtaaaccgaatcgttgcatatttgaaggagcttcagtttccgatatgcttagaggtaccgagttctactccttctccagacgaaacagaagatgccgacaccgtgttcgatggcctcattgaagaggaccagatggtcatactccagggagaagacgagctaggcgacgtcgtcgtcgctgagtgcgagaccaacggcgccaaccccgaaacgatcaccatggagaccgacgagttctacagcctctgcgaggagctggacctggacctcggttcttatcagctagtcccgacgtcggcacgggagacggtggctgcggcggcggcggcggctaacgatgtcgacggcgttgcatactctcacgcctcgtgtttcgtgtcatggaaaagagcgaacccggcggagaaggtggtggccgtgccgatgactgcaggcatagagtcacagaagttgctgaagaaagctgtaggcggcggcaccgcatggatgagtaatattgatgatcgtggtagcgtggcaataacgacgactccaggaagtaacatcaagagccatgtcatgtcagagagaaggcgccgagagaagctcaacgagatgttcctcattctgaagtcactactcccctccgtccgcaaggttgacaaggcatccatacttgcagaaacgataacctacctcaaagtgttagagaaaagagtgaaagagctggagtccagcagcagggagccatcgcgttggcgcccaaccgaaattggacaggggaaggcgccgtaagatcaccgggaaggaggtctatgagatcggtgtcagtggtggtacctcgtcggtacctcgtcaacaccgtacgtatatgatatgcatgtataagatcaccgggcaggaggtctctgagatggatgtcatacggtgttgacgaggtaccgtacgtatgatatatagttatcgttttcattatggaaaaaaaattccgaattacctcgtgtactataaaagacgcgaatattagggaagaatctaatatcaaataattagaaggggtgaggtttcgaatccaggtcgtctatcacaccaccttgtgaagctagccggaaaacccctaagcgtttttttacctccatgtactattggtgccatctgaattaccgcttactaat

SEQ ID NO: 21541 - DNA, 780 bp, Oryza sativa
  Clone ID: TF_LIB4370-003-R1-K1-G9
aagaaagctctcagaactctccatctctaggccagcttagggctggaccagctagcagccattggtagcctgtatcagttcataaggggaggaggtgaaggcaaggaggcagctagccaagaagaagagcagacaccaaaactcaggaaggtgaatatattcttgaaaagatccgatggaagcaagaaggcctacccctaccaggagaagcagatctgctgagttccacaatttttcagaaaggaggagaagggataggatcaatgagaagctgaaggcgctgcaagagctacttccaaattgcaccaagaccgacaaagtttcgatgctggatgaagcgatcgactacctgaaatcactccaactacaactccagatgctggtcatggggaagggaatggcaccggttgttcctcctgagctgcaacaatacatgcactatatcacagctgatccttctcaaattcctcccatacgcccctccgagccgcggccatttcagataacccacgccacccaacagagacagtctaacgtcgagtcggatttcttgagccagatgcagaatttgcacccttcagagccacctcaaaatttcctcagaccaccaaaattgcagttgtacacgccggagcagcagagaagaggtctagctagtagcagtggccacaacagcggttggatcacggagaggaattcatcgtacaacttcttggagtgatgaccacctgacgagttactaagagatccagaagcagatgcagtctagactctactact

SEQ ID NO: 21542 - DNA, 2861 bp, Oryza sativa
  Clone ID: TF_OsC173150_1
tctgcatatcttattttcttctcttttcttctccctgctgctgctgctcccgaccctgccccggccgtggtacacgagatccgccgccgccaccggagtcctcgtcgtcgctgccggctggagagcgtgctgttgggggaggtcacgccgggctcctcgtcctcctcgctgcagctgcgccccccccccctcgccgtcgtcgtctccgccactagcgctggccggttcatgtcaatcccccgcaggaacggcatctcgacgtcgtggcacgccatcatcaccgtccttccccgaccggaggagaagaggccagcgccgccgttccatccacacagctgttgcggctgcggggcagcaccacggcgcgatggcggctcgtcggctgaagaacgaggagaggataaaaaggaaaagagacggggaagagagagagatcgcggtgatggccggagaagcggaggatggcgacggcgagaggttgcggctgttcgtcagccaggtgccctgcagcatggcggaggaggagatcctcgccgtggaccgtgccgctctcgtgccaacgacgccaccgtcatccgcgactaagctgccgtgttcacgtttcgaaggtgcctccggaagtccagatgacaacttggatcgccctgccaccgccgcggagcctcgaggcggccacggcgtcgtgcacggcgacggacagcgccgtcccgtcgggaggaaggcggctgggccccgcaggaccggacgctcctcctcctccgcctcttcctcttcctcccccttcgttctccacacccactctcgggctgcggcttctccggcttccgcgcctcttcctctgtcgggttaacaaagttactttcagcgtcagagggtatttcgtacaaaaaggaactgctgttggtacaggattatcagctgtgaacactttctgtttctagaggccattctctgtaacactttggagcatcaattttgtagcgtgctatcatggactactctgctggttcctacatgtggcctggcaattcaggttctgagaactataattttgttgacggttcgtcggaatcatatgcagaagaaggaagcctaccaccttcaggctatttcatgggagctggatcagatcgcagtttaaagatcacggagaatgaaaggaaccccactatgcttgcaaatggatgcttgccatacaacacccaggctcatccattatctggccagattctacctaagggtgagctccctaacaatcttctggatcttcaacagctacagaacagcagcaatctgcgaagcaattcaattcccccaggggttcttcagtgcaattcaacatctggaacatttgatgcgaaattggatacacctggtcttgcagaactgcctcatgctttgtccagttcaattgatagcaatggtagtgacatttctgcttttcttgctgatgtgcatgccgtttcttcagccccgacgttgtgttcagcattccaaaacgtttcctccttcatggaaccagtaaatctagatgctttcggtttccaaggggcacaaaatgttgctatgttgaacaaaacaagtcttccaaatgggaatccctcgctgtttgataatgctgccatagcatcactacatgatagcaaagagtttctcaatggtggttccatcccttcgtttggtactgtcctgcaggcactaggagcgggtggtttgaaggctgctcaacaggagcaaaatatccggaatatacctctccctacattcacatctggtagtcatttggcagttactgatgcacaagggccaccacttccttcaaagataccaccattgatccatgaccataatagtgagtaccctattaaccattcttctgatgtggaaccccaagcaaattcagctcctggaaatagtgccaatgcgaagccacgtacaagggctcgccgtggacaggcaactgatcctcacagtattgctgaacggcttcgccgagagaaaatttcagaaaggatgaaaaatctccaagtccttgtcccaaactccaataaggcagataaggcatcaatgcttgatgaaataattgattatgtgaaatttcttcagcttcaggtcaaggtattgagcatgagcaggctaggagctcctggagcagttcttccccttcttagggaatctcaaaccgagtgccatagtaatccatctctatcagcttcaaccatttcacaagggccaccagacatgccagactcagaagacagctctgcctttgagcaagaggtagtgaagctgatggaaacgagcatcatcagcgcgatgcagtatcttcagaacaagggtctctgcctgatgcccattgctctcgcttcggccatatccaaccagaaaggcatggctgctgctgctgcaatccctcctgaaaaatgaaaaaaaaaatgaaatcggaaaaatatggggggaacaactgcagaagacataataactcaacggctgcagaaatgtgctggacactgcaggttttgtgaatgaagtgaaatccaatccagggggtcataaaacataggaagttatctgactaattcaggcttatgacacaatctactctatagtctatagctattgtgtgcctgttgcacatcagttgatgtgtattcttttgttttttttgtattgcatccggatgctaattaggtagtagtgtttcctttgatgtacatgagtattatctatgcggttttatctaatgtgcatataaagtaaaatctggtatgttgctgctaaaaaaaagtattatctatgcggttttatctaatgtgcataaataatactcatgtacatcaaaggaaacactaccctcgtgc

SEQ ID NO: 21543 - DNA, 2517 bp, Oryza sativa
  Clone ID: TF_OsC377_1
tgctagatctctcctccacatccggactctcgctatcaaatttacgtaagcacagtgagaaaaataattagcagggccaccagcatactgttggcgtacagctgcaaatacctgtcgagctaatcttggttaaaatgttggtttagattctgttgcttaattgctggtgaggaggagcactcactatatagctcaatccatcttcctctgcaaaacgtacgcacgacactctggttgcgatcgattatcactccctgatcgcgagttcttggtctgcgagcgtctgcaattaagggaagagttcctctttgttttgacgaggatcgaggattgtttggacgaaccagcagcagcgtacgtgccaatttcattgatagtcgctgtatctgatttacaggaaaaatacatacaacagtgtgtggtaaagtatactactattactggagtactaattaatggaagagacccctctgccatccgggaagaacttcaggagccagcttgctgctgcagcgaggagcatcaattggacgtatgccatattttggtccatttcaaccagccgcccaggagttctgacttggaaggacggcttctacaacggcgagataaagacgaggaagatcacgaactccatgaacctcacggccgacgagctggtcctgcagagaagcgagcagctgagggagctctacgactctctcctctccggcgagtgcggccaccgagcgaggaggcccgtcgctgcgctgttgccggaagatctcgcggacacggaatggtactacgtcgtctgcatgacctacgccttcggcccccgccaagggttgccaggcaaaagcttcgcaagcaatgaatttgtttggctgacaaacgctcagtctgcagatagaaaactattccatcgcgcgcttatagcaaagagtgcatctattaagacaatcgtctgcgtgccatttatcatgcatggtgtccttgagctcgggaccactgatccgatttcggaggacccggctctcgtcgaccgtatcgcggcgtcgttctgggatacgccgccccgcgcggcgttctcgtcggaggcgggagacgccgacatcgtcgtcttcgaagacctcgaccatggcaacgccgccgtcgaagcgacgacgacgacggtcccgggggagccacacgcggtagccggcggcgaggtcgccgagtgcgagcccaacgccgacaacgacctcgagcagatcaccatggacgacatcggcgagctctacagcctctgcgaggagctggacgtcgtgcgccctctcgacgacgacagtagcagctgggcggtcgcggatccctggtcgtcctttcagctagttccgacgtcttctccggcgccggatcaggcgccggcggcggaagctactgacgtcgacgacgtcgtcgtcgccgctttagacggtagctccattgatggatcttgcaggccgtcgccgtcgagttttgtggcgtggaagaggacggcggactcggacgaggtgcaggccgtgccgctcatcagcggagagccgccacagaagttgctgaagaaagctgtcgccggagccggtgcctggatgaacaatggtgacagcagcgcggcggcgatgacgactcaaggaagcagcatcaagaaccatgtcatgtcagagagaaggcgccgggagaagctcaacgagatgttcctgattctcaaatcagttgtcccgtccattcacagggtggacaaagcatccattctcgcagaaacgatagcctacctcaaagagctggagaaaagagtggaagagctggaatccagcagccaaccatcgccatgtccattggaaacaagaagcaggcgaaagtgccgtgagatcactgggaagaaggtttctgcaggagcgaagagaaaggcgccggcgccggaggtggccagcgacgacgacaccgacggggagcggcgccattgtgtgagcaacgtgaacgtcaccatcatggacaacaaggaggttctcctcgagctgcaatgccagtggaaggaattgctgatgacgagagtgttcgacgcgatcaagggagtctccctggatgtcctctcggtgcaggcatcaacatcggatggtctccttggactgaagatacaagccaagtttgcctcatctgctgccgtcgaacctgggatgattacagaagctctccggaaagctatagcaagctagctagctagaaggttgagatcagtatcgtcttggtcatttgctctcatcttgtttaggaggtaccgggaaataaatcttgtcgctctgatcagtgcctccttactagtctcgtgatctgttgtaagtaatagttagacatgcatatatatcatacaacaacgtttgatcttgcatggtagcatatatatgtacaccacatttcttatatctttactcctttaaaattcagtgaggatggtaagtgatgaatctgccaccccatcaccaactccctaaaattctgaaaaaaaaaaaaaaaaaa

SEQ ID NO: 21544 - DNA, 792 bp, Oryza sativa; identical to SEQ ID NO: 11999
  Clone ID: TF_OsC374879_1

SEQ ID NO: 21545 - DNA, 1458 bp, Oryza sativa
  Clone ID: TF_OsC1427_102
ctagccgagggcgtgggagacggctgcttctggtctgcgcggcatcgtttggtggaagggtcggagaccggcttggcgcagagaagcgcagccgatggcagcggaggccggctcggcgcgagaggcacgggcggcggagatggaggccggcttggcgcgagaggcgcagccgatggagggaggccggattggcgcgagaggcgcgtccggtggaggaggtcggcttggcgcagagaggcgcggccggcggtggaggaggcgacctaggtgtgaggaggagctgccggtgggcgtggcggtcttcggcgcacgaaggggtgtgatgttcctgtacttgtaccagcagaggagcatggcgacgcacctgcggaagatgtagaacctggacctctgctcccgcgccgccgcctgtaggcaggaggcctgcatggcgaagtcatcgaagcagctgatgacgcactgctcgatctccacgcccagcgcctccagcgcggccagcgtcgacggcagcagctcggggatcgccgcgcatgccatctcgatcctcgtgcttccgttctccctcctctccacctcgaacctcgtcgagtttctgataagcggcgtctcttcgccggagctcgacgacggcggaggcttgagcgtgttcagcttcagcatggagagattctccgtggaggaggaggatgagtcaccggtggcggcctcgacctggaggttcttgatccgatccatcagctccttcacgtagccgatggtgtcgccgagaatcgaggtcctgtccatcttgctgatcctaggcacgacggagcggagcatggagaggcggtcgttgagccgcttccgccgccgccgctccgccatcaggttcttggacggcgcgcctggttgcggcggcctgcagcttcttgggcggacgctcgccgccgcgccgccgccgccgccgaacacgaacatgggcgccagctcgccactatcaccaccgcctccagcgccacgtcgcgccttgcatctctcctcctcctccaccgccgccaccgccaccgcagacgacgcagcttcgcgtctcggatccatggcggccaccatcacctgagcggcggcggtggcacggacagcgccgcctgatctcttgtacgggttgcacacttcacccaagcaatcaattgaatcaaactcaaagctgacctcgtgcagaggcggacaaggagtcgtcgtcgtcagaggcacaggcagtgggaacgacggcggcggcggcgaggcaagcgtgttcctcgcgttgccgcccccgacgaggaggtcaccgagcatgacgccgtcgccgcacatcgggctcatcatcatcgggtacgcctgaagccacagatcttccggcgtcgtcgtcggtgtgcctctccggagcggcgccatgagctcctccaggagggacgacgagccgtcgtcgtccattagctccat

SEQ ID NO: 21546 - DNA, 1639 bp, Oryza sativa
  Clone ID: TF_OsC58664_1
acccgatgcctcgcctcgccaagaagcccgtacgtaccttcccggctgctccacagttcgggcaccaaaaccgcctcttcctttctccgggtgcagtcaggatggcgttagaggccgtggtgtttccgcagggccatttcggctacgggtgcggaagggactcgccggcgtacgggatgccgtggtgcgacgtcctggctgctgccggcggcggcggcggcttcggtgagttttacggagtggacgagtgggatgaccagctgcaggtcgcctccgtggatgagtgggaggtggcatccaaggataactcggatgcttccacggagggcaaggcggcggcggcggagcgggcggagccggtggccgccgggaggaggaaacggaggcggacgaaggtcgtcaagaacaaggaggagatcgagtgccagcggatgacccacattgccgtcgagcgcaaccgccgccgccagatgaacgagtacctcgccgtgctccgctccctcatgccggcgtcctactcgcagaggggtgatcaagcatcgatcgtcggaggagcaatcaactacgtgaaggagctggagcagctactgcagtcgctggaagtccaaaagagcctcaagaaccgcagcggcgccatggacgccgccggcgattcccctttcgccggcttcttcagcttcccacagtactccacgtcgcctcgcactggctgcagcgccgccgccagcgccgggagctccggcagtgcgagcagcgtcgtcatggacgacacggcgggctccgcggagagcggccggcagtcggcggccatcgccgacatcgaggtgaccatggtggaagggcacgcgagcctcaaggtgctcgcgcggcggcgaccgaagcagctgctgaagctggtcgtcgggctgcagcagctgcgcatcccgccgctgcatctcaacgtgaccaccgtcgacgccatggtcctctactccttcagcctcaaggtggaggatgattccaagctgggctctgtggaagacattgccaccgctgtgcatcagatcctgggcagcattcagcagcaggaggccgtcctctccatcagctgacggcgcgatcgatagctgctgaggatgatggcagggccatgagaccaccgcctcgcgtccgtccacctcatcgtcgccagcgccggccatcgatatctctactcccttaaatgtgtgaatgtgattgtaccctagccaacagagtgctgcatgcatgcagtatctctacacgccttaatgagaaatctataccaacagcagcagcagcagcagaagcagagctgtagctagatcagctagagtattttcttagaacatttagcaatggcaaaaatggtcaatattaatatgcgccaaccgtgtgtaatgtgtgcactttcgattcttctagaactctgtacgctggatgcacatgtaccgcagttactacacccacgtacatttctgtagttcatcttcacttcaattaatgcatcatggtctaccactctgtacttataaaagaagtcgtttagaataatatttaagtcaaccttgagaatataaaaaaaaaaaaaaaaaaactcgagactagttctccctcgtgccgaattcctgcagcccgggga

SEQ ID NO: 21547 - DNA, 616 bp, Oryza sativa
  Clone ID: TF_OsC264262_1
cggcacgcgcgcgcgccctcgccttcctcctcctcgccgttgatcgatcgatctcctgctcgatctcttgggccctagctacgatcaccaactagcttcaagcttcctctcccagcagctgcagcggcagctagccagcgatcgatcgatcgatcgagctacacgtgagatcgagtgcgtgcagtagtgtgtggtgtgcatgtttccggtggaggtggcggcggcggcggcggcggcggggaggatgcagggggaggcggtggtgccgatgatgctgccgcccttcttcatggactcggggatctggccggcggcggcgggggtcgtggatgtcgccgcgtcggcggaggaagaggcggcggcggcggcggcggcgcaggaccgcgcgctggcggcgtcgcgcaaccaccgcgaggccgagaagcgccgccgcgagcggatcaagtcgcacctcgaccgcctccgcgccgtcctcgcatgcgaccccaagatagacaaggcgtcgctgctggcgaaggcggtggagagggtgcgcgacctgaagcagcggatggccggcatcggcgaggcggcgccggcgcacctgttcccgacggagcacgacgagatcgtggtg

SEQ ID NO: 21548 - DNA, 1622 bp, Oryza sativa
  Clone ID: TF_OsC798_2
atgtacggcgcgccggtgtccaaggacctgagcctgcagccagccggggtgcggacgccgccgcagatgagctcgccgggcttgctgcggtacaggtcagcgccgagcacgctgctcggggaggtctgcggcgacttcgtcctccccggtggtggtggtggtggtgggcagctgcagctgcagctgcagcagcagcggcctgggagcccggaccacgccgcggacaccgtcctcgcgcgcttcctcgccggccatggcggccacgacaacaagcctccccgccccgccgcccacttcgccccaccggaagactccatggcctcgcatcagcagcagctcatgtaccagtcgcatcagcagcagcagcagatggcttccgccatggagggactctaccgcaccgtcagctccggcggcacggagtccaccgccgccgccgccggcaacagcctcctccggcagagcagctcccccgccggcttcctcaaccatcttaccatggacaacggatacgggaatatgctaagagcgggcatgggcggcggcggcggtggcggcgacccgcggctcaaggggcagctcagcttctcgtcgcggcaggggtcggtgatgtcccagatctcggagatgggcagcgaggacgaggagctcgccggcggcggcggcagcccggaggctggcagcaacggcggtggcgccgcacgcggcggctacggcggcgggtacgcgatggggtcctccgcctgggaggagccctcgccgccggcgacgtcgctcctcccggacagcagcctcccgtccaagcgcccccgcgacgacctgccgcggcagctcagcctcccggcggcgtccaagaacagcagcaagcccccctcctccgcctccgccgccgcgtcgccggagatggccgccatcgagaagttcctccagttccaggacgccgtcccctgcaagatccgcgccaagcgcggctgcgccacccacccccgcagcatcgccgagcgggtgaggaggacgcggatcagcgagcggatacggaagctgcaggagctcgtccccaacatggaaaagcaaaccaacactgctgacatgttggatcttgccgtggactacatcaaggagctccagaagcaggtcaaggtgttaaacgacagccgttccagctgcacctgctcggcgagcaagcagaagcacttcgccggctaaatcaatcaagtcaatcaatcgccatgaccggtgcagcagtgcgcaacacacgaacggccgcaaaaggcatgcagcagaagcatctgcaccggcagtttttctaagcttcgtttccttctttgctgatgaattcgctggtctatctggtaaattgaacatgagggcattggattttggagcagtggcatgcattcttcagagttcacaaagatgatgggttggggttccacatggtagtggtagactactgtagctgcaaagcttgattaattaattagcctgttcttttgataatgaaggagaggagagtaactcacaagtgtatagatggttgtctcatctctgtttgtcatagtacacaccaagtgcaagttgcagctgtgtctgcttgcaagaaaaaaaaaaaaaaaaaaaga

SEQ ID NO: 21549 - DNA, 3550 bp, Oryza sativa
  Clone ID: TF_OsC8564_1
atgtcccgtgattttttcgcgaagccaagccaagcgaagccaagcaaagggaagcgaagcggagaaaagcttgtcttgtagagaggaggggtctctcgtcgtctcgcgtcggaattctcgcgttgtggccgcggcatgattggtccggcgagcgatcgcggcgagtcggcagcggcggcggccgggaggcggtgggattgatcagcgagctacaattatgggcatccaagggaacaaggcgacgacgcgcgagcacgacttcctctcgctgtacaccaccgccgctaaggatccgtctctccagctccacgacgccaagccgccgcctccttcccaaggtttcttcctgaggacgcacgacttcctgcagccgctggagaagccgacgccggcgccggcgccgcctccgacgagccagctgcagcagcagcagcagcagcaagcgttccccggcggcatcggaacgttcagcatcagccacgtcgccggcgcacgcccggtcgcggctgccgtccaccgcggcgaggcagcagcaggagtggaaggggcgagtcgggggaggcgggttcatggactctggctccagatccagtggcggcgccgggttcgacaccagcggacgctccccttcgccggcgtagggcaggtcgccgccaccgcggcgaggcagcagcaggagaggaaggggcgaatcgggggaggcgggttcatggactctggctccagatctagtggcggcgccgggttcgacgacgacgatggcgtggccgcgcggcgtgaggtctcgtccgcgctcaaagagttgacagtgagggtggatgggaagggtgggagctgcagtggaagtggtactgatcagcggcccagctcaccacgttcaaagcactctgctaccgagcagcgtcggcgcagcaagatcaatgacaggtttcagatacttagggagctgttacctcatagcgaccaaaagagagacaaagcaacatttctgttagaggttattgaatacatacgctttttgcaagagaaagtgcagaagtttgaagcttcagtccctgaatggaaccaagaaaatgcaaagatacttccatggtcaaacagatcacgcggtacgcgtcagaaaaattcacaaagtaaaggtcatcctggataacacacttgtcgcgatgtactttgcctgtggagatgtccagcgcgcacggcttgtgtttgagggaatgtgtgaccgggatgtcatctcatggacatcgctaatctcaggactagtgcaaaatggcagccccttgcaaggtatacagctagcgtgtcctacagatcagcgagaaactccgacaaacattaccaacaatgttacatcccaagcccaagcccagtgggctagtccggctggtgtggatgactgtgcaatgaacagcgaaatgttaaataaccaacagttggcaattgatgaaggaacaataagcttgtcaagccaatattcccaagcagctacttggtacgttgactcatgcccttgaaagctcaggtgttgatctgtcccaagccagcatatctgtgcagatcaaccttggcaagcgagctgttaagagacctggtgctgatggatcctccagttctaaggagctccccagtacatcagcgaacaatgaaaacatgggtcaccagctgacgatgttagggggtggtactgaagaacttccacacccaacgaagcgccataaatcgggcaacagctgatggcggttctcactctgttgcatcatccagaccgattgatcattctttcctccctaccaaccagccagaacattccagaattggatgtacattatgttagcagtgacggcatcgcgttgaacaagtcagaccttggtgtaattctttcattgccttgtcaatcaggcttgcactttgtttcaggacaaaaagcttgctggagtaagaccaaatgacgtgacattccttggacttctatcagcatgcaaccatgcaggtgctgttgagaaaggatggagctactttcactctatgaaacctgactatggaattgagccccagcaccagcactatgcttgcgtggtagacctgctttctcgtgctggacagcttgatagagcctaccaatttatactgaatatgcccatcaaaccagagatgactgtctggggcgctttactccatggttgcaagatgcacgggcactcaaacatggccatggctgaatgcgcagcacagcacatttttgagttggagcagtccaatgcagggcactatgttcagcttgcaaacatgtatgcatctgcagggatgtggagccaagtcgctggcatgcgagtcaccatgagagagaggggtgtcaccaaggcaacggggtttagcttcatcgaggttgatggagagatgcactcattccatgcttgggatcactcgcacccgagggccaccgagatattcgccatgctgtgccttctttctccaactccaaccggagttggaggagttgacagtgagggtggatgggaagggtgggagctgcagtggaagtggtttcagatacttagggagctgttacctcatagcgaccaaaagagagacaaagcaacatttctgttagaggttattgaatacatacgctttttgcaagagaaagtgcagaagtttgaagcttcagtccctgaatggaaccaagaaaatgcaaagatacttccatggtcaaacatatattttagatcgttctggaaaaattcacaaagtaaaggtcagaaccctggagatgatttgcctgatccttcacagttcatccggaatgggtcctcttctgggtataatttcactggcaaacctgatgataaccacaacatggtgacatcagcagctgcctcaggggcacaagaactggtggaaactgaccatgcagctagcgtgtcctacagatcagcagaaactccgacaaacattaccaacaatgttacatcccaagcccaagcccagtgggctagtccggctggtgtggatgactgtgcaatgaacagcgaaatgttaaataaccaacagttggcaattgatgaaggaacaataagcttgtcaagccaatattcccaacagctacttggtacgttgactcatgcccttgaaagctcaggtgttgatctgtcccaatccagcatatctgtgcagatcaaccttggcaagcgagctgttaagagacctggtgctgatggatcctccagttctaaggagctccccagtacatcagcgaacaacgaaaacatgggtcaccagctgacgatgttagggggtggtactgaagaacttccacacccaacgaagcgccataaatcgggcaacagctgaaaggcgcttctcattgtggattgtgaagctgctcttgtacacaggcttccattcctatgagaagctcccccctgacaagacagtcagtcctacgttgtaacctgtatgataactcagctgcacctgttagctatgtgaagtagtaattcgttgaagtattctagatctctagtgcttcattgcacatcacttctct

SEQ ID NO: 21550 - DNA, 210 bp, Oryza sativa
  Clone ID: TF_rsicee_15174.y1.abd
gcacgagggctttcgagctcgcagaggagaagagaccggatcaacgagaagatgcgggcgctgcaagagctcatcccaaactgcaacaagattgacaaggcgtcgatgctggaggaagccatcgagtacctcaagacgctgcagctgcaggtgcagatgatgtcgatggggacggggatgttcgtgccgccgatgatgctgccggcggcg

SEQ ID NO: 21551 - DNA, 2603 bp, Oryza sativa
  Clone ID: TF_OsC9971_1
atccccgggctgcaggaattggcacgaggcctcttcttctctctctccacatcacaagtcgcctccctcctccgcccccgaaatcccctcgcgaaccagagaaacctgaggcaccaccatcaccaccaccgcctccgcctcctgcgcgcgcggcgaattcgggggaccctcgcgctcgcgtggggtgtgggtggggggagatccgggcgtcgccgtcgccggggggggagggtgctcggattcagccagcggcgggtgggggggcccgcctctttcttcttgggggggcgcggaggagaccccgcccgtcctggattccgtggccgcggcgccgattcgggcgcgggagccccagcacggtattatggtgatgaagatggaggctgatgaggatggtgccaatggcggaactggtgggacatggactgacgaggaccgagcgctcaccgccagtgtgcttggaacggatgcttttgcttacttgacaaaaggaggtggtgccatatccgagggccttgttgctgcatctttgccagtggacttgcaaaatagactccaggagcttgtcgaatcagatcgtcctggtgctggttggaactatgccatattctggcagctgtcgcgcacaaagtccggtgaccttgtccttggatggggggatggctcttgccgtgagcctcatgatggtgagatgggacctgctgcttctgcaggtagtgacgaggccaaacagaggatgcgcaagcgtgtgctgcagcgattgcactcagcattcggaggtgttgacgaggaggattatgccccaggcattgatcaggtgacagacacagagatgttttttctagcatctatgtactttgcatttccacgccgtgctggtggccctggtcaagtatttgcagcaggcgtgcccctgtggattcccaacactgaacgtaacgtatttcctgccaattactgttaccggggataccttgcaaatgctgcaggatttagaactattgtgctagttccatttgagaccggtgtacttgaactgggttcgatgcaacaggtagcggagagttctgacactctccagaccataagatctgtgtttgctggggcaattggcaataaagctggagttcagagacacgaggggagtggccctacagataagtcaccaggtttggcaaagatttttgggaaggaccttaaccttggccggccttcagcaggcccaggaactggcgtgtcagaggcagatgaaaggtcgtgggaacaaaggactggtggtgggagctcattgctccccaatgtccaaagaggtttgcagaatttcacttggagtcaggctcggggcctgaattctcatcagcagaagtttggcaacggtatattgattgtgagcaatgaagccacaccgcgcaacaatggaggagttgacagctctactgcaacacagtttcagcttcagaaagcaccaccacttcagaaactaccacagctccagaaatcacatcagctagtaaagccacagcaactagtgagtcagcaacagttgcagcctcaagctcccaggcaaatagatttcagtgctgggaccagttccaaacctggtgttttgactaaaaaaccagctggtattgatggggatggtgcagaggtggatggcttgtgtaaagacgaaggtccgccacctgcattagaagaccggcggcctagaaagaggggaagaaagcctgcaaacgggagggaagagccactaaatcatgttgaggccgagcgccagaggagggagaagctcaaccagcgattctatgcactgagagccgttgtacccaatatatcaaaaatggacaaggcatccctccttggtgacgccataacatacatcactgacctacagaagaagctcaaagagatggaggtagagcgagaaaggcttatcgagtctggaatgatcgatccgagggatcggacgcctcgacctgaggtggacattcaggtggttcaggatgaggttctagtccgagtgatgagccccatggaaagccaccctgtcagggccatcttccaagctttcgaagaggcagaagtccatgcaggggagtcgaagatcacaagcaacaacggcacggccgtgcattctttcatcatcaagtgccctggcgccgaacagcaaacgagggagaaggtgattgccgccatgtctcgcgtgatgaactcagggtagaatcagttggggagtgggcgccaccggtagaggcagctttacttcgttcgctggttgcagacaagcagcaagcagtcggttggacggacacccatccacccacctttcagcgctgttgatagaagaagtttgtaggcagagaaagaaagctcagattctgacttagcgatccaaggggaagacaaagctctcaagttaaaactgccattgttgtatggtaggcttttgtggtcggtgtagtttttctctttttgttgtttattggggagaataccatgttcttagtttattgcttgtggcagaaccataaacagtacatctcgtcaaatgcatgagttgggaaagaagtcacctgcttttctgctaaaaaaaaaaaaaaaaaaaa

SEQ ID NO: 21552 - DNA, 2674 bp, Oryza sativa
  Clone ID: TF_OsC50455_1
atcgcgaagcgtaagctactcaaggccgcgacggagcatgcggtgaagaaccatgacgggaccactgtcgacgcggaggcgagacgagagaatcacggtcataccgcgtacgccgccgaagaggctgcgggctctgaggagagtgtcgagcgcgagggaggaggcgatggcggcgccgagggggaggagggccgggacgctgcagccgagggaggtgaggagggcaaggaagaggaggaggaggcggacagaggtgaggagcgtggcttggaagaggaactgaagagggcttcgagggagaagggtttcgtgaaaggcacaccgaaccaggcagtgtccatctcgctcatcctggaagggactgatgtggacgcaaaggccaagactggcaccctaaagtgctttgctttccttcttaaggctgtgcctgagctatttaagtagactgccgaagggcgtatccgaaaatctgctccaaatgttttcatccttgtgccaactcgcgagttatgccagcaggttcataatgaggcatcatctctccttgaattctgtacatccaaattgaaggttgtgcaagtgaatgcgagcatgtcagacaaagatattaaagttgcattgtctggcccccctaatatacttgttacaactcctgcttgtgttgcatcatgcatatcaaagggcattatccgtggatcatctatcaaagaatcactatcaatgatgattctagacgagatatcatgtgatgctaaggataagatgctttatatccttgtactcctgaagttggagcttattcagaagaaagttctcatatttgtaaactcaattgactcggcattcaaattaaggctgtttctggagaagtttgggataagatcttcagtgctaaatgctgaattaccacaaaattcacgcctccatatcattcaggcattcaatgctaggctatttgattatctgatagcaacggatgacaataagtctaaagaggagaggcaagccaataagggaaacaaaaaggattctagggtgtcacgcaagcagttgcagcaaactttagatgctgaattcggtgttgtcagaggaattgacttcaaaaatgtattcacgttcccattcgaccttttgtttctgaaacaggtagttaattatgacatgcctccagatcctgctgggtatgttcacagagtaggaaggacagggagagcaaataaaactggtgcatccatatcgcttgtttcaccaaaggagaatggcatttttgaagatattgaaaatatgttgaaagatgttgaaaatagagacaccagttgcatttcacctttcccattacttacaaaaaatgccgttgagtctttacgctatagagctcaggatgttgccaggagtgtgacaacccgtgatataaaagaagcacgtcgccaagacataaagaatgaaatcctcaactctgagaagttgaaggctcattttgatgagaatccgagagaccttgatttgctcaaacatgataagttattgagcaacaaggaaatccctgcacacctacgtgatgtccctgagtaccttattgatcccacaacaaaagaagcaagcaatgtagtcaaactttcaagggctgctatggatatcgataagccacggaggaggaaaagaatgggattcaagggaggatctggcagaagtagtgatccccttaagactttctctgctgagttgcaaatggatgcatttttccagctacatatgaggtcctatggaaacatggcagtgcttaaatgcagtggtttagtgaaatatgcaaatggaagtgctgttcgttgttccttgaaagcgtactatttgtggggaaatcacggaggcgagggaggaaggaaagagacggagaacaggatagaagaaagaggaagaaggtggaaagctaatcttttgtgaagcgttcactgccaagtgcgcacagttttgtaggtttctggtatctcgtcctgtaactttgtagcatctccagatatagggggataacaatgtcaagctttactgaatgctgcgtgtgctatgctatgcacaccattatatagacagacgagtagagagtttgtttagtttcagttcttctagaggacgtgcatattgccattcctctatttattcgaggaatatcagcagaaaactatgtttcaagatttttgttgtataaaaaattgcataaaaaggtgatgttttcaggttaagacggctcaagtaaactctagagagaacactgaagctttgtttcgatagaatctgctcaatatcaaagctaagctcagggttgacagttgcgagtttcatcgacaaaaactcaacttgacgttgtagtgactgtacataattgattatctcatcaagcatgactgccttaccagtgatcttactgcagcctgggacaagatcttgaagcagcttcatcctctcgcttatcttttttctcctcagtctttctgcaaggctgtggctattagtggcttggcctcgctttgcccggacatgaacataatcttctttagtaccatcaccatcagaagaatcttccttgctttgcattttggagcaactcttttggttgtcctcctccattgatatcctctcttgctgagatgaaacctctgttgcttgctctactttagta

SEQ ID NO: 21553 - DNA, 1037 bp, Oryza sativa
  unsure (1)..(1037): unsure at all n locations
  Clone ID: TF_OsC105357_1
atggcagctcaggcaagcagcaagcgcggcatgctgctgccacgggaggcggtgctctacgacgacgagccctccatgccgctggagatcttgggctaccacggcaatggcgtcggcggcggtggctgcgttgacgccgattactactacagctggtcggggtccagctccagctccagctcgtcggtgctcagctttgaccaggcggcggtcggcggcagcggcggcggctgcgcccggcagctggctttccatcccggcggcgacgacgacgactgcgccatgtggatggacgccgccgccggcgccatggtcgagaacacgtctgtcgtcgccggcggcggcaacaactactgtcatcgcctgcagttccacggcggcgccgccggtttcggactcgcgagcccaggctcgtcggtcgttgacaacggcctcgaaatccacgagagcaacgtcagcaagccgccaccgccggcagccaagaagcgcgcatgcccgagcggcgaggcgagagcagcggggaagaagcagtgcaggaaagggagcaagccaaacaaggctgcttctgcttcttctccttctccttctccttctccttctccttctcctaacaaggaacaacctcaaagcgccgctgcaaaggtaagaagagagcggatcagtgagaggctcaaagttcttcaggatctcgtgcctaatggcacaaaggtagacttggtcaccatgctagaaaaggcgatcaactacgtcaaattcctccagctgcaagtgaaggttttggctactgatgagttctggccggcacaaggagggaaagcaccagagctctctcaagtcaaggacgccttggacgccatcctatcttctcagcatccaaacaaatgatgttgtgctgctgacacaaaatgcatcaaatttcacaaagctaatattaagtttgatgcatgtaagatctttagaacagaggcaatgtaacagggcttctgctctgaaaagatgagagaattgttctnaaaaaaaaaaaaaanaanaaaaat

SEQ ID NO: 21554 - DNA, 1206 bp, Oryza sativa; identical to SEQ ID NO: 12013
  Clone ID: TF_OsC340364_1

SEQ ID NO: 21555 - DNA, 860 bp, Oryza sativa
  unsure (1)..(860): unsure at all n locations
  Clone ID: TF_OsC83673_2
ttcacatcttactgaacagctactactcctgggagctagctcaagctcaagctcaatctcaagctctttccactaagctccgtgtgtctagctcatcaatacctggctagctagctagggtgttgatcgatatatatnctaaaataaggatggacttcgacttgttcaattcctacccggaatcgcagcttgacctgatgagcacgatgcttcagctggagcagctcactgcgctcagtgaccagtcgctgttcatggcggcgccgacgtcgccgccggtatcacccatggggaccccttctccccagttctcaccaccgccgcagatgtcggtcaccaccaccaccgccggtggcggttaccaggatcagtataactccatgccggcaacgtacggcgccggtgcgggcgtgcaccagctggacttcgcgatgtcgtcaccgggctccgactccggcgcgccgcagggctcgtcgtcgtcgtcctcgtcggaggcgatgcgggagatgatcttccacatcgcggcgctgcagccggtggagatcgacccggaggccgtgcggccgccgaagcggcgcaacgtgcgcatctccaaggacccgcagagcgtggcggcgcggctgcggcgggagcgcatcagcgagcgcatccgcatcctgcagcggctcgtcccgggccgcaccaagatggacaccgcctccatgctcgacgaggccatccactacgtcaagttcctcaagtcccaggtgcagtccctcgagcgcgccgccgccgccaccggcgccgccgcccaccgcgccgccgcattcggcgccgcctacccagctgccttacccatgcagcaccacgctccgtggtag

SEQ ID NO: 21556 - DNA, 1693 bp, Oryza sativa
  Clone ID: TF_OsC134315_1
gcataaacatttgtatttttagatcatggaaatgacacaacaactaataagtttgttggaaaaacgaaaaggagacatacaaggtgatttacagcaaaaacaacagtaatgagtttttatttcacaaaaatggtgccaaagaggaggatacttttaataagagcaatgataataagaagcaatcccattggcgttgaaatggatgattttacatacaagccactgccttacatcaattaaaatacaacaattaatctactttgtcaccgcctactcttcaagtcattgacgctgtccataacacaaccgataaaggggagggcgaggcatggaggccacttgacatgtgaagtgcttttacaccctaatcttctgaagcaaaactttgggttcaccaatcacatcattacaacattagctcggagatctggttctccagcctcagcaatcgtgcttgcctgagcaagtgcagtttgcttggtcatgttttagcttctcaacttggccctgaagctccttgatgtaggttacagcaatatccaacatgtctgatgtattcgtttgcttgtccatgttcggcacgagatcctgcagcttcttcagcctcttgctaatcctcgttctcctctccctctcagcgatgctccgcgggtgcgtcgcgcagccgcgctttgcccgggccctgcaggcgacggagtctggctggagctgcaagaagtcatccatgccggccatctccagcgacgactgcttcgacaagccaaactgggagtcgatgttgctgaagctggagaccatgtcgtcgccgtggtcgccggcggcggcggcggcgacgcgggccttcttgctgctgctcgggggcgagaacatgatggagttggtgtcgtcccaggagctcatggagaagttcctggaggagaggaaggaggaggactgcgcgccgtggccggcgccatcgctggagctgttgccgccgccgccggtgacgatgctctccccgatgtcggggatgaggccgcccatctccgatatctgcggcaggtcctgccgcgagaagctccactgcgagctcagcctcctgtgcgccatcgcgccggcgtcgccgccgccgccggagtagccgcccatccctctcgtcgcggccatgccattgccgtgcgggtcagccatgaggcgggagaggaggccggcgggggagctgctgtggcggaagagcgggacggcggcggaggaggcgtcgacgtggatctcgccggagccgccgtacgcgcgctcgagcgggtgccgcccgacatcggccgccgccgctgtggacgtcgtcgtcgtcgtccggcagctggactcgcaggaggtgagccccgacgactccgcggagaagtacctccccaccatctgctgctgctgcggcggcggcggcggcggaagctgatgctgatgctgatgatgatgcagctgatcgacaaccccaaccccgcggccccggatcaccgagtcggcgatcgacgccagcagcgaccccggcgccgagccgtacctcgccagcccccccgccgccggcatcggcggcggcggcatccccccgtgcggcgccgtcatcctgttcatctccggcggcgcggcggcggcggtggtggtggtgggtggaggcggaggcggaggcggaggcggaggtggacttggttttgcaggttgc

SEQ ID NO: 21557 - DNA, 1354 bp, Oryza sativa
  unsure (1)..(1354): unsure at all n locations
  Clone ID: TF_OsC159138_1
cggagtcggagagagacacaagccaacctcgnaactcgnaagcagnagcaaacgcgaagcagaagcaagcgccatggacgccgagatggccatgggcgagagcttcgcctactactgggagacgcagcgctaccttgagtccgaggagctcgacagcatgtacctgccgacgcaggatgactccaactacgagtcgagctcgccggacgggtcgcactcgtcgtcggcgccggcgccggcggccgtgggcggggacgcagccgccgcggtggcgggtagcggtggcgggatgacgacgatgatgatgggcggcggcggcggcggtggcgacgacgccggtggcgcgaacaagaacatcctcatggagcgcgaccgccgccgcaagctcaacgagaagctctacgcgctccgcagtgtcgtgcccaacatcaccaagatggacaaggcgtcgatcatcaaggacgcgatcgagtacatccagcgcctgcaggcggaggagcagcagatgctccgggaggtcgccgcgctcgagtccgccgccgcggcgagcgccgccccggccgcggcgaacccgttcgccggcctcggcgccgacgaggaacacgagtacggccaccaccacccctcgtcgtcgtcggagcggacgaagaaggtgaagcgggcgctgtccgtgtcgtccatcagcgacgccctgctcgccgcggcggcgccggcgccgccggtggagatccaggagctgcgcgtgtcggaggtgggcgacagggtgctggtggtgagcgtgacgtgcagcaagcgccgcgacgccatggcccgggtgtgccgcgccctcgaggagctccgcctccgcgtcatcaccgccaacatcacctccgtcgccggctgcctcatgcacaccctcttcgtcgaggtagatcacatggatagtgtccaaatgaagcagatggtggaggctgctctctcccagcttgtggcgaccggcagtccgttgagctccatgagctattagttatgagctggatagatatatggagtcatgcgttttggccacctactttacctagtctcattcgcaataaagcgcatttttatgtatgcttggtgatgttgtttgtggcctttttgggaccccccaccaagggatgggggtggttgttttcttgcgggggcaacatttagtgggttgatgataaatttaaagtttttggaaatcctgaggacgctggcttggttttggtgcttttaataatggtgcaatataagggggtgcacggtaatggaaacaaaaacgggggagtcgaacctcacgtgcagccagcaacaagtccacctccgtctcaagctttcttgcgcttaa

SEQ ID NO: 21558 - DNA, 840 bp, Oryza sativa; identical to SEQ ID NO: 12008
  Clone ID: TF_OsC335639_1

SEQ ID NO: 21559 - DNA, 1104 bp, Oryza sativa; identical to SEQ ID NO: 12019
  Clone ID: TF_OsC371684_1

SEQ ID NO: 21560 - DNA, 2067 bp, Oryza sativa; identical to SEQ ID NO: 12017
  Clone ID: TF_OsC113490_9

SEQ ID NO: 21561 - DNA, 1056 bp, Oryza sativa; identical to SEQ ID NO: 12021
  Clone ID: TF_OsC58664_2

SEQ ID NO: 21562 - DNA, 1267 bp, Oryza sativa
  unsure (1)..(1267): unsure at all n locations
  Clone ID: TF_OsC81947_1
ttctctccccncattataaatagggaagtcatctccttgaagctagctggcctaagccaactcaatcaaacctccctagcttggcagaatagttaatgttaatcacctgattaaaattagattagtcccctcctacccagctaactactgcttctatttcacggagaaaaatgtcttcctaggctttctctttcagctcgatcgatccacagctcagctagctctctctctctctagcgacaagcaagcatggagcagctgttcgtcgacgacccagccttcgcgagcagcatgtcgtcgcttgaggcggacatcttctccggcgccggccagctgccgtcctcgccgtggctggacctagacctcgacgacgatgtccaagacctctccatggcgccgacgacggcgaacgcggtgtcctccggctacggctccggcggatccggctcccacaggaagctcagccacaacgcctacgagcgcgaccgccggaagcagctcaacgagctctactcctccctccgcgctctcctccccgacgccgatcacactaagaagctgagcatcccgacgacggtgtctcgcgtgctcaagtacatacccgagctgcagaagcaggtggagaatctggagaggaagaagaaggagctgacgacgacgagcaccaccaactgcaaaccaggagtgttggggagccagctgatgagcgagggcatggctcccatcgtttcggctacctgcatcaatgacatggagatcatggttcaggtcagcttgttgagcaatgtggcgggttcagttcttcctctctccaagtgtatcaaagtactggagaacgaaggtcttcacttcatcagttcatcgacttcctccggatttgggaacaggacattctacagtatccatcttcagagaagtgaaggaacgatcaacgaggagtgcccagcattttgtgaaaggttggagaaagtcgtcaggaacaaagcaaagctttaagcactagtaccgcgcgcgcgtgcctatgataatcctgaattaatcaagggccaaaatctaggtaaaaatgaccatgcgcagttgttaaatatagcatttggttagctgataataatgatatataagtagtgtgctcgatttatattaactaatttctatgacatatatactatgttgctcgatgtagcttttgtacatatttcatgcatgactctcagtgtattaattaattatattatgagatttgcaaaaaaaaaaaaaaaaaaaaaaa

SEQ ID NO: 21563 - DNA, 1498 bp, Oryza sativa
  Clone ID: TF_OsC47357_1
gctgcaggaattcggcacgagggccactgccactgctcccccctgcaacttggacatgtggcttagctactcgccgtcgcggtctcggatgatagtataagcgtgagggttgggcaatctaggcaggagaggtgactgctagcgaggaaagggagcatatatactactatagcttagcttgctgcaggtgctagctagctgaggcatggagcttgacgaggagtccttcttggatgagctcatgtcgctgcggcgtgatggatcggcgccgtggcaggcgccgccgtacccgggtggcggcggcggcggcggcggtggcggcatgatgatgagtgacctcctcttctacggcggcgacggcggcagcgcggaggcgaggggcgggatggacgcgtcgccgttccaggagctggcgtccatggcggcgccgccgcctcagcatccgcacgaggagttcaacttcgactgcttgagcgaggtctgcaacccgtaccgcagctgcggcgcccagctcgtcccctcggaggcggctagccagacgcagacgcagctcactcctctccgcgacgcaatggtggcggaggaggagacgagcggcgacaaggcgctgctccatggcggcggcggctcgtcgtcgccgacgttcatgtttggaggtggcgccggagagagctcggagatgatggccggcatcagaggcgtcggcggcggcgtccacccgcggagcaagctccacggcacgccgtcgaagaacctcatggccgagaggcggcgtcgcaagcggctcaacgaccggctgtccatgctccggtccatcgtgcccaagattagcaagatggacaggacctcgatccttggtgacaccatcgactacgtgaaggagctgacggagaggatcaaaaccctcgaggaggagatcggcgtcacgccggaggagctcgacctgttgaacacgatgaaggattcctccagcggcaacaacaacgagatgctcgtgaggaattccaccaagttcgatgtcgagaaccggggcagcgggaacacgaggatcgagatatgctgcccggcgaaccccggcgtgctgctgtcgacggtgagcgcgctggaggtgctggggctagagatcgagcagtgcgtcgtgagctgcttcagtgactttggcatgcaggcctcctgcttacaagaggacgggaagaggcaagttgtcagcaccgacgagatcaagcagacattgttcaggagcgcaggctatggcggaaggaattatagtagatcgagtaccatttatgagttcatattcatcagcagtggtagtacctcgtttctgaacacaccagagagcaaattaaagatttgctcaagtattgtaagctttgcatttgtgaatcggtatgggaaccggccgtgtgatttgtcgaacattggatttgaattaaacgccaagaaatggttcatctggttttgtcccgagctatatatcatatgcgcgcgcatatga

SEQ ID NO: 21564 - DNA, 1021 bp, Oryza sativa
  Clone ID: TF_OsC3016_1
ctagctggaaattacacatggtaatttgatgcatatatataagcaaagcaatgcaggatggttagagagcgagcttgccttagcggtgatggtgatgatgacggtggaggccgggaatggcatgacgctggtgtgggtgatgcccagccggagctcctccacctccgacagcaacctcaccagcaaaccccgcgagttcccgcactgcacccgcaccagcacgctcctctcccacacccgcacctcgatctccggcacccgcccttcgccgtcgccgtcgccggcggcggactgccggccggagcacgacgacttcctcaccaccatggccgccggccgcccgccgccgtcctcctcctccagcgtcttcaccttctcctgcaactccttcacatacttcaccgcgtccccgaggatggtcgccttgtccatctttttgaggccggggatgacggtggagagctcgatgaaccgctggttgatcttctcccgccgccgccgctccgcgattatgtggtcctgcacgtatcccggcgccgccgccgacgacgacgacccgccgcctcctcctttcttcaccgccgctctcgctgtcgcggtagtctccatcgcctgcagcggcgccggaactactccgccgccgcctccaccgccgctatcctcggtggtcggctgcgccgacgccgcgctgaagttccagctcatcggcctgtgccccctgccgccgccgccggtgacatgcggggaccacccggcggcggccgtggcagcgccgccgcctgggctgtcgctggagctccagctgttggcgcggtggacctggtccacctgcactgtcaggtcccggaatccgccgccgccgccggccgccgaggcgttgcggagagcttgcagcgacgggaaggcgccgctgtcgccggcgacgtcagtggcgtaggctgcggcggcggtggagtcggaggggagctggtgcagcgtgtccatcgcccactgcatgaagaagctcgagtcatccatgtcg

SEQ ID NO: 21565 - DNA, 1757 bp, Oryza sativa
  Clone ID: TF_OsC5214_1
gagaaagggacacgcaaacttcaggcacaagaaccctccccttaagcttacacattagctaccatcctgttgcttaccttgaaagggtcacatactacctatttgcatcaaaggataggaagaaccaaccaaatcttagctttgttcctagaattgatcgtcttctcttcttgctaagtggttagtaatatggcgcaatgcggcggcggcgacgtttcacgacaccggaagggtcaccttgacaccgtcgagagcctctgccaggggctactcgacgacgtcatgctcgacgacgacaagtgccgcgccatgttcggctacctccaggagtggcaggacctggcaagcatgtgttacgggagcttaggcggcgagccgccgctggcgccggaggccagcaacggcagcggcagcagcggcggcggaggcagcttccggaagaggagaccggacgacgcaaagggtgagagcaacagcatctgcaagaggcagagagggaagcagcaacagcagcagcagccgtgtcatcccgatcagatggcggcggcggtggggaaaggaaggccggagagggcacggccaggagccaagaagaaggcggaggtggcgtcacccaaggattccccggcgacctcggcgtcgacggtgaccgccggccagaagaccgactacatccacgtcagagcccgccgtgggcaggccacggacagccacagcctcgccgaacgggtgaggagggagaggatcagcgagaggatgaggtacctgcaggagctggtgcccggttgcaacaaggtcaccggcaaggccggcatgctcgacgagatcatcaactacgtgcagtccctgcagaagcaagtcgagttcttgtccatgaagatcgcggcatcaaacccggtggtgaacttcaacatcgtcgaggacctcttcggccggcagctcagccaggcggcgtgcaaccctgcggctctgccggccatggcgctgccgatggcgcaggtcgagccttcctgcctccagatgagccccttgcagcagatgcaaacttctgcaggatcctctggctatgggctggagatggtcgtcagtaaccagtactcaccaccgggcgggccgatgtcggtgccggccggtgcatcggtggagccatgcctcaacgtgaatggagctgcaggttgggacattggctctcacggtttgttcagtggatttgatgcaccgtttcagtcagtacagagtgattgtttgctagacaatctcaaaatggaaatgtaagaaggaatgaaggaaggagaagtccgcattccaagagttttaaccacatcaatatttgtggctgaagattctttattcatagaaactgtactaatgtcatcaatggcaatacaagtacatttgtgtgtttatatttaccttgacaactccaccaacttctaaacaatccatcatcccgcgtctcgcctcctgccgataccaatccagtacaaatatgctaacaattcacaacactacgtataaaattacaataatgaaagcacaaaccataccgacgcaccatcatctgaacctatcttcattcttccgcctttaaagcacagacgtgttcaccagcttcttgtgctggaacaatgataacgggggctgctttacagttgtggaagcaatattcactgacacttccctgaacacactctgaattagacctcttccacgagtggccagaatgactgtgaggctttagccgctctgctctcgga

SEQ ID NO: 21566 - DNA, 2511 bp, Oryza sativa; identical to SEQ ID NO: 11912
  Clone ID: TF_OsC340653_1

SEQ ID NO: 21567 - DNA, 763 bp, Oryza sativa
  Clone ID: TF_OsC359492_1
atggagatgacaagctacaacgacgtcgacgccggcgacatgttcgctgctgctgattactactcggctggcgccggcggtgatctcttcgatatggtgtggcctggacgacgacgacgggaagaagacaacaccagcggctgcctccccttgtcgccgccgccgccgcctgagctcgccgtggatgatcagctactggctggaggcgatggcggcggcggcaaaccggtggcggtggcggtggcggaggacgacgactccggtgagcggtggacggaggaccaggttccgacagacgaagggatatgcgtcatggagaaacgaaggtgcaagataaacgagaacctgaagaccctgcaacagctcgttccagtttgcgacaagtccaataaccaggcctcaacgctggacaaaaccatccgctacatgaagtcactgcagcagcatgcccaggccatgtcagttggatgcagcatgaagacggcagaagcagcaggagtgacgtgccccttccttccaccgccgccaagcagcgccttgctggttatcgtggaggagggtcccaccagaccctgggatgcaactgctagatctacctctgccgctgctacctcttttgaccaccaccaccatggcgcactcattgaaaagctcctccaggtggtgcagtgttcttttgcagccttacatgctgtcgcttaagacgtccgtccgcgaaaataatgctatggtgatgcagaaaccgaatttctaccattcttaa

SEQ ID NO: 21568 - DNA, 966 bp, Oryza sativa
  unsure (1)..(966): unsure at all n locations
  Clone ID: TF_OsC115381_1
ntttttttnntagatgatgaattgacccccacttggtccatcagaccaaagtgcaattgcttgcctctacaaaaacacagctgtacatgaccatctgccggtttatacaggtcaagacaatataaatatactgtgcacctctaaagaaaagagggtagaaaaatatacaccatgccacggtttttgtgacgccgtactatttcatatctaaccacaagattaggaatttactccctccgtctcaaaatataagcatttttagccggtggccagattcatagccaaaagttgttatattttgggacggaggtagtaggcaaaataatattcagtgcaaatacaacaactagcattttacatgtactacttgtagtaagtaccatgtcacgatcattgtctggagttgcttggctggtcctgctgctgctgctgctggtggtttagcttctggtacattgccatcatccggttgtacgcctccatgccgttcggttgctgtgcgttttgctgcgccgcttgggaggcgaggaaggcggagaaggcgtcggaggtggcggcgccggtgggctgcggcggtcggtcggcggcggcggcggaggaggaggatgcggcggcgtcccaggagacggggaggaaagggggcgtgtgcatatgcatgggcgcgtatccgccggcctggcccatgttcatcatgctgaggccgatctgagccatctgggccatctgggccatgacggacatctgcagctgtggcatggccatgcccatgggcatcatcatgctgcccatccggctcatcacctgcacctgcgcctgcagctgcttcaggtagtcgatcacctcgtcaagcatcgacgccttgtcagtcttgcttgaattgggaacgagcttctgcaatgttttcatcttttggttgatcctgtcccgtcgtttgtgattattctttcgcacaaaccttaacttcat

SEQ ID NO: 21569 - DNA, 1046 bp, Oryza sativa
  Clone ID: TF_OsC217101_1
cggcggctggatcgtccatggctacaccaatggcgccaccgccaccggcgccggcaaccacggcttcacctgtggctatgctgccagcagttacgtatatggttatagctgcggttcttgggagttcgagcaaagggagcagcagttcatcagctcgcagattcagcaccatcagcatgcacctgagcatggatgatgacgatgatcagtccgcggggtacggcgtcgccatggtggacgacctcctgacgccttcgccgtcgacgcaccacgccgtcgccgccgccgccggcagcttcccttcctcgtcatcctcctcggcctccttccgctccgcctccgtgtcgtacagcccggacacctcgtcgtcggcggcagcggcggcggcgacgggattctacccggagttgtcctcgcaggtggcgccattattaccaccaccacccttggtgcgcaacgagccccagcccggccgttacaccgccggcctgccgccgccaccgccgccgccggtgaccggtggcgcgttcaggcggtacgcgcggcacctcggcccgaggagggcgcccaagccgggggcgtgcgggcagaggatgttcaagacggccatgtcagcgctggccaagatgcacatggagacgacgtacaggcgccgccagtactactaccagcaagcggcggcggcggccgaggcggcgccgccgccgccgtccggcaacaaccagctgcagcacacgatgtcggagcggaagcggcgggagaagctcaacgacagcttcgtcgccctcaaggccgtcctccctcccggctccaagaaagacaagacgtcgatactgatcagagcaagggagtacgtgaagtctctcgagtcaaagctgtcggagctggaggagaagaaccgggagctcgaggcgcggctgtccacccgccccgacgacaccaagaacgacgaagaggaggtggcggcgccaccggaggccggcggcgaggtgaagagagaggatccggtagagatcgaggctttagataatttttttataagatga

SEQ ID NO: 21570 - DNA, 1506 bp, Oryza sativa
  Clone ID: TF_OsC80863_1
ccaaagaaacaaaggggcgcttgtttttgcctaaggagagcccaagggcaatgccaaaaaagagccccctccttctaataaaatggaccctagctttagaccaactttttttttttttttttttaggaacagtagcaatagctctctttttatattaacaaaataatttcatgaagtagagtacaatggtggtggcagtgcagccgttgaggaaatcttcatgggcagaacctaaccaaataaggagctacaaaatattacaaagtctctgaaaaatgtgtagaaaactctacttgcttgctgttcttccctccaaaatcctcttacaatgttgtagactgcctccagacaaggggatggactagatccaacatctcaaacttatctggtgcattgcatgctcctaccaatcttgcagcattattatttcctcctattgtcaatgtggggtccttttttcttgctttctctgtcactcttcccctactggaaagagcacatgttgttgaacaccaattgattgagcatctcctgctgccttggctcccccactgcttgcatcaggtaactgccattgtcctgagagaaagagatggctccatgctggctttgcagtgagtaggatgtggttgaggttgtgtccatgatagcttgagatggagctgggcttgattggttcagtactggattaggcattgcaagggcttcttggaacatgcctccaatcttttggtcatggaggccatcgctgtccattccaaagccatacaacactgggctcattgaagcaatcctcatggataggaactcaacttggttctgcaacgactgtacatagttgatgatctcatccaaaatgagagcctttccagtaaccttgtcacaaccagggaccagtgcttgcagcatcctcatcctctcactgatcctctccctcctcaccctctctgcaaggctgtggctatcagttgcctgtcctctccttgccctcacatggatgtacccttttggaggctcatcttcagtggtgctcttctcctccacttctttgctggccttcttccctctcctgctcttgccatccttgcagctatccttggagtgtgcactgtcttctgctgccttcctcttcctgtccacagatggagaggtgtcaagaactgcagacactgagctctccaatgaggcatcctccacaatggctgctgctgctgcattggcaggttgtggagcttgggagccatggctgtggttgtagaggaagaagcttgagatgttggggtcattggtggtggcgatggctgctccagcagcagtagccttgaggaggagagagtggtgtggtgagaagtctgccatggctccccgcctgcggttctctctgtggctggggcgtcggggggttgttgagtccaagtctggtttcttcagtgaattgagggctacgtcggctccgcgcgccgcttccggcggccccggtgtccccctcgtgccgaattcctgcag

SEQ ID NO: 21571 - DNA, 849 bp, Oryza sativa
  Clone ID: TF_OsC80863_2
ctactggaaagagcacatgtaattattgagcaccacttgattgaacagttcttgccttggctcccctactgtttgcatgatgtagctgccattgtcctgggagagagagttgttgttgctgcctccctggacttgaagtgtgtagggtgtaggagaggtgtttgatgtgtccatgatggcatgagattgagctgggctactacctctgttcaggacagaagctggtattgcaactgcctcatggaacattccttccatcttctgagagtggtcactgaaagcatcactgtctatgccaaacccatacagcacagggctcagagatgcaatcctcatggaaaggaactcaacttggttctgtaaggactgcacatagttgatgatctcatccaaaatgagagcctttccagtgaccttgtcacaaccagggaccagagcctgcagcatcctcatcctctcactgatcctttctctcctcaccctctctgcaaggctgtggctatctgttgcttgccctctccttgccctgacatggatgaacccctgaggtgcctcctcctccatctgatccctgctgtgtttcttccctcccctcttcctgccattctcctttgcctccttggagtgagcagagttgaggctggcagtgtcttcttccctgggcttcctcttcttgtcctgtggagaggtgtcaagaaccacagatgaggtctccattgaggcatcttcagggatggctggagctgtggtggttgctgctcctccatggctgccatggcagaagaggaagccattgttggtgatgaggccatgctccatctgctgtgggaggtgtgagaagcctgccat

SEQ ID NO: 21572 - DNA, 1045 bp, Oryza sativa
  Clone ID: TF_OsC123144_1
accaattatcatgtacatgaagtgatcaaatctcacccacaagcatatctctcgcaccattccaccctatagaaacgagataacaagacgctgtttgcactagctatttgacagccgacaagaaccagttaggtaaaactcagtaggatgcaggtttgaatggctgaatgccaacctctgcaactgcaagaaggcaagaaactgcaagagctgcagccatacgatggctgcaatccttcagtgtacagaggcccaattctgctgccccggcaggccaactcggcgccgccggccgtgccgccggagatgtcgtcctcgtcggggtcagggagaagcgcgacggaggcgagagcgttgaagatccacagcgaggctgaacggcggcggcgagagaggatcaatgctcatctgacaacactgaggagaatgatccctgatactaagcagatggacaaggccaccttgttagccagagtggtggaccaagtgaaggatctgaagaggaaagcaagtgagatcacacaaagaacacctctccctccagagaccaacgaagtctccatcgaatgcttcaccggagacgctgccaccgccgccaccactgtcgccggcaaccacaagaccttgtacatcaaggcttccatcagctgcgacgaccggccggacctcatcgccgggatcacccacgcattccatggcctgaggctgaggacggtcagagcagagatgacatcactgggaggaagggtgcagcatgtgttcatattgtgcagggaggaaggcattgcaggtggtgtgagcctcaagtctctgaaggaggctgtcaggcaggcactagccaaggttgcctctcctgaattggtatatggcagcagtcactttcagagcaagaggcagaggatcctggagtcacattgctcaattatgtccatatagatttgttcctcttctggggattttgattttatttttctactagctgagaatatgtatgaaataagagagagaatcttcttcttctgagagctaaaaaaaaaaaaaaaaa

SEQ ID NO: 21573 - DNA, 1165 bp, Oryza sativa
  Clone ID: TF_OsC14042_1
atggcggagaccaaccacctcctcctcctcctcctctctcctccgcgcctccgcctcctctcctggactcccacgactcctcttgcgtgtgctgcgttgagtcgagcagccaagctgtctcgtgatctcgtctcggagaagggagaacgaggcatccggtcgttcaaaaaaaatattgctgaacaacatatgcatgccagcttagggctggaccagctagcagccattggtagcctgtatcagttcataaggggaggaggtgaaggcaaggaggcagctagccaagaagaagagcagacaccaaaactcagatctgttattgcacatcttgtttccaggaagaggagaagggataggatcaatgagaagctgaaggcgctgcaagagctacttccaaattgcaccaagaccgacaaagtttcgatgctggatgaagcgatcgactacctgaaatcactccaactacaactccagatgctggtcatggggaagggaatggcaccggttgttcctcctgagctgcaacaatacatgcactatatcacagctgatccttctcaaattcctcccatacgcccctccgagccgcggccatttcagataacccacgccacccaacagagacagtctaacgtcgagtcggatttcttgagccagatgcagaatttgcacccttcagagccacctcaaaatttcctcagaccaccaaaattgcagttgtacacgccggagcagcagagaagaggtctagctagtagcagtggccacaacagcggttggatcacggagaggaattcatcgtacaacttcttggagtgatgaccacctgacgagttactaagagatccagaagcagatgcagtctagactctactactctagactgcataaccttcattcagttcatggtgttcctggagatgaaacaagttgctcaatggagtgatgaatctactgcatgcagttaactagttaattttgtacgtcaaataaatagtggtgatcctgatcttgcttcctcgtcatgttctgtgcatacaagacctaaagcgttttttgtgatctctgtactgtatattagcagacagtctacttcctgctgctgatgcttatgtgctctgacaagcaaatcacatggctaatttaatcaaaaaaaaaaaaaaaa

SEQ ID NO: 21574 - DNA, 2492 bp, Oryza sativa
  Clone ID: TF_OsC10538_1
cagttaccaatagctatcagctgatgcctctctcttccatctgttgatcactgccacagttcgtcagttagtttgaagcgatctcaggaagacagaagggcaagggtgatcaccacatgggaagaggagaccacctgctgatgaagaacagcaatgctgctgcagctgcagctgctgcagagaggccacacacacacaagcacaacacaaaagtggccatggctctcctcctctcctaccccaggcgccacccatccatccacctcctcatcctctccgcctacgccctcttcctcctcccaatcttggatggattggagctgggaggagatgggctctacagggagatcctcagggatgagacggtgctcaggctcaaagaacttggcaagatatctgatggggaaggttaccttgagaggacatttttgagtcctgcctcaatcagagcctctgctgtcattatcagctggatgaaagatgccggacttaccacgtggattgatcaaatggggaatattcatggtcgatttgaaccgaccaactcaatcaaggaggcaccagttgcggatgttgcattgagacctttagttggtgatggctgggattagacgagtgataatcaattttctgcatctactggaggctctctcctgatggttcttggagatgacaggattctgctgcagcagtgagcttgaagcacaggtctcagcactgctggacctgccttcttcaatcccactggactcctcctccatagggatgcatgcgcaggcattgctgtcgaaccagccgatctggcagagcagcagtgaggaggaggaggctgatggcggcggtggcgccaagacgcggctgctggtccccgtcgccggcggcctcgtcgagctcttcgcgtcgagatatatggcggagcagcagcagcggtcataccaggccaggtgaacttcacggtggacatacgcgccatggacgacaaggtgagggagacgatcgtcaccagcttctcgaggcttgttcttcagagatgcgacgacagattggtcgactgcgccgtcgagcagaagcacgcggcggcggcgacgccgtgcgacgcggagctgacgtcgcggctggagcgcgcgacgcggtcgacgatctcgtcgatggcggcgggcgtgcgccgggccggcggcgagacgccggtgctgatgagcggagcggggcacgacgcgatggcgatggcgaggctgacgaaggtggggatgctgttcgtgcggtgccgcggcggcgtgagccactcgccggaggagtccgtgatggacgacgacgtctgggccgccggcctcgcgctggtcaacttcattgaccagaacgcggtggatgcggcggcggcgacggcggcggaatcgtgacgacgacggcggcgattcttttggtaggtgtgtgcctagtagcctacaaattgtaaatatggatttgcttgttacatttgtcaagaaataaaattgaattcaattcgttgagacgttcaaaaaaaaaaaaaaaaaaaaaaaaaaaaggggcgctccggcggcgccaagaggcagcagtgcaagaacctcgaggcggagaggaagcggaggaagaagctcaatggccacctctacaagctccgctcgctcgtcccaaacatcaccaagatggatcgcgcgtcgattcttggagacgcgatcgactacatcgtggggttgcagaagcaggtgaaggagctgcaggacgagctggaagacaaccatgtccaccataagccgcccgacgtgctcatcgaccacccgccgccggcgagcctcgtcgggctcgacaacgacgacgcctcgccgcccaacagccaccaacagcagccgccgctcgccgtttccggcagcagcagcaggaggagtaacaaggacccagcaatgaccgacgacaaggtcggcggcggcggcggcggtgggcaccggatggagccgcagctggaggtgcgtcaggtgcaggggaacgagctgttcgtccaggtgctctgggagcacaagcccggcgggttcgtccgcctcatggacgccatgaacgcgctcggcctcgaggtcatcaacgtcaacgtcaccacctacaagaccctcgtcctcaacgtcttccgcgtcatggtagtgagggacagcgaggtggcggtgcaggcggacagggtgagggactcgctgctggaggtgacgcgggagacgtaccccggcgtgtggccgtcgccgcaggaggaggacgacgccaagttcgacggcggcgacggcgggcaggctgcggcggcggcggcggcggccggtggagagcactaccacgacgaagtcggcggcggataccatcagcacctgcattacctcgcgtttgattgatgatgatgattgattttaccatctacgtctcactactagtgtatacacactcgaattattcgagaaagaaacataatgctacgtactagtaataatggatttgat

SEQ ID NO: 21575 - DNA, 625 bp, Oryza sativa
  Clone ID: TF_LIB4830-002-R1-N1-A10
ccggccgggactcctcccccactctctctctctctcctctctctctctctcgcccctcgcgccaccgcgccaggagctcgcgccgcgcctcgcctcgccgacgaagacgacgaggaggtcggtggtcgtggtggtctggtttggtgtccatccatggcggggcagcagccgccgacgggaggagccgaggacgacttcttcgaccacttcttcagcatcccctccgccgccgcggccggcgccggcggcgtcggcggattcggctcgggtgaccaccaccccttcccgctcgcgctcagccccggccaaaggtgcgggcgcggcgcgggcaggccaccgatccccacagtatcgctgagaggctaaggagagagagaatagccgaaaggatgagggccctgcaggacttggtccccaacacaaacaagacagacagggcagctatgctagacgaaatccttgattatgtgaagtttcttcggcttcaagtaaaggttctgagtatgagcaggctgggtggtgctggtgcagttgcgcagctggttgctgatattccaatctcagttaagctgttcttgcactgtacattgccggtgatcacacggaatgtccagggtttctcttt

SEQ ID NO: 21576 - DNA, 1196 bp, Oryza sativa
  Clone ID: TF_OsC33145_1
ctctctctctctccgcgagctgctccccgcccctcgcgccacgcgtcgccgacgtcgaggcggcggtcgccgtcgccatcgagacgacgaggaggtcggcagccgtggtggtctggcccaccggccatccatggcggggcagcagccgccgacgggaggagccgaggacgacttcttcgaccacttcttcagcatcccctccgccgccgcggccggcgccggcggcgtcggcggattcggctcgggtgaccaccaccccttcccgctcgcgctcagcctcgacgccgagggcgccggtgccgccaggcgcctcctcgacggcggccacgacggcggcaggacggaccgggaccccgtgcagctcgccggcctcttcgccccggtgttcggcgccgccgccggagtccagccgccgcacctccgcgccccgccgcctccccaggtgttccacgcgcagccgaagcccggggagggggccatggcggcgccgcagcctcagcagccaccggcgccccggccaaaggtgcgggcgcggcgcgggcaggccaccgatccccacagtatcgctgagaggctaaggagagagagaatagccgaaaggatgagggccctgcaggacttggtccccaacacaaacaagacagacagggcagctatgctagacgaaatccttgattatgtgaagtttcttcggcttcaagtaaaggttctgagtatgagcaggctgggtggtgctggtgcagttgcgcagctggttgctgatattccaatctcagttaagggggaggcaagtgacagtgggagcaaacaacagatttgggaaaagtggtcaaccgatggcacagaaaagcaggtagcgaagctgatggaagaagacatcggagcagcaatgcaattcctccaatccaaagcactatgcatgatgccaatctctcttgcgatggcgatctatgacacacagcattcgcaggacggacactcagtgaagcctgaacccaacactccttcatagtatagtaacaataacactagcatgcacacctactactactaggcgtcgacctatccaaagtgtaggatatactggacattttgatttgctaactggaaaaggcctaaggatcctctcctcaaagtagtacccatggtatatgatgtcgtctcctcttttcttcttttcttcaaaaggtgctttg

SEQ ID NO: 21577 - DNA, 1590 bp, Oryza sativa
  Clone ID: TF_OsC16721_2
tcttgccccaacttgcatccatatcttgagttgagcccaatgaacaagggcaacttccttgaatgccaggcacccatttgttgtcgccggcagcggcagcggcattgtcaaagacaaaggaaagagggcactcctgtggctgcagcactattggtgctaatgaaagaagcagtggctgctcatctcgacctggtgaagagagccctgctgctggccttgctctccaacttgcatcaccaccatgttaatgtggctgctgccatcctgagcaaagcctgtgggtcctcctcctagtccttggagtgaaatgcctgtactccccatttggcccatgcactgcaccatctcatgtggcatctttgcaagctgtcgaagaacatctgggtgcatatcaatgcccggtccaaactcatacatcaaagggctaagggaggcaagcttcatggacagaaactcaacttggttctgcagagattgcacatagctgatgatctcatctagcatgagggctttccctgtgaccttgtcacaaccaggaaccaggctttgcagcatcttcatcctctcactgatcttctcccttctcaccctctcagcaaggctgtggctgtctgttgcttggcctctccttgccctcacatgaatgtacccagctggtggctccccacctgctgcctccttggccttcttcttcacatcatcatcatgttgatgtagtaccacccttcttgcctttttctcctcaagtcccttcaagcccacattgctcctcttgtgctttctactcttgccccaacttgcatccatatcttgagttgagcccaatgaacaagggcaacttccttgaatgccaggcacccatttgttgtcgccggcagcggcagcggcattgtcaaagacaaaggaaagagggcactcctgtggctgcagcactattggtgagtacaccattggcattgaggtggggtcaagggagctgcagctgctgctctcatactcataggccgccatggctgctgctgccttctcttcaaggttgctgcagccggcagggaagcctgggacaggaagaggctcgacaaaggaaacaacggagaccagcgacccatatttccccacaagtctcttagccaattcaaacttctgttggggaggtctctcagcaagaatatcaagtggaaacatgggcgttgagtaagcctcctgaagtgcggcctttgtgggaacacggtatgtgataatggcaggagagccctgaaacttgccctgcactttggtctccaagatgaagttgtgggaagcagtagcaccaggatcaagtttttccacaatctttgatgtggttccagagataagttgaaaagcctcctgtggccaagagtcgtcgttcaagctaacatcataggcggtcgcggaaccctggttgtagaggttgagggtgacggcgaggcgctccacgcctggacccgggcgggacagcgcaaccttcttctgtgctaccacgaacggcgcatcctgcccggcggcggcggcgaagggcacgaggaggaggaggaggaggaagaggagagatcgccactgctgcgccat

SEQ ID NO: 21578 - DNA, 2372 bp, Oryza sativa
  Clone ID: TF_OsC8567_1
gcacgaggcctcctggtatcttttatctcaaccctcctgtatgaagcttcggttgcgatccatggaccagcgcggcggcgccggcggcgccgccgagacccaccgcgtgcagctgccggacacggccacgctctccgacgtcaaggccttcctcgccaccatgctgtccgcggcgcagcccgtgcccgccgagtcggtgcgcctcaccctcaagggcattgaggagctcctcacccccgacccctccgctcgcctcccggccctcgggctcgcgtccggtgttctcctctacttcacgctctcccccctcccgtcgccctcgcctccgccgccgccgcagccacaggcccaacccctgccccgtaaccctaaccctgatgtcccctcgatcgcgggagctagctgacccgaccaaatctcctgtggagtctggtagctcctcgtcgatgccgcaagctttgtgcacgaatcctggcttacctgtcgcatccgatccgcatcatcctccaccggatgtggtgatggcggaggccttcgccgtgatcaagagcaagtcgagtctcgtcgtcggggctacgaagagagagatggagaatgtcggtggtgcggatggaaccgtcatctgtcgccttgtcgtggcgctgcatgcggccttgctcgatgccggcttcctctatgcaaacccggtggggtcttgccttcagctgccacagaattgggcgtcaggttcttttgtccccgtatcgatgaagtacaccctgccagagcttgtagaagcgttacctgcggttgaggaggggatggtggcagtgctgaactactccttgatggggaattttatgatggtgtatgggcatgtgcctggggcaacatcgggggtgcgaaggttgtgcttggagctgccggagcttgcgcctttgttgtacttggatagtgatgaggtgagcacagcagaggagagggaaattcatgagctgtggagggtcctgaaggatgagatgtgcttgcctctgatgatatcgttgtgtcaactgaacaatttgagcttgccaccgtgcttgatggcgctgccaggtgatgtcaaggcaaaggtcctggagtttgttcctggggtggatcttgcaagggttcaatgcacgtgcaaggaattgagggatcttgctgcagatgataatctttggaagaagaagtgtgagatggagttcaatactcaaggtgaatgtggttgtgtggtgtggaaatgcatttactctgaccaaaggaaggatatcgtactagctgataagtatacctgtggtaattatatgcagaagcccgtcacacaacctggtaggtggcttattatattagtctaccattccctactttgccagtacatcactattgggttgagtttgctgtggtatcatttggttgatttggttcaggatgctcctgcagcaggcattcactttgactgtattattccactgccaatcaatccttaccagcttcccccatctgctggtgcctgctgctcaacaactcaagcttcagcatcagcaaaagatggtggcaatatgtattcccctccctgcagtgctgctgcaagcagccaagggcattgtttcgcggtcggagctaaccagcttgcttcgcttgaccttgccatggacttcgacgagcctatcctttttcctgtgcataatgcaagtttgcaagaggggattcagttttacaatcctaccggcgatactcagctaagtagaaacatgagcattgacaagtgtttgaagggcagtaaaaggaagggctcaggcgagggcagttcatcgctacattcccaagaggaaaccggtgaaatgcctcagagagaactcagcatggagcatgccggagagaaggcgggtgatgctgacgctagcagggaggagtacgtgcatgtccgggcaaaacgcggccaggcgaccaacagccacagccttgcagaaagatttcgaagggagaagataaacgaaaggatgaagcttctgcaggacctcgtcccaggatgcaacaagattacagggaaggccatgatgctcgacgagatcataaactacgtccagtctctgcagcgacaggtggagttcctctcgatgaagctctcgacaatcagtcctgagttgaactctgacctcgacctgcaagatatcctttgttcacaagatgctcgctccgcatttctgggatgcagcccgcaattgagcaatgcccatcctaacctttacagggcggctcagcaatgcctctcacctcctggcttgtacgggagtgtgtgtgtcccaaatcccgcagatgttcatttggcaagggccggtcacttggcttcgtttcctcaggtctacatctaa

SEQ ID NO: 21579 - DNA, 1086 bp, Oryza sativa; identical to SEQ ID NO: 11934
  Clone ID: TF_OsC349240_1

SEQ ID NO: 21580 - DNA, 1554 bp, Oryza sativa
  Clone ID: TF_OsC14034_1
atggcgtctctactcggactcctcttctcttctcttctcttctcagagcgctgcgaggcaaggaggcgagcaagaagcggcggcgaggttgccatggacgaggcggaggcggcggcggcggcggcgaagatggacgagctggcgggaggaggaggaggaggcggcggcgactggtcgtacctcgcggcggacgcgctggcggcggcgtcgttcacggcgttcccgttccaccaccaccaccaccaccaccaccgcgacgtgctctcggcgtcgaccccgtcgtcgctgctcctcaacatggacgcggccaccgccgcggccatgttcgacttccaggcggccttcccgtcgtcctccgtcccgccgccgccgcccacgacgacggcggcgctcccgccgttccacgacttcgcctcctccaacccgttcgacgacgcgccgcccccgttcctcgcgccgccggggcagaagctcgggttcctggggccccccggcggcgcgttcggcggcgggatggggtgggacgacgacgacgagatcgagcagagcgtggacgcctcgtccatgggtgtctcggcctcgctggagaatgccgcgcccgtggcggccggaggaggcggcggcggtggcggcggcggtgggaggggcaagaagaaggggatgccggccaagaacctcatggcggagcggcggcgcaggaagaagctcaacgaccgcctctacatgctgcgctccgtggtgcccaagatcagcaagatggacagagcttctatccttggtgatgcaattgagtacttgaaggagctcctgcagaggattaacgatcttcacaatgaacttgagtctgctcctagctcttcgcttactggaccatcatcggctagcttccacccatcaacacccacattgcagacgtttcctggccgcgttaaggaggaactttgcccaacctcatttccaagccctagtggtcaacaagccacggtcgaagttaggatgagggaaggtcatgcagtcaatatccacatgttctgcgcacgcaggcccggcattctgatgtccacattgagggctctcgacagccttggcctcgggatcgagcaggcggtcatcagctgtttcaatgggtttgcaatggatgttttccgcgccgagcaatgcagggatggtcctggactcgggcctgaagaaattaagaccgtgctcctgcactctgctggccttcagaacgcaatgtaatcagcaagtcagaaagcagtcaagaccaatgcactgggatttgatcagtgatcatttgcatcagatgatctggtttatcaaaaagttatagtaagtatggcatatatgctgtttatctaggagaactgatgagatgaggctcgccatctagagacatgtgtgatgatgatgatgtaactgggtttctttctttctgttgtcgtttttttttctgaatgttgtttgtgatgtaataggatctttgtccattgaaaccatgtccattatcatgatgagaatatgaacccagtgtttttgaatgaaaaaaaaaagaaa

SEQ ID NO: 21581 - DNA, 1479 bp, Oryza sativa; identical to SEQ ID NO: 11936
  Clone ID: TF_OsC352120_1

SEQ ID NO: 21582 - DNA, 1485 bp, Oryza sativa; identical to SEQ ID NO: 11944
  Clone ID: TF_OsC189424_1

SEQ ID NO: 21583 - DNA, 1275 bp, Oryza sativa; identical to SEQ ID NO: 11943
  Clone ID: TF_OsC731_1

SEQ ID NO: 21584 - DNA, 1092 bp, Oryza sativa; identical to SEQ ID NO: 11940
  Clone ID: TF_OsC150404_1

SEQ ID NO: 21585 - DNA, 550 bp, Oryza sativa
  unsure (1)..(550): unsure at all n locations
  Clone ID: TF_LIB4309-014-Q1-K1-A3
ctcttctcttctctggtggtgtgggtgtgtccctgtctcccctctccttcctcctctcctttcccctcctctcttcccccctctcacaagagagagagcgccagactctccccaggtgaggattcagccatgaagggggccaaatccaagggcgccgccaagcccgacgccaagttggctgtgaagagtaagggcgcggagaaacccgccgccaagggcaggaaggggaagggcggcaaggaccccaacaagcccaagagggctccctccgctttcttcgtttttatggaggaggtccgtaagggggtcaaggggaagaaccccaagaataaatctggcgctggtgtgggaaaagcaccccgtgataggtgggaaaccctggcccgagcggacaagggttcctatgttgcccagggccaccagctcaagggcgggttccacaagggccttggtggctccctccagggcgggagcgctgcccataaaggaccccccccagggggagaggggggccncctcggggggatttgtcccggttccctttcccggg

SEQ ID NO: 21586 - DNA, 345 bp, Oryza sativa
  Clone ID: TF_uC-osflcyp019f08b1
cttctcttctctggtggtgtgggtgggtgcctgtttaccctctcctgcctactatccttcaccctcctctgttcccccttctcacaagagagagagcgccagactctccccaggattcagccatgaagggggccaaatgcaagggcgccgacaagcccgacgccaagttggctgcgaagagtaaggacgcggagacgcccgccgccaagggcaggaaggggaaggcctccaaggaccccaacaagcccaagaggaatccctccgctttcttcggttttatggaggagttccgaaaggagtccaaggagaggaaccccaagaataaatcagtcgctgctgcaagaa

SEQ ID NO: 21587 - DNA, 348 bp, Oryza sativa
  unsure (1)..(348): unsure at all n locations
  Clone ID: TF_2280684
acaaggctccctatgtagccaaggccaacaagctcaaggccgagtacaacaaggccattgctgcctacaacaagggcgagacactgccaagaaggacccgcaaggaggagaggaggcgcgaggaggatctacaagtccaagtccgggtaatatgaggttacgcgaggcangagagatgagcgtncgagtnaccttcagtgncaagatgggagcagaagcgtaagggcgcgggcgtctaaggagctatccatcatcatcatcgctactagattattcagttacttacatcgnatgtttctttttctctcgtctataacgntagcgtcttgttgngcactggtgggtgtt

SEQ ID NO: 21588 - DNA, 550 bp, Oryza sativa
  unsure (1)..(550): unsure at all n locations
  Clone ID: TF_2800810
tttcgacaagactggaactccacgcggtggcggccgctctataactagtggatcccccgggctgcacgaattcggcacgacgtgttcatggaccacttcacgaatgactacaacgacaaccaccccaacgtcacgcacgtctcggtgattggcaacgctggtggtgacaactggaactccatgactgatgctgacaaggctcctttcgtgaccaatgctgacaagctcaacgctgactacaccaacaatattgacgcctacaacaacaagcatgcatgaggcccggctacctcaggcgactctgacaagtccaactccgacgtgaacaccacgactacggcatctgtgacaagggggggcccggtacccaattcgccctatagttgagtcttattacaattcacttggccctcgtttttacaactctttgactgggaaaaaccttggcgtttaccccaactttaatcccccttgcaaccacatcccccctttcccccagctttggcctttattaaccaaaaaaggccccccacccnattccccttnccca

SEQ ID NO: 21589 - DNA, 695 bp, Oryza sativa
  Clone ID: TF_LIB4833-020-R1-N2-D9
caccatgatcctcccctcccttgcctgcctcatcgctttctcacctcgctctctgtcccgcccgtctcacaaagagatgagacgagctgctactactcctccccagggtgagtgattcatgccatgtacaggggcgcaacaccgagggcgccgccaagaccggacgccaagatgagctgtcgaatagcacctgcatgcggcataagcccgctcgccaaggcgacgaaggggacaggccgctaagtgaccccaataagtccaagaggactccctccgctttcttctcttttatggaggagatccggaaggagttcaaggagaacaacccacaagaataaatctgtcgctgatgcatgaaaagcagacggtgatatgtgtgaatccctgaccgaagcggacaaggatccctatgtagcctaggacaacaagctcaaggacgagtacaacaagggcattgctgtctactacaagggcgagagtgctgccaagaacgcacccgacaaggaggaagaggaggacgacgatgagagatctgacgagtccaagtccgaggtcatagatgaggatgacgacgagtgcatcgaagaggatgtacacgatgacgagtgagcctttcagtgtacaagatgggagcagcaagacgctaagggcggcgggcgtcctaaggagcctatccatcatcatcatcatcgtct

SEQ ID NO: 21590 - DNA, 291 bp, Oryza sativa
  unsure (1)..(291): unsure at all n locations
  Clone ID: TF_473985
angnacggttcgccnntttataaaccaaattccccancggcggttcgttcttgncgatcccgagggctngagatnaaggcgaggtcgaggtccancaattgcgnctncanggtntnggtgaggaagnccnaggcggagaaggacccgaacaagccgaagaggccaccgagcgcgttcttcgtgttcatngagcagttcangaaggncttcaaggagnagnaccccaacgtcaagcangtcttggtgatttgcaaggcttgtggtgacaagtggaagtccatgacttatgct

SEQ ID NO: 21591 - DNA, 601 bp, Oryza sativa
  Clone ID: TF_LIB4831-025-R1-N1-E10
cttctctgtcggtgtgggtgagtacctgtctcccctccttcctcctctcctttcccctcctctattcttccctctcaaagacagatagatagtcatactctccccagctgaggattcattcatgaagggagtcaaatccaagggcgccatcaagtccgacgccatgttgtgtgtgaagagtaaaggcgtggacaatgccgccgccaagggaaggaaggggaaggccggcaaggaccccaactagttcaagagggctccctccgctttcttcgattttatggaggagttccgtaaggagttccaggagaataaccccatgaataaatctgttgctggtgtaggaaaaacaaccggtgataggagtaaatccctgatcgaagtgcacaaggctccctatgtatactatggccaacaagtctcaaggccgagtacaactaggccattgctgcctacgacaagggtgtagagcactgtaccagaaggtacccgactaagtacgtaataggattgaccacgaggaggaatctgacaagctcaagtccgaggtcattgatgagtatgacgacgaggtcagcgcataggttgtcgactatgacgagtg

SEQ ID NO: 21592 - DNA, 893 bp, Oryza sativa
  Clone ID: TF_8334942
ccacccctcgccgccgccgccgccgccgccttcgtcgtcttctgccgtcgagcagcagcagcagtgcctttcaccatgccgaagcagatccacgagatcaaggacttcctcctgacggcgaggaggaaggacgcgcggtcggtgcggatcaagaggaccaaggacgccgacaagttcaaggtcgcgggctccaagggcctgtacaccactgtgcgtatcaagcgccaacaggctcaccaagcttaagtcgttgttctggaggagttcctctgggaattcaatgataacatccccactgattaagctgtcggtgctgtaggaaaagcagcctccgataggtagaaatacctgaccgaagcggacaatgatccctatgtagcctaggccaacaagctcaaggccgagtacaacaaggccattgctgcctacaaacaagggcgagagcactgtctagaaagcaccccccaaggaggaagaggatgaccaccaggggggaatttgacaagtccaagtccgaagtctattgattatggtgactacgacgggcagctaaaatgatgattactattacgattgaaccctttccatggtcaagatgggagcagcaaaaccctaagggctgcgtgcgtttctaaggagcctttccaacattataattaattgacttctaggaggtatttcactttccctctacatacctgatggtttaactttttattctcccctataaacggatagcgctcctatttggccccaactgggtggtgttgttgtgccacccaattgatttggtcctcctcgacaatgaatcttttgtacctagataaactttctaaatggtcatgggctgacctttgtttacataatagttagccgctttctatattaaaaat

SEQ ID NO: 21593 - DNA, 570 bp, Oryza sativa
  Clone ID: TF_8955664
aattcggcacgagcttctcttctctggtggtgtgggtgtgtcctgtctcccctctccttcctcctctcctttcccctcctctcttcccccctctcacaagagagagagcgccagactctccccaggrttcagccatgaagggggccaaatccaagggcgccgccaagcccgacggcaagttggctgtgaagagtaagggcgcggagaagcccgccgccaaggrcaggaaggggaaggccgacaaggaccccaacaagcccaagagggctccctcctkctttcttcgtttttatagaggagttccgtaagagttcacggagaagaaccccaagaatawatctgtcgctgctrtaggaaaagcagccggtgataggtggaaatcctsaccgcagcagacacggctcctatgtagccaaggccaacaagctcaaggccgagtacaccaaggccattgctgcctacaacaagggcgagagcactgccargaaggcacccgccaaggaggaagaggaggacgacgaggaggatctacagtccaagtccgaggtaattattaggatgacgacgagg

SEQ ID NO: 21594 - DNA, 2474 bp, Oryza sativa
  Clone ID: TF_OsC922_1
gcacgagcgccgcgccgcctccgcagcagcagagcctctcgaaattttgggcctcgccgcggagcgcgaagagagatcgagggcggcggagctgcgcgtgggtagcaagcggcggcggaggcggaggcggcggagatgacggacggccatctcttcaacaacatcctcctcggcggccgcgccggctcgaatcctggccagtttaaagtgtattctggaggtcttgcatggaagagacagggtggaggaaagaccattgagattgagaaatctgatttaacgtcggtgacatggatgaaagtccccagggcctatcagcttggagtcaggaccaaagatggcctgttttacaagtttattggcttccgtgaacaggatgtaagcagtctgaccaatttcatgcaaaagaatatgggcctctcaccagatgaaaaacagctttctgttagtggtcaaaactggggagggattgatataaatggaaatatgcttaccttcatggttggttcaaagcaagcatttgaagtgtcgctggcagatgtctcacaaacccaaatgcaaggcaaaacagatgttctcttagagtttcatgttgatgatactactgggggcaatgagaaagattcgcttatggatttaagctttcatgtacctacttcaaatactcagtttcttggagatgagaatcgcactgcagcccaggtcctatgggaaacaataatgggtgttgctgatgttgattcttctgaagaggcagttgtcacctttgaaggaattgctattcttacaccaagaggacgttatagtgttgagcttcatctgtcatttttgcgtctccaaggacaagctaatgattttaaaatccaatatagcagcattgttcgcctttttcttttgccaaagtcaaacaaccctcatacatttgtggttgtcactcttgatccaccaatccgtaaaggacaaacactgtatcctcacattgtcattcagtttgagacagaggcagtagttgaaagaaatctggcattaactaaagaggttctggctgaaaaatacaaggacaggctggaggaatcttacaagggtctgatacatgaggtattcaccaaagttcttcgtggtctatctggtgctaaagttacaaggccaggttctttcagaagttgccaagatgggtatgcagttaaatcgtctctcaaagctgaagatggactgttgtatccacttgaaaagggcttcttctttctgccaaagcctcccaccctcattctacatgaagagattgagtttgttgaatttgaacgtcatggtgctgggggtgccagtatttcatcacactatttcgacctcctagtcaagctgaaaaatgatcaagaacatctcttcagaaatattcaaaggagtgaataccataacctcttcaactttatcaatggaaaacacttgaaaataatgaaccttggagatggtcaaggcgcaactggtggggttacagctgttctacgagacactgatgatgatgctgttgatccacatctagaacgaattaaaaatcaggctggggatgaggaaagtgatgaagaggatgaagattttgttgcggataaggatgatagtggatcacctactgatgattctggtggggaggattcagatgctagtgaaagtgggggtgaaaaagagaaattatccaaaaaggaagctagtagttcaaagccacctgtgaagaggaagcctaagggaagggatgaagaaggttcagagaaaagaaagccgaagaagaaaaaggatcctaatgcccccaaaagagcaatgacaccattcatgtacttctcaatggctgagcgaggaaatatgaagaataacaatcctgatttgcctacaaccgagattgcaaagaagctcggggagatgtggcaaaagatgacaggcgaagagaagcaaccttacatccaacagtctcaagtcgacaagaaacgatacgagaaggaatctgctgtctaccgtggcgcagccgccatggacgtggactctggctccggcggcaacgagtctgactagagccacacactgacactttggcggttggcgtaatgaagaaatttgttaatccctggaaccactgatgcagtttgggcactgaaatcttctcagctattaaccttgcattgcgctggatgatccgatccatgtgtttgcgtacgatggtatcggctgttctcgccgtggggtgactcgatcacaaaccgttactgtctgtgtacgccgacacgagcgatatccctcggaagcatcgtgctgttaagaagtgcttaatttggcgtagcatctatctcgaatgcaagactctgttagcctatgagcttttgtaaaacaggaagaatgatttgtataacaaaaatttaccatggattggttatgttataacatagtgatttaagaactaaaaaaaaaaaaaaaaaaaaaaatattct

SEQ ID NO: 21595 - DNA, 444 bp, Oryza sativa
  unsure (1)..(444): unsure at all n locations
  Clone ID: TF_8955997
ggtggtgtgggtgtgtcctgtctcccctctccttcctcctctcctttcccctcctctcttcccccctctcacaagagagagagcgccagactctccccaggattcagccatgaagggggccaaatccaagggcgccgccaagcccgacgccaagttggctgtgaagantnagggcgcgganaaacccgccgccaagggcaggaaggggaaggccggcaaggaccccaacnagcccaaganggctccctccgctttcttcgtttttatggangagttccgtaaggagttcaaggagaaaaaccccnagaataaatctgtcgctgctgtnggaaaagcaccggtgataggtggaaatccctgaccgaancggactnngctccctatgtaccaagccnacaagctcaaggncganttcaacaagccattgctgcctacaacaagggc

SEQ ID NO: 21596 - DNA, 441 bp, Oryza sativa; identical to SEQ ID NO: 12032
  Clone ID: TF_OsC1457_5

SEQ ID NO: 21597 - DNA, 2041 bp, Oryza sativa
  Clone ID: TF_OsC1301_1
cacatgtccaactacggccgggaaaaaaaaaaaaaaaaaaaaaaaaaaaaaaaaaaaaaaaaaaaaaaggcccgggctgcaggaattcggcacgaggaatcctcccgcccggcctcttctcttctctggtggtgtgggtgtgtccctgtctcccctccttcctcctctcctttcccctcctctcttcccccctctcacaagagagagagagcgccagactctccccaggtgaggattcagccatgaagggggccaaatccaagggcgccgccaagcccgacgccaagttggctgtgaagagtaagggcgcggagaagcccgccgccaagggcaggaaggggaaggccggcaaggaccccaacaagcccaagagggctccctccgctttcttcgtttttatggaggagttccgtaaggagttcaaggagaagaaccccaagaataaatctgtcgctgctgtaggaaaagcagccggtgataggtggaaatccctgaccgaagcggacaaggctccctatgtagccaaggccaacaagctcaaggccgagtacaacaaggccattgctgcctacaacaagggcgagagcactgccaagaaggcacccgccaaggaggaagaggaggacgacgaggaggaatctgacaagtccaagtccgaggtcaatgatgaggatgacgacgagggcagcgaagaggatgaagacgatgacgagtgagccttccagtggacaagatgggagcagcaagacgctaagggcggcgggcgtcctaaggagcctatccatcatcatcatcgtctactagaattattcagtttcacttcacatcgtgatgttttactttttctctcgtcctataacggatagcgctccttgttggcgccactggtgggtgttgtggtgcagccaatgtcttgtctccaccgtcaatgatccgcttgtacctagattactctttccattgtcatcggctaacattgtgataatatcagtttgcgtatgttagattaaattgtttctaaaaaaaaaaaaaaaaaaaaaaaaaaaaaaaaacaaaaaaaaaaaaaaaaagtcacaattcatcacactacaacaacgctaaaagcggatgcagcgtagcaaagatgagattcaggcaagggttgcacagctaaagaaggaactctccgaaactgattcgatatatgatacagagaaattggctgagaggattgcaaagctttctggtggtgtggctgtcatcaaggttggggctgcaactgagactgagcttgaggaccgccaactacgtatcgaggatgcgaagaatgcaactttcgcagctattgaggagggcattgttcctggaggtggtacagcgtatgtgcatctttcaactaccgtccctgcgatcaaagaaacaatcgaagaccatgatgagcgccttggtgcagacattattcaaaaggcgttggtagctcccgcttcactgattgcccacaatgctggagtggaaggggaagtggtagttgagaagatcaaggacggcgagtgggaagtcgggtacaatgcgatgaacgacaagtatgagaacttgattgaggcgggtgttattgacccagctaaggtgacgagatgcgcgctccagaatgccgcctcggtggctggaatggtccttaccacacaggccattgttgtcgagaagccgaagcccaaggctcctgttgctgagccggcagagggaacccttaccgtctaaacagtggtgaatttcttcagggtggctttgtttagatggttcataccaactgaaatggtagaatttttgtctgggagtttttggttcagatcaaccgaaaggtctagtgtaggattggtttccatttttgagattgaaggtgcaacctgcctgatctgaactcatatgtccatcaaagaaataatttgcatcattatcgtcatcttcggtttaaactttataaagtaaatcatatggtgtttcttcaaaaaaaaaaaaaaaaaaaaaaaaaaaaacggcctgcagcccggggatccactagttc

SEQ ID NO: 21598 - DNA, 261 bp, Oryza sativa
  unsure (1)..(261): unsure at all n locations
  Clone ID: TF_3763394
agaaggtnggcggcgccgcntngaccgccgacccgaaccggcccaagaagccggcgtcgtcgttcctgctgttcagcaaggaggcgaggcggcactggcggaggagcgccccggcgtngcgagctccacnctgaccgcgctcgtntcggtgaagtggaaggagctcggggaggcggagaagcaggcgtngaacngcaatgccgcggaggccatngcggcgtacaagagggacatngaggagtacaccaaggcggcggccac

SEQ ID NO: 21599 - DNA, 940 bp, Oryza sativa
  Clone ID: TF_OsC90143_1
cggcacgaggtttttttttttttttttttttttttttttttttttaaaaaagataaaccaaagatgcaccaataacggcacgaactgagtacacaacagaatatgaatacagcagacgcgattaacagaaagccaatcgcggactagtcatcagatcagtgaataagcaaaatagtttacacatgctgcggaggttcgcaaaagaaaagcagtcaacagtattcagcattttcttcgctactagttaaacagagacacctccagcatgccacggcccaggagtaccttcattcgcacgttttccttacaacaggacataacaaggataacagtaacatagcaaagctaaagccctaagcagtgaacaccgatttgcatagctgcagctctctaagctatttactactactcgtcctcgccactgccatcattctcatcatcctcaacatcagacttcgacttgtcagaaccttctccctcctgttccgcaccatcagttttagccttcttagagctagtgctctccttcttcttgctagcggccgcgggcttgctctcgccatctggcttcttgcccccatattgcgctttctcctcgtccgacatagcgcgccacttctccccggcagccttggtcaccgctgcgacgcccttggtgtttgggtgcttctccatgtactgcggcctgaactcagccaggaaggcgaagaacggggtgaggccgcgcttgggcttgccggcgcctccggccttcttgcgcttgccggcggccttgaactcggcgtcggcgtcggccttgcccatggtggcggaaggggggtagggctttgcggagggttagggttgcagtggctggctggaagcggagatgagagcgaagaggagaggggaattgggtggtgtgcccctggtgctttgcgaaagccggggggggagacct

SEQ ID NO: 21600 - DNA, 468 bp, Oryza sativa
  unsure (1)..(468): unsure at all n locations
  Clone ID: TF_LIB4506-025-R1-K1-B4
ccacgcgtccggtgggtgtgtccctgtctcccctctccttcctcctctcctttcccctcctctcttcccccctctcacaagagagagagcgccagactctccccaggtgaggattcagccatgaagggggccaaatccaagggcgccgccaagcccgacgccaagttggctgtgaagagtaagggcgcggagaagcccgccgccaagggcaggaaggggaaggccggcaaggaccccaacaagcccaagagggctccctccgctttcttcgtttttatggaggagttccgtaaggagttcaaggagaagaaccccaagaataaatctgtcgctgctgtnggaaaagcagccggtgataggtggaaatccctggccgaagcggncaaggctccctatgtngccntggccctcttgctcaaggccgagttcctcttggcccttgctgcctccnncncgggcgggagcact

SEQ ID NO: 21601 - DNA, 521 bp, Oryza sativa
  Clone ID: TF_uC-osrocyp031b01b1
cttctctggtggtgtgtttgttttcctgtctcccctctccttcctgctgtcctttcccctgctctgttcccccctcttacaagagagagagcgccagactctccgcaggtgaggagtcaaccatgaagggggcctaatacaagggcgcggccaaggccaacaccaagttggctgagaagagtaagggcgcggagaagcccggcggcaaaggcaggaaggggaaggccggcaaggaccccaacaagcccaagagggctgcctccgctttcttcgctgttatggaggagttccgtaaggagttcaaggagaagaaccccaagaataaatctgtcgctgctgtaggaaaagcagccggtgataggcggaaatccctgaccgaagcggacaaggcttcctaatgagcccagggccacaagctcaaggccgagtacaacaaggccattgctgcctacaacaagggcgagagcactgccaaaaaggcacccgccaggaggaagaggaggacgaccaggaggaatctg

SEQ ID NO: 21602 - DNA, 2063 bp, Oryza sativa
  Clone ID: TF_OsC85710_1
tttttttttttttttaaccaactttcgatgccatataaccaattctaccaactattaaaaatattactccagtctttacagttgtaatgggttctaatgtgagcaacaaactggtgtactcagtactcctatgacgacagtgaataataaaataatatcatttctctaatttatcggacatcaaggatgcccggaagtgacccgtgatcacttcacctaagaaagagcaattcaaattgctaacagtataaaaaaagaagatattcaatgcgctagcatagcgcatcagtctctagagacgatgcaaaggtaaagtgaaacaaaacagcaatctgatcctacaacaaaaatccttcagaaattttcccttcaactcggcacaagcgttaattaggtggcatgtcacgtttctcatcaatcttagggttctccctgcggcgcagttcaaagcgctccccatcagcagaaggatcaggctgtccatgagaatctgttgtttccatgctcggctcaggagatgtctctgtgttaaactcttcatcatcttccacatttttttctcccgaatcagcggtttcatcactgctactggtactgctgctgtatccttggttggacagcaggatatcaccttcactgactttagagtccacctcatcaatcgtcacttctttctgaggaagtctctgctggataggcaccgcgttgctgattggctggcctgttctctgttctctgtaaagagctaactgtctctggtaccttgccttgtcctctacacctttttcttgatatactgctttatcttcagggcctaaattgttccatcgttcaccaatcatcttgctgataagcctgtcttgtccaggatattctggcttgagcttcctgtgctgatcttggaagaagaaattgtagccgctcctgtttggtttaggatggttggggtctgttgtacttaacttcttcctacggcggcggcggcgaggacgtatgccctcagcgctgtcaattgcaacatgaggcaccgcagttggcactgcaggttcttcggtgcaattatagagtaccgctttcgttgattttgagcccatgataacggtaactatgtagccatgttcaaacttaccatcaattatcacttgtacatcattatccaaagaagcagctaggtctgacaaagtcaaaggaactaactcttggcgctgaccatataggaagcttaaaaggcttgtggggtacaataggtaacaagctgataagtggtctagtggtttgatggcctcatgatttcctcgacatcctgggttcgagtgttcaagctgtgagtttttcccttttatttctcttattttaatggtcagcttttggccaattagcgccaacaccttctgcgcggaccatgtggacttcatgccagcttggcctttctcagaaccgaagtgtatggttggcgccaagatgttgtacctcggcaccttcatcaatggtgttgaacaaagggtccactctaagttaattggagggtctgaagaacaagaattgcttcctcttttccttttccgggaagcttgaccttcagctttcatttctatacaggaaatgcttctggaatctgcagtttcttgataccagccttgtgcctcaaacaagtatagcctctcaaaatggtataatagtgacatgtagtatttcttatcaatgccacctcgtgaagtgacctccttaaacagctgatgaagatcaaggtcttttccaccaataattggcaccttgagctttgtccccatctgggcgtgcaacccctcgagcgccctcctgaagaccgccgcgtccgccaccacgtccttgtaccccgcaacccgcgccgggtacgccaccaacgtcctcctcccgcctccgcttcccccggagcccgccgccaccgcagaatcctcctccgccaccaccaccttctccttccccttccccttcgcatccgccacgcccttcttccccgcctccaccccctccacctcctccgccgccgccgccgcagccgcctcctccgccgccgcgctcat

SEQ ID NO: 21603 - DNA, 769 bp, Oryza sativa
  Clone ID: TF_LIB4832-017-R1-N1-H2
tttcacacgaggccggacggactcttctcttccaagatcatgtgagagcgaccatgtcaatactacctactcctctcctttctcctcctcacatcccccctctcacaatagagagagagccccagatcctccccaggtgaggactcatacatgaagggaggcaaatctacgggggccgccaagcccagagcaaagtagtctgtgaatacaaccgactaggaaaagcccgccgaaaagggcaagaatattaaggccgccaaggaccccaacaagcccaagagggctccctaaggtttcttccattttatgcaagagttccgtaaggagctcaaggagaataaccccaagaacacaactgtcgctgctgcaggaaaagaagccgttcgataggagcaaatccctgaccgaagcggacaacgctccctatgtagccaaggccaataagctcaaggccgagtacaacaaggacattgctgcctacaacaaggtctatagcaccgccaagaacgcacccgacaaggaggaagaggaggacgacgaggaggaatctgataagtccaagtcccacgttcaatgatgaggaagacgaccagggcagcgaagaggatgaagactatgattactgagccttccaccggaccagatgggacccgcaagacgctaagggcggcgcgccgtcccaaggaagctatccatcatcatcatcatcgcctactagaattatcccgcttcccttcaaatcgcgatgtttaacctttctccacccgcc

SEQ ID NO: 21604 - DNA, 2268 bp, Oryza sativa
  unsure (1)..(2268): unsure at all n locations
  Clone ID: TF_OsC206808_1
atgacggacggccaccacttcaacaacatatccctcggcggccgcggcggcaacaaccctggccagtttaaactttattcgggaggacttgcatggaagaggcaaggtggaggaaagaccattgaggttgaaaagtctgatatcacttctgtgacatggatggcaatccccagatcctatcagcttggtgtttcaacaaaggagggcctcttctacaggttctttggcttccgtgaacaggatatcagttcattgactaacttcatggaaaagaacatgagaatcacaccagaggagaagcagctttctgttggtggacataattggggcggaattgaaatcaatggcaatatgcttagctttaatgttggttcaaaggaagcatttgaagtctctctagcagacgtagcacaaactcagatgcaaggaaaaacagatgttgttctggagtttcatgtggatgatactactggtggtaatgagaaagattcattgatggatttaagctttcatgtaccaacttcaaatactcaattccctggagatgagaatcgtccttcagctcaggttttatggcaggctatcttgaataaggctgatgttggctcatcagaggaagctgttgttacatttgatggaattgctattcttactccaagaggtcgatacagtgttgaacttcatctgtcattcttacgactccaaggacaagctaatgatttcaaaattcaatatagcagtattcttcgcctctttgttttaccaaagtcaaataatcctcatacctttgtggttatcactcttgatccaccaattcgcaaaggacagacattatatcctcacattgttattcagtttgaaactgaagcagtcgttcaaagggatctgacattaagtgatgaggttttggctgaaaagtacaaggatagactggagaactcttaccagggtctgatacatgaagtgttctccaaggtccttcgtggcctatctggtgctaaagttacgaggccaagcacgttccgcagttgtcaagatggatatgcagtgaaatcatcactcaaagctgaagatggttgctctatccgctggagaagggcttcttctttctaccaaagcccccaacactcattctgcatgaggagctgtagctctttatggcagattgagtatgttgaatttgagcgacatggtgctgggggtgctagtatctcatctcactattttgatctcctggtcaagctgaaaaatgatcaagaacatctattcagaaatatccaaagaaatgaataccataatctcttcaatttcatcagtggcaagcatttgaaaatcttgaatcttggagaagctcaaggtagagctggtggcgttacagctgttcttcagagcactgatgatgatgctgttgatcctcatctggagcggatcagaaatcagactggcgatgatgagagtgatgaagaggatgaagattttgtggcggacaaggacgacagtggatctcctactgatgattctggagaggagggttctgacgctagtttaagtggaggagaaaaggagaaatcttccaaaaaggaagctagtagctcaaaggcgcctttgaagaagaggaagccaaagggtggggatgcggcggaaggctcggagaaaagaaagccaaagaaaaagaaggatcctaatgcccctaaaagagcaattgcaccattcatgtacttctcaaaagctgagcgagctaatctgaagaacagcaatccggagctggctaccacagagattgcgaagaagcttggggagaggtggcaaaagatgacagccgaggagaagcagccatacgtcgagcagtctcaagttgacaagaagcgctacgcggaggagtcagccgcctaccgcggggcggctgccatggatgtggactccggccctgcttcggactgaagagaagagacctgaattgcattccagattacccttagtctaggagggcgacagacaggatacggctagtggcatctctatttccatgtaaataaaacttatgagttatctggatgtaaataaaactatcgtaggtatctttcgagtcccgttctatgagtgtcttatcgctttatcttagctatatatatagatagcagctatagtatagtagagttcttcccgccatttatgctggccggataacttaccttcacctatgtagcagcaataagcatgcttatctgcttagttaaattataaatgcgtgttctagcntggagaatc

SEQ ID NO: 21605 - DNA, 478 bp, Oryza sativa
  Clone ID: TF_uC-osflcyp054d10b1
ctcttctcttctctggtggtgtgggtgagagggggtattccaaatccttcctgcgctccttaaccctcctctcttaccccctctcacaagagagagagcgccagactctccccaggtgaggattcagccatgaagggggccaaatccaagggcgccgccaagcccgacgccaagatggctgtgaagagtaagggcgcggagaagcccgccgccaagggcaggaaggggaaggccggcaaggaccccaacaagcccaagagggctccctccgctttattcggttttatggaggagttgcgctaggagttcaaggagaagaaccccaagaataaatctgtcgctgcatgcggaaaagcacccggtgatcggtggaaatccctgaccgaagcggacaaggctgcctctgtagcccaggccaacacgctcaaggccgtgtacaacatggccattgctgccctacaaccagggcgagagcact

SEQ ID NO: 21606 - DNA, 1785 bp, Oryza sativa
  Clone ID: TF_OsC5000_2
tcgccggagcgtgggctcctccgattcgaaaccctagctcgtctctctctgtgctagattccatggcgacggcgggtagtaggaagggcgggaggggccggaaggcgctgacggcggtgctggacaacgacgctaacatctccgccgggaaggccgacgtggccgctgccgccgggatcctgtcgccgccgcagaaggcgaagagggcgacgtcgaagagcagcaaggggaaggccgcggctgcggcggcggcggaggaacaggcgtcggtggtggacgcggtgtcggagctgcaggggatgctggaggagctgcggctggagaaggagaaggcggaggagatggtgcgggagcgggacgaggtcatccgcaggaaggaggaggagcagggtcgcctccaggccgagctcaagaaggtccagcgcgccaaggagttcaagcccaccgtgagcattcctctcgtgaaggcattgatcgagaaagaccaggaaggagagaagaagaagggcaagggcaaggccggccatgagaggaagaagccctgcccggcgtacgtcctctggtgcaaggaccagtggaacgagatcaagaaggagagcccggacgccgacttcaaggaggtctccaacgctctgggagccaagtggaaggcgctgggcgcggaggagaagcagccgtacgaggagaggtacaggcaggagaaggaggcgtacctgcaggtggtcgggcaggagaagcgcgaggccgaggcgatgaagctgctcgaggaggagcagatgcagaggaccgccaaggagctgctcgagcagtatctcaagttccggcaggaggccgacgacgacggcgacggtggtgacaacaagaaggcgagcaagaaagggaagaagaagaagaaggagaaggacccctcaaagccgaagcagcccatgtccgcctacttcgtctacacccagcagcgccgcgcggcgctcgtcgccgagaagaagaacgtccccgagatcggcaggatcaccggcgaggagtggaaggcgatgtccgaggcggagaaggcgccgttcgaggcggcggcgcggaagcagagggaggagtaccaggtggagatggcggcgtaccggcagaggaagcaggaggaggcggcgtgccaggagaaagaggaggaggagcagaagaagatcatgaagcaggaggcgctccagctgctcaagaagaaggagaagacggacaacatcatcaagaagaccaaggaggagcagaggaagaagaaggtgggcggcgccgccgctgccgccgacccgaaccggcccaagaagccggcgtcgtcgttcctgctgttcagcaaggaggcgaggcggcagctggcggaggagcgccccggcgtggcgagctccacgctgaccgcgctcgtgtcggtgaagtggaaggagctcggggaggcggagaagcaggcgtggaacggcaaggccgcggaggccatggcggcgtacaagagggacatggaggagtacaccaaggcggcggccagcggcggcggcggcggcgacgcctccccctgtacgtcctcctcggcctcgtcctagtcgccatggatggcgatggtggtggtggtcctaacgctgacgagaaatatcttctctgaatccaatggagaaaacagtagctttggtgattggtgcgaagttatctgttgcgtttggtctggtttaggcgtaacatttcgtatggattggggtattctgcttcaattttataactcagcaagcttgagaaatttcagcttattttcat

SEQ ID NO: 21607 - DNA, 423 bp, Oryza sativa
  unsure (1)..(423): unsure at all n locations
  Clone ID: TF_2311851
gtgtccctgtctcccctctccttcctcctctcctttcccctcctctcttcccccctctcacaagagagagagcgccagactctccccaggattcagccatgaagggggccaaatccaagggcgccgccaagcccgacgccaagttggctgtnaagagtaagggcgcggagaagcccgncgccaagggcaggaaggggaaggccggcaaggaccccaacaagcccaagagggctccctccgctttcttcgtttttatggaggagttccgtaaggagttcaaggagaagaaccccaagaataaatctgtcgctgctgtaggaaaagcagnnggtgataggtggaaatcccttgaccgaangcggacaaggctncctatgtaggcaaagggcnacaagcttcaaggncgtgtacaacaagggcatt

SEQ ID NO: 21608 - DNA, 480 bp, Oryza sativa
  Clone ID: TF_LIB4833-008-R1-N1-G8
ccggccggctcttctcttctctggtggtgtgggtgtgtccctgtctcccctccttcctcctctcctttcccctcctctcttcccccctctacaagagagagagagcgccagactctccccaggtgaggattcagccatgaagggggccaaatccaagggcgccgccaagcccgacgccaagttggctgtgaagagtaagggcgcggagaagcccgccgccaagggcaggaaggggaaggccggcaaggaccccaacaagcccaagagggctccctccgctttcttcgtttttatggaggagctccgtaaggagttcagggagaagaaccccaacaataaatctgccgctgctgtaggaaaagcacccgcagatagcaggaaatccctgaccgaagcgcacaaggctccctatgtagccaaggccaacacgctcagggccgagcacaccagggccattgctgcctacaacaagggccagag

SEQ ID NO: 21609 - DNA, 2991 bp, Oryza sativa
  Clone ID: TF_OsC1457_1
ctggccggcccggctagcagcctcgctctcgcctccctcgtctcctcgacgcgatgccgccttcgccctctctcaaaccctagcctccgcctccgcctttccctcccctccccgtcgcgggcgcctccgccgccgcgtcccccgtccccgtccccatccccatcctccgtccgctagcgccgccgctccgtccttcccatccagatcgcgccaccccgtccgcccgcgcgtcgtacgcctccaccagctgccggtcctccgcctcccggtcaagatccggcaccgcgccgctttcctccgtcgccgccatcctccgtcgcctccgcctcccgttcgagatctgcagccccttctctgcacgtcggtttctgcgctgccgccaagaaggtttcaattttggtaggaacaccatctcaagtgcttatttagcagatatttgcttgtggcgagacagaaattggccctgtttgtgccggccgccctcgaaatccaatccacccgcatcgcatcccacccacgaacgcttcgccgcttgataaaccaaattccccaccgccgcttcgttctcgccgatccggagggctcgagatgaaggcgaggtcgaggtccagcaatggcgactccaggctctcggtgaggaagaccaaggcggagaaggacccgaacaagccgaagaggccaccgagcgcgttcttcgtgttcatggagcagttcaggaaggactacaaggagaagcaccccaacgtcaagcaggtctcggtgattggcaaggctggtggtgacaagtggaagtccatgactgatgctgacaaggctcctttcgtgaccaaggctgagaagctcaaggctgagtacaccaagaagattgacgcctacaacaacaagcaggcaggaggcccggctacctcaggcgactctgacaagtccaagtccgaggtgaacgacgaggacgagggcagcggtgacgagtgatcgatggagggctgcaggtagtagggaaagttctcgagtcggcctaaccaaagtggacgttgctggttgctgctccttgctagtgttcggatgttgctgcctttagcttttagtcttagaggtctcctcctgtagcttagctctcatgtggtgtcctcgctctcttcggcacttgaccaccatcttgtcgtctgttttgtctcactgtctgtaatctaagtgagtactcgtatctgttgctgttttaaatctcagatctcagtagatggtgccatctgtgttagttgctgaagaggaaaaggaaaaaaatataacaagtctcttgcatcctgtttaatgatgcatccggatctgtcagttcgtttaaaaaaaaaatacctttcttctgtaaccaagacagttcgcatttggcaagagagcgagggtggaaaatataattgcatccacacattgaaagatcatactgctgaggatattccgccattcggcaccatggctaacatcagaaccgtctctagcctcggggaggtcaacggtgtcctgcaagagatgggtatcaatacgattgatcaagctcatcaagttcaatttcgtttacacaagcaaacatcccttaaagaagcaacagatataaagatgatgatccgaactggaaggcatggattcaggttggttaaccctgagcttttagattgtaagtttgatgccagcgttaagctagaggagtggtacaataccatgctctttgtcatcagattcaagcatcagttcaaagtatagttcagactcaccctcactgtcaccttcaactagctcgccaacatcacttggtctttcgcccgcttcatctaatttttcccacactttggtgccatcatctaggtccccccttcaccaatcatctaacgaggaaccttcaaaatctggcctggggtcaatacgctctccctccaagacctcttctatagcagaaagaagaggagggttttcatctctgaagttaccatcattccaaaaggatctagtattaccaccaagggtaccgaccagccttcgcagagaagaggaagtcacagataagagtaataataatagtgtaaaacagcttactggtgtgtgttgcccagagaaatgcactggcaatacttcaacagtgcacactaaaactggaataactgagcgtactgacagtatctcagaggcttgcggtaatttacaactattagtctaccgttggcccagcaaggaaaagctaactactttcactcgcaaggatcttgacccaaaatcagttttgatttttgttactcctgaagacagcagaagtgaagcagttaaaacggtacacatttgggtaggaggtgaatatgagagcagcaaatgtgttgacactgttgattggcagcaagttgttggtgatttttttcatctaaaggagctcggcaatactcttcctgttaaggttttcaaagagcatgaaacggagaatcttttggaagtgctgaatgctcgttaatggtaggctcagtctgtaggtatcagcatattgtagtagcttaacaaagtcagccgtgaagtatgattgaatgaaggcatctcctccagaatcgctccatgcggtggtgattttcagcgaggtataagccgttacaactattccccttgaacatatagaccacagattccatttagtagaactgatgatggattggcaattggtgcctacctcatatgatttgcttatggtcagaaaatgggcaggaggctgccagaacgttgtatctgtgagttaaaacacacatggatcaggttttggcacaatttgggtgtatattctccgctcccctgtaatgtaagctcagaaactgggaggcaaccgtgtcgttttcaccctaaaaatttcttgtacatctcgaaaaagaaacagatcagatgtgtaatcctcttgtcttataagtccctccattggtcttaacttttaagctaacaaaaaaaaaaaaaaaaaaaaacctcagcccg

SEQ ID NO: 21610 - DNA, 723 bp, Oryza sativa
  unsure (1)..(723): unsure at all n locations
  Clone ID: TF_LIB4833-024-R1-N1-F8
ccggccgggatacaattctcccacccaaattcgtctctacactcaacacgcctcaatacgtctttgtgactacatcaacaccacaaatccctttcttctaaattcatccctcagaacacaatcaaaatgcctaaggctgctgctcccgccaagcgtgcgaccagaactaagcgggccaagaaggaccccaacgctcccaagcgcggcctgtctgcctatatgttctttgccaacgaacagcgtgagaacgtccgtgaggagaaccctggtatctctttcggtcaagtcggcaagctcctcggtgagcgatggaaggccctcaacgagaagcaacgtgctccctacgaggctaaggctgccgctgataagaagcggtatgaggacgagaagcaggcctacaatgccgatcaggaagaagaggagtcttcttagaatggagcctccgatgtcaaacccaagcgtcgctccgcagaagaagtctgaatcggattagtcccagcaccangcgccgtggttgtagattctgggccaggaagtccttcctcttttgcattttgggtctgggggcggtggttgtatgatgngcacaggaaagaagtgccttgtttttttactaggaatttntctcgnggttaaggccccgtcccccgatgttattgatcctttgaggggcgaatcgattgagctactgccttttctattttcagtggtccttgggccatg

SEQ ID NO: 21611 - DNA, 790 bp, Oryza sativa
  unsure (1)..(790): unsure at all n locations
  Clone ID: TF_3548937
ctcctttcccctcctctcttcccccctctcacaagagagagagagcgccagactctccccaggtgaggattcagccatgaagggggccaaatccaagggcgccgccaagcccgacgccaagttggctgtgaagagtaagggcgcgganaancccgccgccaagggcaggaaggggaaggccggcaaggaccccaacaagcccaaganggctccctccgctttcttcgtttttatggagganttccgtaaggagttcaagganaanaaccccaagaaataaatctgtcgctgctgtaggaaaagcagccggtgataggtggaaatccctgaccgaagcggacaaggctccctatgtnnccaaggccaacaagctcaaggccgantncaacaaggccattgctgcctacaacaagggcganagcactgccaagaangcacccgccnaggaggaagaagaagacgacnaagangaatctgacaagtccaantccgaagtccatgatgaagatgacgacnaaggccncgaanaagatgaanacnatgacnantgaccttccagtggacaagatgggaacacaagacctaagggcggggggctcctaaggacctatccatcatcatcatcatcgtctactaaaattattcagtttccttcacatcntgattttttacttttctctcctcccataacggataacctccttgtttgcccctgttggtttttttgttcaaccaatttttntctccccntcaatgatcccttgttctaaattatctttcattgtctcgg

SEQ ID NO: 21612 - DNA, 1092 bp, Oryza sativa
  unsure (1)..(1092): unsure at all n locations
  Clone ID: TF_OsC4387_1
nnnnnnnnnnnnnnttttttttttagtatatcagcatttgttgtttcaattaagttgatgaaatcagatacaagtcatgagtcaattcaccaaggaagcaacatatagagacagagagcagcaaaggaaggaagcccttgagaatggaatggggaagaagttgcactccaatcgaatccaaaaaaagagggataattaagtcgtctaatcattcattcattcattcacttgatgtgcaggtcacactgcaagcactagtagttctagtactagaagatcaccaccaccagaatcaatcgatactgctgctcccactagcatactagcaatgtgatggatccgccatttacaaaaagagaaggaattatccatccatccatccattggaccggtggcctagatgtcgtcgtctagctcgttcttctcttcctctgcaccatcttcatcttcttggtcgtcttcatcagtgcctttcttgggtggctgatctacctcctgctcgcctgcgttgccaccaacattgttctcgtcgctgcgctcgccattgtggtactcggccttgagctctgcagccttgtccaagtaaggcttcttgtcctcgtcagacatggatttccacctctcccctccttccttggcgacagcggagacgctcttgttgtcagggtgctccgccttgtactccttcctgaagtcactcatgaagaggaaaaaggcagtgggtgggcgcttgccctttttggccccctcgccattgttgttgttgttcttgccgctcttcttcttgctcgctgccacctccacggcctgctccaccacctgagcctctaggctgatgcggatcttgtcgtcgaggctgcagttgtgcatgtcgatgaggaccacggagacgctcttgccgcaagcctcgcagcgggtgaaggcgctgccgtcgcgcgcgcgcttcaggacggcggaatccgtcgcctccacgcgcttcctcgtgcgtgcgccggatttccccgccattacagaggagaggaggagggctatggatttggaggagatggaggtttgccccggccggcgcagtaccaatcgcccctataggag

SEQ ID NO: 21613 - DNA, 863 bp, Oryza sativa
  Clone ID: TF_OsC742_1
gcacgccggacgctccgccccaaaaggccagacaacgcccgttgcgccgcctcccaaactccgcctcctcctcctccgctgcacccccgcaaaaaccctagcgcaccgacttcgcgatctccgcgccgcagccatgaagggcaaggccgacgcctccaagaagggcgagggcaggctcaaggccgccggcggcgccgggaagcggaagaaggccgccgctagcggcaagccgaagcgcccgccgtctgctttcttcgtcttcatgtctgagttcaggcaggagtaccaggcagcgcatcctgacaacaagagtgtcgccgccgtgagcaaggctgcaggggagaagtggcgagctatgtctgagcaagagaaggcaccttatgtggacaaggctggccaaaagaagcaggactacgagaagaccaaggccaacttcgataagaaggagagcacaagctcaaagaaagctaagacccatgatgatggagaaggctctgacaagtccaagtctgaggtcgacgatgaccaggatggtggtagcgatgaggaaaatgaggacgatgaagagtaaatagtgtatccgggggcatgaggtagcaaactgtgtcttaggtcccctattagctttactagtttgctatcttcgaccctaagatgttgggaataggcgtgcgtgggtgtgaagggggaccgtttagaattatggtactcagaatgttttcctacagtggattagcaaagaaaaagcctgaatgccgcctgctgttctgttgcttttcttttgctaaccacttgtcacagaactttgtttcatttgctaatctagtagcaattcagttagctttcttttcgttaatttcgtt

SEQ ID NO: 21614 - DNA, 2597 bp, Oryza sativa
  Clone ID: TF_OsC1450_1
gcatgctcgcgaaaaacgaggaggggagttaggaaccttgacatacaaccaatgataccattttttttcaagcagctagaggtacagaggttcatattttttagatggctcattagtgatattttagtcaaaaatttcagaagtacggccacgggtgatggcctgaactaatattttattcgaggtgccgctacatcatcgtctaaagtacacgcaagattcaacggaaaaaagaaaccgatcgatcgagatcagttagttaatgaaataactagatcaactcatgtcgtcaaaaacaaaagatgctcatctatggacaacacacgctgatgattcgatcatcaaacaaaggtggtagtagtagtaaagcgtatcgtgtttctcatcagaaagaagaattaaagaaaaaactaatcccgtctcgcgagccagagaaaattccctacaaaagccactcctttgatttgacatgcaaaagcaaggctccactcctctactaccctacaactacacaacactgtctctctatctccaaaggcagtagctgtattggcttccagcttttcctctctacctctaatgatagcttggagcaagttcaatagtatagctaactactagctctaattcatctataatcaatctaatagcttattcatacaatagttatatactacattattaatatctggtcccatctatcatacacactgagtctgtgctatagctgactacaaatctgtagcccgctgctcttctctcttcatttatcttcttaaaatatatttgcagctggcttatggcttatagcttgatattgagagggagaggagtgagagctagctcagctcagctcaaggtaaacaacaaggcacactcttcctacctcttctccggttcttcctttttcctctttctcttcgtccaagaacttcacctcaatagctcgagctacggcctaacttttgcgttgcgcaggagagctcgatcgctgcaccaatacttcactggagatcgcctagctgcagctagctagcttatcctgcgtgtcttgagcttctctcatggaggagatctcccaccacttcggggtcgtcggagccagcggcgtccatggcggccaccagcatcagcatcaccaccacccgtggggttcttccctgagcgccatcgtcgcgccgccgccgccgccgcagctgcagcagcagcagacgcaggccggcggcatggcgcacacgccgctcacgctgaacacggcggcggcggcggtcggcaacccggtgctgcagctggcgaacggcagcctgctcgacgcgtgcggcaaggcgaaggaggcgtcggcgtcggcgtcgtacgccgccgacgtggaggccatcaaggccaagatcatctcccacccccactactcctccctcctcgccgcctacctcgactgccagaaggttggggcgccgccggaggtggcggcgaggctgacggcggtggcgcaggacctggagcttcgccagcgcacggcgctcggcgtcctcggcgccgccacggagccggagctggaccagttcatggaggcgtaccacgagatgctggtgaagtacagggaggagctgacgaggccgctgcaggaggccatggagttcttgaggagggtggagacgcagctcaacacgctctccatctccggcagatcgcttcgcaatatcctttcctccggctcttctgaggaggaccaagaaggtagcggaggagagacagagctacctgagattgatgcacatggtgtggatcaggagctcaagcaccatttgctgaagaagtacagtggatacctgagctccctgaagcaagaactgtcaaagaagaagaaaaaagggaagctccccaaggatgctcgtcaacagctcctcaactggtgggagctgcactacaaatggccttacccctcggagagtcagaaggtggcactggcggagtcgacggggctggacctgaagcagatcaacaactggttcatcaaccagaggaagcggcactggaagccctccgacgagatgcagttcgtgatgatggacggctaccacccgaccaacgccgccgccttctacatggacggccacttcatcaacgacggcggcctctacaggctcggctagctagctagcctactccttatccccagctaccatgacctagatcgatctcgaccccaaatcaatggtcgctaagctactgaaaagtttgtgatgagaattgaagaacctaggttagtcttcctggtaatttgatgctcgcgcgtacgcacgccatggatggctgcgtgcttattttgtttcttgccgcaatatgtaatgcaattgccttagctaatgcatcaactcgggtcggttttagctgctgctgctgcgccacaatgaggtggttgtggttatgcttttgtgtggtttaatacgccaagacgtacacattgcttcgaaatgtcgctactcttgctgctgctaattaagtgcgtgtttgaataattcggatctatatactacctggttaattcctatcttctgattatataatttgctgatcgttcgagtttgtgagattttttt

SEQ ID NO: 21615 - DNA, 282 bp, Oryza sativa
  Clone ID: TF_uC-osflM202042d03b1
ccgtcattagcgcgccttccaccacatggggatcatggggcaggaggcgtggcgcccccagcgcgtcctccccgagcgctccgtcaacatcctccgctcctggctcttggaacacttactccacccgtacccgagcgatgcagataagcacctgttggcgaggcagaccgggctgtccaggaaccaggtctcgaattggttcatcaacgcccgtgttcggctatggaagcccatgatcgaggagatgtaccagcaagaatgcaaggagctcgagggttcctc

SEQ ID NO: 21616 - DNA, 2144 bp, Oryza sativa
  Clone ID: TF_OsC147537_1
gctggcgacaaattaactgagcaccctttatttgccagagtgggagcaaccacatttgcaagtcagatgaatagtacagggttaacacggcttaaccgcggatcagaacaaatagggaacaacactacaaacaggtcttcaaaggtatagtcatatgctctctatagccccacaatgtcaaatatcgacaagcattcgtggatctacgacaggcgtgccaatgcccctcttttcttcacctcctacttccaactacaatataggtagatcatacatctgcatcctacaataatcaccaccgatctccttggtgaaacaatcatatctgctcttcaaccaacaaagtcatggagcaaatggccaccgatctccttggtgaaatgccggtcctgaccaccaaatgagctcatcacgtaggcatcactaacgtcctccagtccgaaacgatgggcaagattgagcggaagcgcggccggaaggggctcagcaatgtaagctcggttattgttctggtgaaggccaagggtgagtgagacaccgccagcattcgcggcaccaccggtgccaatgaggtcaggttggtggtggtgcgccatcgcgatgctgtgatgcgcggcgagcccgttgtatgcgaagctcacctgaccggagatgtcatggggcatctgggagaggccgtcctcgatgtgccgggaggcggagatgctgtgattcctggtcatgctgctactttgcccttgcagcgagtttgatggatcacagggcttcccgctgctgtccgacgaatgttgggtgtgctgcatggagagctgattcttgtcaagagacggattcttctgcagctgcctcatctcgaggttgtgaatttcttcaaccattggcttccagagcctaacccttgcattgataaaccagttcgatacctggttcctagttaatcctgtctgtttagcaagcatctgcttatcgctgtcagttggatacgggtgcaggaagtgttcgaatagccatgcacgaagaaccgaaacagcacgctctggtagccctctttgcgggcgccatatgttgtgaggttggctaaacgaattcacattgtttccccttagtaggccagcgccgccgcccataagcccaaagtttgttgtgtcttccttgccgagaccatcttttgtagcacccttgcccgtattgcgcagctggttcagtataatgcccttcaaatacttgaaatgcttcgacattgtcctaagagccatggaagcaaaaggagcagcattgctcagacccgcaacagtctcaaaggacgatactacagcttggagttgctggtagtattgcctgtatcgcttgcaaaccttttgattatagataaactgcggatcacctcctgctagttttagaagggagcttaaaagagccttgaagtcttccataagcgagatgagcctagtcttcctccactgctgctcggcgccggagaccgtgaccgcgtccgcgacggcgcgatcgctgccgtccatctcgtggtcgacgcttcccgcggcgtccatggcgtctacgtcgagcaaaccctcgtcggagcccctgtcaagctgcgcggggcggccgccgacgtcgcagatctcctcgagcagcttctgcgcggggcccaagaacctggaccgcccgagcacggcggcgtagcccgtgaagggcccgtacggcccggcggccccgccgccgccgccgccgccgccaaactgcctcctcggcgtgggcggagggttcgaggacgccgacgacagcgacagcgcgaagttctggctcgggatctgggcccctccgctcgtcgcggcccccggcggcatcccatgcgccaccaactgcgcgtgcgccagcgtcgggctgtgcggcgagtacgatgacgaggacgacgcgtaggagtagaacgccgggggcagcggccacgacccgggcggcggcggcggcggcgactccgccgggtggtcgggcgggaaccgcagcttctcccgccggctgtgctgcggcacgtggtacagctgccccgccgcctgcccaagcagcaggtggtgctgctgctgctgatgctgatgctcgccgcctccgcccccgtaccctcctcctccccccgcggcggacgacat

SEQ ID NO: 21617 - DNA, 1310 bp, Oryza sativa
  Clone ID: TF_OsC1713_5465
atattttttgtaataaccaagttactattaaactaatggttcttaacattttctcttagtaactaaattacaccaatgattctcaacataacatattggtcttgtcacagagtttctcgtagtaaccaagttagaattacaccgatggttgtcggaggcgatggcggcgtggtggataggtatggagtgaaagagggcaacgggtcggccatggagggctggccggtggtcctcttgtatctggccatccgcggacagccgccgggagcacgcgcgccttgtgctgacccggcgtgcttgaggggatgcgggtgcgaacgacctcctcgctatcggtggtgtcccaccttagccgaatcatctctccagggcttgacttagtccctgtgcacagatggaaataatcaccgctgaggacgcagaaatcaagtggatgagtacctctcgtcaagtgcatcaagctgtacaatctgccatgctttcccttgatgaggaatacaatcaatcagcttcaatgtcgctggccacaagtaaaattaagaatattaggcctgaaaaagtatgttctgtcaaaacattccgataaaccgtagcatgttgactgggaccatatgtagtccggtagttcagaaatacaatccaatccatcttggttatcaaatctattatgtgctcaatatgctttgttaaccgtggctcgtgagtagggggaggcactgaagatcagacatatcaagaatggctgatgcccggccagttcctctacgggaagaggagggcagcaactgctcgccatacatcccaccaggagccattgttagctctctgtgtggcagcggtggtgacagcacaggaggcggcgccataactggcacatgaacctcctcctccagctgctgccgcttcggcggtggtttacggtccttcaaccgccggtggcagaaccacatctgcagctgcttgtctgtgagccctaactgtgtaagtcctcttgagaacctccaactgatagggcgtcttcatgatgcgcttcaccttcccgctggatccagaggcgctacaccaccaacagcggcggcgggagtgggagagggagcagaagcctgagccgacgccggggcagggctctcctcctccatcctagcgtcgcccgttcttgtccgctcgcctctgcccggctccgatctccggcgactgcagcggcgacccacgagcgctacctctccagccgattccacctgtcgctggccgatttcgcccgtcgcccgccgcccgccgctggagacaccgccctgcagcccggggatcca

SEQ ID NO: 21618 - DNA, 2517 bp, Oryza sativa
  Clone ID: TF_OsC796_1
cggcctttctgctttcgctttcacagtttcacggcttaccatttccttcccatctctccctcccgccacccccctctttctccccctccgtgtctcgcctttgcagaaagaaaggcgccacgaacccagcaacaacacccagcacaaaggcgaaacggggaaaaagaggaggaaaacaacaagaggacgcgaggggtcggggtgggagagggaggctacactacagcagcagcagaagcagagcgggagagtgatgagggagtgagaccaggccagccaagccaggcccgggcgctcggaaagtgcggagccgtttcccctctatctccactctctccagggccaggtgctcactgcgctgcgcctcttcgcacgcaccacccgtactacgtgcccacccgcgcgcgcgccgaggagaagagacccacgaccgtacgtgcgtgcgcgccatgtcgtccgccgctgggggcggcgggtacggcggcggccagggtggaggcgcggagcaccaccaccaccaccacgggcacgccggtcacctcctgctccaccaccatccgcagcacgtggccggcgcggccgttgcggcagcggccgcggcggcgggcgggcagatgtaccacgtgccccagcacagccggcgcgagaagctccggttcccgccggacgccggggactcgccaccgcctcatggtcatggtcatggtcatgccccgcagcagcagcagcagcacgggtcgtggcctccgcccccggcgttctactcgtacgcgtcctcgtcgtcgtcgtactccccgcacagccctactctagcgcaggcgcagctggtggcgcacgggctggcgccgccgctcccgcagatcccgacgcagaacttctcgctgtcgctctcctccgcgtcgtcgaatcctccaccaccgcaggcgcagccgaggaggcagctcggcggcctcgcgcaggccacggggccgttcggtcccttcaccggctacgccgccgtgctcggccggtcccgtttcctcggcccggcagagaagctgttcgaggagatctgcgacgtcggcggcgctgcttcgcacgtcgaccgcaccatctccgacgagggcctgctcgacgcggatccgatggacggcgtcgatcatgacgtcgttgatcacgacctcggcggcgctgaccgcgcagcggccgacgctggccccatctcgggggccgagcagcagtggaagaagacgaagctcatctccatgatggaagaggtttgcaagaggtaccggcagtactaccagcaggttcaggctgtgatggcctcgttcgagaccgtcgccgggttcagcaacgccgcgccgttcgcggcattggcgctgagggcgatggcgaagcacttcaagtgcttgaagagcatgattctgaaccagctgcgcaacacgagcaacaaggtcgctgtgaaggacgggctaaacaaggagatcgccgtgttcgggctcgccgggggtagcagcggcggcgccggcctccagcgagcgaacagcgcgagcgcgttcggccagccgcacaatatttggcgcccacagagggggctccccgagcgcgctgtgtccgttctacgcgcgtggctgttcgaacacttcctgcacccgtatcctaccgatggtgataagcaaatgctagcaaaacaaacaggcttgacacgcaaccaggtatcgaactggtttatcaacgcaagggttaggttgtggaagccaatggtggaagaaattcacaacctagagatgaggcaaatgcacaagcactcggtggttgacaagggccagcatagcgtgcatcatcaggcccagcattcttcgcagtgcagcgggaatccctccgttccttcggactcccatcctggacagagcagcagcataacccggaaccacaacaccgctgcctcccagggcttcccggatgagctctcccagatgtcccagtccatccagggacaggtgagcttcgcatacaacgggctgacctcgcagcacaacattgcatcaccacatcatcagcaccagcaggtcggcggtgttggtatcggaggcggcaatggcggtgtctccctcacccttggtcttcaccagaacaacagggtctgcatcgccgagcctctcccggctgctctcccggccaacctagctcaccgtttcggactggaggaagtcagtgacgcctatgtgatgagctcatttggaggtcaggaccggcatttcgggaaggagattggtggtcacttgctgcatgattttgtcgggtgattgtggctgctgcctcaggttgctggtgatgcacttgtaatgtactgctagtatgatgttaggatggtatataagtcaatcacttggcgacatggcttgatgatcagtctgaatcaatttgttcggagggtgaaaaaacattgatcttcccttcatgtagatccaggtatgctgtcaaatatttgacaccttgcgggctatagagagattgacaataccttcccaaggc

SEQ ID NO: 21619 - DNA, 572 bp, Oryza sativa
  Clone ID: TF_OsC244_6
tttctttctcatctcacatcgactctatagctacctacgcggcatctttgtatagagctagagctagcacacaagagagagggagagaggtgtggtggatgaaggaggagggcgagccggaggagcacgctctccagcctcagcggcaagcgcggcgcgccatctgctccggcggcggtggcagcgaggactccggcggcggatcccgcaagaagctccgcctctcgaaggaccaagccgccgtcctcgaggacaccttcaaagagcacaacaccgtcaaccctataagcaagcaaacaaacaatcaaaaagcagaaggcggcgctggcgaggcagttgaatctgaagccgtagcaggtggaggtgtggttccagaacaggagggcgagaacgaagctgaggcagacggaggtggacagcgagctgctctaaggcagacggaggtggagggagtcaaagtggacttattaaatcaacgtggacaggttggagagggaggccgggctctggggcgtactgtagattttgggccgttctctatggcccaggatgcggtgtccgactccaactaa

SEQ ID NO: 21620 - DNA, 1568 bp, Oryza sativa
  Clone ID: TF_OsC1648_1
cactgttgctgctgctgctgctgcttgcaaacactgaataccctaacctctttcattaatttctcgctctgattttgaccgttagaacaaagctaagatgggccatacgtatactaggaggagtaccatcatattcatcttctttctagcttcctctcctcttcacattccctgcatccatccatctcaaccaccaccacctcatttcaggagatcatctcctccttttctttgctagggtttgtttgccataactactatctatcgcctcttcttcacctcacctgtcctgtcggccatggagagcttcgccagtctcgcaggaggtggcagcagcagcaccacagctcggttgccggagctgatctcgccggagaacccggaccacatctcgccgcccccgttgctgtaccagctgctcgccggcccggcgtcgtcggcgcggcagcatgggcatgatgggcatcaccacggcggcggtggcggcgaagcagcagcagcagctgtgcagggacaggtctcgccggcaggcgcggaggcggcggtcaaggccgagatcatgtcgcatccgcagtactcggctctcctcgccgcctacttaggctgcaaaaaggtcggggcgccgccggatgtactgaccaagctcacggccgtgccggcggcgcagcagctggacgaagccgacggccaccctcgtcgccggcacgagccacggcgtgatgacgacccggatcagctcgatcagttcatggtctcgacctgcagcatgctgacgaggtacagggaggagctggagcggccgatcctggaagccgcggagttcttcagcagggtggagacgcagctcgattcgctcgctgagagtaattgtgaaggcacgggatcatcagaggaagagcaagaccctagtgacaagcagctgaagcaccagcttctgaggaagtacggtggctcgttgggcgatctccggcaggtgttctccaagaggaccaagaaagggaagcttcccaaggaggccaggcagaagcttctgcactggtgggagctgcactacaagtggccctatccctccgagatggagaagatgacgctggcgcagacgacggggctggaccagaagcagatcaacaactggttcatcaaccagaggaagcggcactggaagccgacgccggtggcaggcacggccttcccgacgatggaagctgccggaggcggcttccgacactccggccacggcggcggccttgcggcggcggcggcgctgccgctgtacatgggcaggccgttcgttgtggacggcatgtaccggctcgggtcttgaagcctctggggatcgcatggtgtttgcatggtgttttttgcttggtaaatatttgctagcagcttcccatgatcagcctgtgggatggtgaaatggaagaactgatgaatcttcatcacgatctttcctctcatttttttttctttggtgtgtgataaaagctcagatgtaccacgtactactgtctgcttctttgcaaatggatatgtaattgaaagctttaattctaaaaaaaaaaaaaaaa

SEQ ID NO: 21621 - DNA, 3029 bp, Oryza sativa
  Clone ID: TF_OsC49147_1
ttttttttttttttttttaacacacatacggataagtattattattattataattctgacctagagagctttcagaggaaaagagagagagagagagagagaaaaaaaaacagtagtgacctagacttggacgtggacatttcctagttcttctgacacaggcacaattgtgtcagtcagttcaggagctggagtgtgcagtagtctctgcagcctgaatctatctacacaaacacattgctatccatctctctgatatctacctcaattcatgtgccctgtggctgttgtgtgacctactcctacacccttgtgagccgaatagtacaccggatatccctatccaaacaccacaccttttctttccaatctctgaacatggatggactatctctcttcttctctcaggacagggagatcttggaaggggatgcagtatctgtagtacactgctgctctgcaacaccaatgtcctcatccccaacactcctgcaacctcccttgcatgataccttggtatatttttgttgtcttacatcactctcttcctcctcctcctccttcttctgcttcttctggttcttcttcttcttctttgccttcttgttcttcttcttcttcggcttcttcttcaccttcgccttcgccttcttctttcttaattctaggatcttcttcaattctgctcttctggttctttgagagagtgtgcatgtgtgagagagaaattgctgattaattagcttcagcaattcttgtggtacatagtatacatagatagaaagagagagagagagagagagaaagcaagcaagctgaattgatgcttgtgtgtgcttgtgttgacatctgtatacacatgtgcacggttctttgttaaatcacttgatgaagatgggtaattaaattaagaagagagaagcatatatatacatttccagtagaattgtagctagagtgatctatagctgccggccggcgaggcgatctcgatggcggcgtactaccacggcggcgccggcacggacatccagtccggcaccgacggcctgcagacgctgtacctcatgaacccgagctacgccggctacggcgacgccgccgccgccgccgccgcgcccggggcggcggccaacatgatgctcctgaactcggcggtgacctccatgacgccggtgtcgttcggccaccagccgtcgccgtcgtcgtcgtcggcggcgcagcacttcgtcggcatccctctccaggcgccgccggcttccgggtacaacctgtggaccccggcggcggccaccggcgcgggcgacatgtcgccgccgacgccgcagcaccagcatcagcaagctcacggcggtggcgcggcgggtgtcagtgctgtcctcagcctgtcgtcccgcgaggcggcgccgccggtgacggtggcggccgtggtggccgccggcgacgaggggaagtacctgcaggcggtggcgcagggcgcggcgtcgcacgggcagatggtgatgagctccaagtacctcaaggcggcgcaggagctgctcgacgaggtggtgagcgtcagcaagggcgtggacgacgtcaaggccgccgcggcggcgaagagcccggcctcggtgaagaagaaggaggactcggagggcgtgtccggcggcggcacggaggatggcggcggcgccaagagcggcggcgcgccgccgccgccggagatgtcgacggcggagcggcaggagctgcagatgaagaaaggaaagctgattaacatgcttgatgaggtggagcagcggtacaggcagtaccaccagcagatgcaggtggtggtggcgtcgttcgaggcggtggcggggggcgggtcggcgaggacgtacacggcgctggcgctgcggaccatctcgcggcagttccggtgcctgcgggacgcgatcgcggggcaggtgagggcggcgagccgggcgctgggggaggccgtcgacgccgacggcggatgcggccgcacggtggggtccaggctccggtacatcgaccaccagctccggcagcagcgcgcgctgcagcagctgggcatgatgcagagcagcgcgtggcgcccccagcgcggcctccccgagcgctccgtctccatcctccgggcttggctcttcgaacacttcctccacccatatcccaaggattcggacaagatcatgctcgccaagcaaaccggcctcaccaggagccaggtttcgaactggttcatcaatgccagggtgaggctgtggaagccgatggtggaggagatgtacctggaggagaccaaggaccaggacggcggcggcggcgccggcgccggcgacgaggggagcaagcccggtgggagcaagggcggcggcgccggcgtcaatggcggtgtggttgacagtgccgcgaagatggacagcaaggcggcgcacatggagagcggcggcggcgtacatccgtcgctgctcgagctcgccggtgaccaccaggcgcaggcggggttctacgacgacgacgacgaggatggcggcgccgccgccgcgctgcagcagaagctgaagaaggcgaggacggaggagcagcagcaggcggcgttccacgtgtccgacgtggccacgctgcacgcgcatgccgcggcggcggcggcggcgaggcacgacgaggtgagccaccgggagctcctcatgaagttcatggagagcggcagcgccggcgccggcgccggcgccgccgcgagggaccaccaccacgaacaccatggcggcgtcggctactcgctgttcgcgccggcgccgtacgggcagttcgccacggagcagttcgcgttcgccggccacggcggcggtggcggcggcggcggcgtgtcgctcacgctcggcctcccgcacggcgccgagcagacggcgtcgttcctcatgaccagcagcaacggcagcgacggcgccggccacgtcgccggcggcggcggctacgacatgaacatgcagagcacaaagtccttcgcggctcagctcatgagagacttcgtggcctag

SEQ ID NO: 21622 - DNA, 1201 bp, Oryza sativa
  Clone ID: TF_10504981
ggcacgaggctcctcgaagaggagtactaccgagcagctcccggagaagaagcggcgcctcacgccggagcaggtagatactccagctagctagctaagctgtaaagatcggcggcgcgcggtgctctgttcccgagttgtgacgtgacgactggatcgatcggcgtcggcgtgtgtgtatgtatgtgcatctgctggagaggagcttcgaggaggagaaacaagctggagccggagcggaagacggagctggcgcggaagctatggctgcagccgcggcaggtcgccgtgtggttccagaaccgccgcgcgcgctggaagaccaagcagctcgagcgcgacttcgaccgcctcaaggcgtcgttcgacgccctccgcgccgaacacgaagccctcctccaggaaaaccaccgcctccactctcaggtgagctagctacgcccgccgcccgcgccaccgcccaaccgcgcgttatcctcgatccgatttggccgggctccttgattctgactgaattcgtggtgatcttgtgccgtcaggtcatgttctttgaacgaaaaactgccagaaaaagaaacaacaaccgaaggcacccccggcgccggccgtaaacgtccccgggctgccctgcgggcgccgaattgaagttccccgtcccggaacgccggaggacaccgggcgttggaggaggcggcggcggctttcgaggagcagcaggagcagcaggtgaaggccgaggacaggctgagcacggggcagcggcgggagcgcggtggtggacacggacgcgcaactggtggtcgggtgcggccggcagcatctcgccgccgtggacagcagcggggagtcgtacttcccgggcggggacgagtaccacgactgcgtgatgggccccatggaccacgccgcggggggcatccagtcggaggaggacgacggcgccggcagcgacgagggctgcagataatacgccgaagacgccggcgtctttttcgcggaccacggccaccaccaccaccaccaacacgcggacgacgacgaggaggacgggccagcagatcagctgctggtggatgtggaactagatttctcgcgcgcgcgcgtcgtcgtgcattcaattctcgtgttaaaaaaaatcgttctctttttcatttttcaaaaaaaaggggggcccggcacccaatccctcccctcccccccc

SEQ ID NO: 21623 - DNA, 3028 bp, Oryza sativa
  Clone ID: TF_OsC48414_1
ctgctggttttcggctcgtggccccccctttttttttttttttttcttttctctagcttttttttttttgacatgaacagtgaactcaagtttattttcacccagctgagctgtagtgctccacaacaaaatcatcagatcttaacgcaaatctgcataactgtgctggacacagcaagttttcagctccacttacacgtgtaaaagaatgacagaaaagctctaatagtagtgtgagagtgtataattggacagccctaagtaaccattactttacaatatggtgctcaaatcacaagcttttacacgtatatatatatatatatatagtaatgatggattttatctttacatatgattctttaccctatcacccccaccatctaaccttatattacatttcctgctatacctcctcttctgtattaaatggcaactacaaagctacaaatcccatgccctttcaggcatgttattctcccactaggtgttacaaatgctgccccccaattctctctcttaatgtccatggtcctgattatttctctgctgtcttcaggccacaaaatcatgcagaagaggtgaatgctcaaaccgttgccgttgatccatctgattcatcgaatcatagtccgaagatgcgacggtgacaccaagaggagcagtagcattgtagatgtcatcctcattaacaccagggaaacctggctgagcattaggaacgaggttgctgctggagtgctgcaagcccagtgtcagcgacacattgccattgccgtatctcccaagctctgccaagtgataggccatgaaccgggcgttctcgtctgagtgctgcgcgacagtgttgtggagaaggaggccgccatccacttcgttcgatcgctggtccttcagcatcaggttcatgaaactgtcatcaggattgggctcattctggaagccaacaggcgctccgccaacattcattgctccaatgctggttctcgactcgctcaattggcttgtttcgcaaatccgtgccctggagtttttgagatcctccttgtcttctgaagatgccattttatccttacttcttggtgcattgtcagaggaagagttggagtcttgctctaaatcaccaatctcttctttgtacatgtcttcaatcattggtttccaaaggcggacacgggcatttatgaaccaattcgaaatctgactcctagtcaggccagtctgcctagcaagcattaacttctcggaatcttttgggtacggatggaggaagtgttcaaacagccaagcgcgaagaattgtaacagagttttcaggcagtcccctctgtggtctccaggcgttttgtggaatcataccgtactgttggaaagcacgttgttgccttagctgctgatcaatgtaccggaggcgggttaattttccctccttgccagatgagttctcttcctcgccaagctttttcctgataacattgatctgatcattgatagcatccttcaggcaccgaaagtgccgtgagattgtctgaagagcaactgctgtgtaaggcttcgcagatcctggtccagctaccacatcaaacgatgaaaccacggtttgcatttggtggtaataatgcttgtatttccggtccacctcatccaacattgccatcagttttgccattttgttctgaagctcttgcttctcagcagtggaaagctcaggtgctgcattagcgccagattcttgtggattagaagatacaccctcactttttggccctccatcagtctctttgccatctgcttttcctgattcaaccttctctttctgagccttttgttttatgctcttccaaacactcacgacctcatcaagcagttcttgtgctgccttgagataccttgagttccggattgcgcgtgaagcttcggactgcaaattcttcatccgcatgtcttcccctctaaggttgtcatggtaagactgcggcgttaacatgtctggctttatagaccagtacggtaaggaaggcgccatgatttgtgtgttcaagctcagagatagcccttggctttgcattgatggaacacttgatgagttgtgattattcagaacaccaaactcaagctgtgaaccagtgtgggcatcatcatggatgagctcagagccactaccttgtgctccatccatcatatgcatcaacatctcatttttcatatctttgacatggctgaaagagcgttgaccctggtgcgaagaaagcatgtcggactcccttgaagaggggtcttgtgacattgctgacgcatgcccagggccaggcatctccatgcaattctgctgaggctgcagaatgccgctgaactccgtataaggtccagaagatggattgttcagatagagcaagttccctagagctgatgacataggataggatgcactgcctgggtctcttgagtacatggtctgcgagtctctttcgctaccagggcttgaatagtaagtagccatctcgcaattataactacttattgctcgagattactgcaaaagcatatatgtatatgaagaaccagctttgacgttgacttgattgatgattccagcaggacatcaatattttgttatccagactaaacttgatcccgttcaacttcccttgttgaactaatagactgcaacttctcaaagattctctgccaggctgttattgctacgaacacagctaccaatcaaaatctgagggtgtgctcctgatggggcgcagggcaaaggcaacaggaactgcagcagcgattgacaccaaagcagccagctgatcttcttcaagacagatagataggggagaggggatgagaggagaggagaggaggggagaaagataatcgatcctcccaatatggggacaaaatcagatcccaggattaaaataagtaacaatcccaaaaggaaaagtgagcagcagccagcagcagcagcaagagagagcacagagctcagagctcctctctctcctcttcttctcctccttcttctctcc

SEQ ID NO: 21624 - DNA, 2799 bp, Oryza sativa
  Clone ID: TF_OsC17293_1
cacgagggaagtagaagagaggagagaagctcctctctctctctcttgccttttttttttcttctctttttcatattgttatcttgggatctgatttttgtccccatactgggagggaaagaggagaggagggattgattttctttctcctcctcttcttgttcttcttcttgttgttccactcttattgttcatcatcctcctcctcatagctgaccaaatctctgctgtgacagcaatctctgctgcttggttctgcctcccatgaggagcacaccatcagtgtgattacaaagcaaggaaccctcctaccgcgtcgctgagctgatgaaggagctctgacgactcggatgcatgcttctgccatcaatcaattgatccaacaaggcaactcgatcggaatttgagtttggtgaactctgtaattgattccctgcaagtatccatgcctttgcagcaatcttgctaattgagttgtcaaagctgcatacatggctacttactactcgagccctggcaatgaaagggactcgcaagctatgtacccagcggattcaggcaattcatcatatcctgtgccatcagcaataggaaacatgttatatcctggcaatgggtcttctgggccatacacggaattcagtggcattatccagcatcagcagaatttcatggagctgcctggccatccaactgcgatctctcaagattcatcgtcacgggaacctaacatggtcgcgtcgtacatggatcagcgctcttttggacctgccaaagatatgagaaatgagatgttgatgcatctgatggatggagcacataatgctggtgctgatctcatccacaatgacactcatagcagcgcgcagattgagtttggcctattgaacaaccacaattcgatgagcgttgcaccagcaccaggccaaggattgtctctgagcctcaacacgcatatcctggcgccttcgtatccatactggtctgcgaaaacagagttgctaacaccacactcttaccatggtgatgacaacagaatgaagaatatgcaatctgaggcctcacaggcaatcagaaactcaaagtatctgaaagcagcacaagaattgcttgatgaggtcgtcagtgtttggaagagtataaagcagaaggctcagaaagaccaggctgaagcaggaaaatcagataacaaagaagccgaggggggttcgaaaggtgagggggtatcttccaacccacaggagtctactgccaatgctgcaccagagatttctgctgctgagaaacaagagctccagaataagatggcaaaacttatggccatgttggatgaggtggaccgaaagtacaaacactattatcatcaaatgcaaattgtagtctcatcttttgatatggttgctgggtctggagctgccaagccttatactgcagtggcccttcagacaatctcaaaacatttcagatgtctgaaagatgctatcaacgatcagatcaatgttatccggaagaaacttggagaggaggagagttcatctggcaaagagggaaaattaacgcgcctccgttatattgaccagcaattaagacaacagcgcgctttccagcagtatggtttgttacagcaaaatgcttggaggccacagaggggactgcccgaaaactcagtttcaattcttcgtgcttggctttttgaacacttccttcacccgtatccaaaagattcagaaaagctgatgctagcgagacaaactggcttaacaagaagtcagatttcaaattggttcataaatgcccgtgtccgcctgtggaaaccgatgatcgaagacatgtataaagaagagattggggaggcggatctcgactcgaactcctcctccgacaacgtaccaaggagcaaggacaaaatagcaacatctgaagataaggaagatctgaaaagctctatgagccagacttatcaaccaagccaattaggtgaatccaaagccaacatcgggatgatgagccttggtggggcaccagccggcttccacaacgaaggcaaccaggatgacagcttcatgaacctaatgctgaaggaccaaaggccgggcgaagccgaaggcagcctcctccatgatgccgtcgcccatcattccgatgagaacgctcggttcatggcttaccatttgtcggggctcggaagatacgggaacagcaatgtgtcattgacacttggcttacagcatcctgacaacaggctttcggtacagaacactcatcagccaggtttcgccggtgctggagaagaaatttacaactccaccgcttctctcggtgtcgctgcagcttcctcttcggactacgaatccacgaaccaaatagatcaaaggcaacggttcgaaccatcgcctctaatgcatgattttgtggcctaagatgctcaaaataccaaaaatacatggaggcaagatttgcctggggggagcatttgtaatttgtagtgccagaataacatgcctcagaaagcatggaaattgttagctgtagttgcatttggtacagaagaggggggtatagcatgaaatgtaatataattaagtttagcaggtgggggtttatagggggtaaagaatcctgtaaaaatggaatacatcatacatgtaaaagattatgattttcagaaccattctgtaaaaaaaaacacacctgtaatgactacttatcatccaggtatatgttgttcagcctattgacaaaataaaaaaaaaaaaaaaaaaaaaaaaaaaaaaaaaaaaaacgcgcccccgcgcgccg

SEQ ID NO: 21625 - DNA, 3135 bp, Oryza sativa
  Clone ID: TF_OsC61454_1
ttttgttgtgctttgtcgtggcatgcccccgtcacacccctggatccccccgcgggttgcatgtttttgttcttttcttgttatatttttagctgcaattcacagtaatccattgaaaatctggtccaatctgacccaacacatcaccacatatatatattgaatgatccatgcatcaatcagtagagaaatctgcaagctagcaaaaataccaatctatctttacagcaagctacacccccttctcatatacagttttacaattacacccctgatcacccctacttcgttcactttacttacccccccaacacaacacacgagtgtacgtgtatattgcttgtatacctgtataccctcgccgacggcgccggccggccggcccaggcttctgacgccgtcttgcgttattccccgccgccgcgccgccgccaccgccgccgccgcagacgatgcatcctgcgcgcgccgcgcttacgatcacgcgacgaaatcgtgcagcagctgcgacgccgggccgaaccgctgccggtcgtcggagccgttgatgtagtcgaagtcgccggcgctgccgtagagcaggccctgctgctcggccgggacggggccggcgttgttgcagtgctgcaggcccagcgtcagcgacacgctgccgccgtcgtagccgccgccgccgccgaagtcggccatgtcgccgtaggagacgaacctggcgtcgccgccgccgccgtggtggtggtggtgcagcgcgtcgtgcagtaggctggtgccgccggcgccggggtggtgcacgtggtggttcaggttgaggccggtggcgtacgtgcccatggcgccgccgaggcagctggacaggccgacgacgccgacgccgacgtccagggcggcgccgcccatcgcctccgacttgaacgggttgttgagctggcccgcgacgccggcgtgcctcgccgcggcggcgctcgacgggctctggaactcgtcgcggtcctccgacgagatcgcctcgtccttgcccttgccgccgccgccgccgccgttctccgacgacgagttggagtccatctccgcgccgaactcctccttgtacatctcctcgatcattggcttccacagccgcacgcgcgcgttgatgaaccagttcgatacctgccccctggacaatcccgtctgcctcgcaagcatcagcttctcggaatctttcggatacgggtggaggaagtgctcgaagagccaggcgcggaggacggagacggcggactccgggaggccgcgctgggggcgccacgcgtgctgcggctgctgcatcatgccgaactgctgcatggcgcgctgctgccgcagctgctggtcgatgtagcgcagccgggagaggccgccgccgccctgcgccgacgcgtcctgctcgccgaggccccgccgcgccgcctgcgcctgcgcgccgatcgcgtcccgcagcgaccggaagtggcgggagatcgtctgcagcgccagcgccgtgtacggcctcgccgcgccgccgccggccaccgcgtcgaacgacgacatcacgatctgcatctggtggtggtagtgcctgtacctccgatcaacctgatcgagcatggccatgagcgcggtgaccttgttctggagatcctgcctctccgacggcgagagctcgggggctgaattgctctcctgctcctgcgggttcgagccggccttgtcgtcgccggcggcgtcaccgcccttgcactcgccggaatccttgccctggttcttgtcacccttccgcttgatcgcgtcgcggacattgacaacctcgtcgagcagctcgcgcgccgccctgagaaacctcgagttctgcacgtagatgctgttctgcgcgctcctccccgccatcggcgacgactggctcgggctgagcagcgaggcggccgccatgcccgccggcctgtactggtagagagacaccggcacctgcgtgccgaggctaagcgatagcccgccctggtgtccccgcgccgccgcgccgtgcgccatgagcagctgcgtctgcaggcccatctcgccgccgtccgccgtcgccgcttccctgaacgccgccggctcgtcgccgccgccgtgcgcaatgtggctatgcgacacgatgctcgccgggagcgggatcaggccgccggccgacgagtccgagtaagggttagacggcggtgggtagtgctggaacgacatgtcgcctccgtcgccgccgccgccggtgaggtctctctgattggtggaagaggagaagaatgtggccatcgtcttcagaagcagaagaagagacagacttggacagtaagcttcagattgctgcgctttctgcaatactattcccaaagctttcgcagtacctgtgcagaaatcgactttcagaccaagcaaagagctagaacaagacagttcctggagtatgacagaaaccacccagaacggggacagagatgatcccaaggattcttgcagttgggttgtttctcttgtcgtctttttctgacttcttcttttctttttcgccgaagcagccttgtggaagttgctactagtggagatagccaaccgggttccagcagctgttcgattcgccacggcgctctcctccgcagtaatggtcgcgcggcgtccacatccctcttcggcgaggcccgcatcaccatccgtaagtccgccgcgaagcccaagccgtccgcctttggcagcccgtggtacggacccaaccgcgtaatccgctccaccgatcggggcaggtgcgtgcggagcccggcgaggagggaggaagatgggggcggccttcgccactagctctctccccgctagccaccaccggccgccaggctctccgccgacccgccgtcgctccggccctcgaccgcctgccatctcctctgtcgccgcctccgcctccatccacgccaactctagcccgaagcgccgccgccactccggtccccgtccgtcgccgccaccgctccagtgcctccagcgcctaccctcgcgccaccgccgccgtcgctgccgctgccgccatcgcctcttgcagaaggccgaagtggagagagagaagggaaagagagggaggaagaagagagagaggatgacatgtagggtccacat

SEQ ID NO: 21626 - DNA, 3372 bp, Oryza sativa
  Clone ID: TF_OsC47330_1
ctacctggctacctcaattctggcgaactcgccgcccctgcagacgccaacatcgatggtcatcttccggtccttcccttgcctgggtgacgacaacaccctgcagcaattcctcctcggagaccttttccagaggttggggtcgggcttcttgaggacgatgacgcggtcgagcagcgcggcagggtcagggatgcgccagccgcacttgacgggcgcgacgcggcggcgctcgtactcggtgacggtggtgttgcggcggcggtcgaggcgggactgccgcatgtagtacacctgcggcgtctggcacggctggcgcgccacgggccgcgtgttgaaggcgtacgccgtgtagtcggcgcggcggtaccagttgaggaacgtgcgcatgggcatctccatctcccgcggcgacagcaccccgcgcgtcaccaccaccgcgaacccccacgacaccgacaccgtccactgcttgtcgccgtcgtagcacaccgactgctgcgccacgccagccgagtccagccgcgcgggcccctcgaacagccgcctcagcgccgccgtccgcgacctcgtcgtcgggaacaccggctgcaggaagtccaggtggtgcagcgtcaccaggggcaccaccgggtgcgcgcccaggaggcccagcacgtcgccccacaggtcgcactggtggaaacccaggtggcgcgtcagcggcacgcccagctccgccacgcacgcgtggatgcggtcgtcgctgccgtagagcgccgggtaccggtcgatgcacccgtcctgcatgtgcgccagctgcgcggccagggcgcggctgatggcgaacccgccgccgccgaacgccatgccgtacgagaagatgaggttctggatgtggctctccgacggattcccgatgtagtacggctgcgtgtggtcgtaccgggacagaacgtccacgaggttgtccgggaagaacaccgtgtcgtcgtcgcccatcacgaaccaccgcgcgccggggaggcccagccggaagctctccgacacgatgcgggtgatccgcagcgccgaccggctgccgcggccgtgcgtgtacgggaacttggtcgtgttcccgctgatcttgattccgggaagccccgtggaagcgttcctcgagtagaactcgtacaccggcttgtccagccacacgaacccgctcatctgctccggccgccaccatgttctgatgtactccctccggctcttccagagctccgaagaggcggcaatgccgaacacaatgtgacccagcccggtcggcgcggcgtcatcagacggcggcgacgagtcgttacgcctgttgccagcatcgccggcggccgcgagatgtgcaacgtcgccactggcaaggctctcctccgggcacgagctacccgagtagaacggcgacacggcgagggcaacgacgtacagggcgagcaccgggaggagaaagtagaggaggaggctgcagaggaagaaggaagccttgcacttgggcgccttgccggcggcgtgcatgacaatggcgtccttgtgatgatgccgatcgccgcctcctcctttcatgccaaataaggccttgccgctctccacttgtgcggcaggatatatttttgtaaacatttttgccagtataatatttcgctcttgcgcgtgcgaggcggcgtcgccgtccatggccacgccgaactgtccgccgacgacgtggtggccgtgccccggatgcatggcgtcaggcgccatctgctcgcccgggtacaagaacccggcgccgccgtgcgcggaccccggcgccccgaacgcgatgttcacgccgccaccgccgtgggagccgtgctgctgcagcccgagcgtcagcgacacgccgccgaacccgccgtgctgctgctggtggtggctgtcgtcgtacgcgtcgaagtcgaggtggtccatgatgccgaagttctccgcctggtgcagccgggccacgccgcccgcgccggccgcgacgtcgacgttgacgacggaggccagcgacccggcgtcgtggcgaagctgcgccctcgtcggcttctgttcgccgccgtcgccatcgccgacgaccagctgctggccgccgcgcgcctcggaggcgtggctgcaggtaggcttagggtttaggctcccctgtccaccgctgccgtcgccgccgtcctggcccttcatctcctcgacgtacatctcctccaccattggcttccacagccgaaccctcgcattgatgaaccagttggacacctggctacgtgagaggcccgtctgtcgagccaggatgtgcttatccacgtcgcttggatacgggtgcaggaagtgctcgaagagccaggcacggaggatggtgacggcgcggtcgggaaggccgcgctgggggcgccacgggtggctgtccatggcggcgacgccctgcagcgacttgtggtgcctgatgcactggtcgatcaccctgagccgcggcgtctgcccccgcgtcgtcccggccgcgctcacgtccttctccccgagcgccttcctcgccgcctgcagctgcgccacgatcccatccctcaggctccggaagtgcctcgatatcgtcctcgccgccaccgccgtgtacgcccccgccgccctctccccggccaccgcctcgaaccccccggccaccgccctcatctgctcgcagtacctcctgtacctcctgtccacctcttcgagcatgatgtagagcttgtccttgagcctctgcagctccagggcttccatggcctggatctgcggcgacggggtccacgaggccgacgacgacgacgacccgtcgccgcggccgtcttcttgctgcgtcgctgccttggcgccgttgccgcgcttggtgctgtccacggggaggctgcagaattcttggaggagctgctgcgtcgggaggaggaacctcgagctgcgcaggtgccacgcgccgtgcacttgcggcgccgacgacgacgcgtcgtggtgcgtcatccatggcgccgcgggcgccagttggtgctgcggccgcgccgcgccgccgaggtgcagcacgccgtccgggcggcacagcgacagcgacagcggcgcctggctcggctgttggtgctgctcgctgaggaagcgcatggtggagccgccgccgccgtcgtccccagcgtcggccaccagcgcggcgaccttgcctgccgcgccgggcatcatactcatacccagaccgcgcacgccgagaagctccatcccggcctgcaacccgaacagctccggcgccgcttcgtccatcgccggcatcagcgtcgtgaccgacgacgccgatgcatctgccgccgagaagtaatccgcgaaccccaggttcggatcatgcgccat

SEQ ID NO: 21627 - DNA, 1479 bp, Oryza sativa
  Clone ID: TF_OsC85922_1
tttttttttttttttttatataagtgattaactgattaagcacacagagtgcagcagaacacaatagataagctaaataaacccacagcaatacatacatatatacgtgtgaaaaaaatcgtctgaagcggacggttcaaccgcttgtctacgacgcatggagaacaaaaacatcaacaccagtgctatgagcagtattacccagtggtatctagaaactgaaatataaatttcgccattttatacaacccctttggaaaaatttccccttttcttcaaatcaagcgcttacagaactatatatgtttacttgcaattagttttgtctataaaatataactggttctctaatatacggctcctgatcctgatcttgcagaacatttcctgatctaagcaattgtcctcctattgctttggatgaattcctcctgccctgtaacccagcatagtgttcagccctcggcgatcatctgctacgaattgttatcacctcttgcgtttggttttgacgctggtggaggaagatgggttactgtgccagtttcttttcctttggttgatgaaccagttgttgatctgctttagctgtagccctgtttcttggactagccgtgccttgtcttcctctgttggatatggccactttgcatgagactgccaccaagcttttaacgtagaagtcgtgtctcccggtagctttcccgctcttcgcttgcgaagaatttcttctcttatgtcaatcagcttctctttgtaaccctgctttagttcatgctttagctcttgacggacacgctccattagggatcgctcgctttctgtgggaaggccgaaacccatgttatccgctccatccaagcttggatcatacatgtttgcctcgctatctgcctgatcatcttcaccatctgacatggttgctcccgtgccttcaccgggcgaggcacctgtcaaactctgaaggttttgttcaagttcccagcatgccattactgcttccatggcatgaacacggacatgctgctgtagctgctctttaaacgaacataatagcaagacgtagtgcgtcatgaactggtcgagctcgcggccgtcgtccccggcggcggcggcggcgagggcggagtacttggcgacgacgccctgcgactgcgcgagctgcgcgtcgatgcgggggagctggtcgaccggggtggcgatgcggaggcacgccacgtgcgccgacagcagctgctcgtacagcgggtgcgccagtatctccgccttgcaccgcgccgcgtccgcctcgccgccgccgcccatcgcggccgccaccgcgtccccaccgtacgtacgcgcgccgccgcagccgcagcgccagacggcgacgccgacgagtccgacgtggtccgccgccgccgccgccgccaccgccgcgtcgtccgcgccgagcgcctgcatggtcatctcgtgcgggaggtgaccgtggaacgccat

SEQ ID NO: 21628 - DNA, 1651 bp, Oryza sativa
  Clone ID: TF_OsC1970_2
atggccttggactcgccaccccaccatcaccacccaacccaacccaacctcctctcctatcgtcatccgctcttcttcccctcttccccactcgcaccaaccccaacccccccaaccgccgccgccgccgccgacgacccaccggtcgccgcgtcgccggagtcgcgtactggagaggggggcggagaggcaccagccgccccctcgcgcgctgcagcagcaagcggtgcgcgtgatggcgttccactaccaggaccacgcgctggcgatggacgccgcggctgcggcggcgtagacgggcggccaccaccaccctgggttcgtcggggcgggaggagttgtggggggaggaggaggaggagggtgggagcgggagaaggccgccatcgcggcgcacccgctgtacgagcggctgctggaggcgcacgtcgcgtgcctccgcgtcgccacccccgtcgaccagctgccccgcatcgacgcgcagatcgccgcgcgcccgcctcccctcgcagccgcctccgccgccgccgccccccccggcccctccgctcgcgaggagctcgacctcttcatgacacattatgtgttgcttctttgctcattcaaggaacaacttcagcagcatgtgcgtgttcatgcaatggaagcagtgatggggtgctgggaacttgaacagtctttacaaagtctaacaggggcatctcctggtgaagggactggagcgactatgtctgatgatgaagataaccaagtggacagtgaagccaacatgtttgatggaaatgatgggtcagacggcatgggctttggtcccttaatgctgaccgagggtgaaagatccttggttgagcgtgtacggcatgagctgaagaacgagcttaagcaggggtacaaagaaaagcttgtggatattagggaagagatccttcgcaagcggagagctggtaaacttcctggtgatactgcatctatactaaaagcttggtggcaagctcattctaagtggccatacccaactgaagacgacaaggcccgcctggtgcaggaaacggggttacaactgaagcaaatcaacaattggttcattaaccaacgcaaacgaaactggcatagcaacccagcatcctctggtgaaaagaccaagaagaaaagaaacgttacaggtgatggtggtgctgagcaatcgtggtagattggttcaacatgaaactagatgtaaacagtaccttttattgtgaagagtgtagtacattctctcgtgctctggtgtgacaaaatctggagaccggcccattcacaagggaattgcgatcataggcgtaatcactgggcaaagaagtcatctgaaattgtagcataagcgcacaaaactgaggtgggtggtatttgactttcgcagtatagcatcgactgtctgctaatgtgattttgtgaaggaatgttctgtataaccgatgaacggaaggaagaattgtattgtgtatgtaattgtgtatcttatttatcatgtaatatatatatgatattaggagctttaagattcggattggatatgttctctgttttgatgcacgatgcagtgttgaggtgtaacatgttttggtaattcactgtgtataaaaaaaaaaaaaaaaaatgcgtaagcttttct

SEQ ID NO: 21629 - DNA, 1237 bp, Oryza sativa
  Clone ID: TF_OsC175523_1
atggatacatatggatggatgatggaatggaaggtggacagacgttaccggcgataccgtgagcagatgagggcggtggaggtgtcgttcgaggcggtggccggcggcggcgcggcgcaggtgtacacgaagctggcgatgcgagccatgtcgcggcacttccggtgcctgagggacgcgctggtggggcaggtgcgcgcgctgaggaacgccatgggggagagccagagggacgccgccggcggcgtggcggcggcggcgcccggtgccaccaagggcgacacgcctcggctgcgggtgctggaccagtgcctgaggcagcagagggcgttccagcagtccggcgccgtcgacagcttcccgtggcgcccgcagcgcggtctgccggagcgcgccgtcgccgtcctccgcgcctggctcttcgagcacttcctccacccgtatccaaatgatgtggacaagcacattttggcgcgccaaacaggcttgtcaagaagccaggtttcgaattggttcatcaatgcaagggtgaggctatggaagcctatgatagaagacatgtacaaggaagaaacgaagccggaatcatctgatggcaacaacaaattaaaccctagcgcagccggcaacaaacagcagcatcgagatgatcccaagaagaattacacggcaacgacagcagaagccagcttagtacaacaaagcagctaccatctccaccttcgcagcagcggaaaccgtaactcctcctcgttgatgatccctgcagcagcatcaacatccatcgatcatcaccatgacagcagccaccagctgttgggcggccatagctattcttcagcagcaggattgcatcatggtcatggcggcgccgtgtcgcttactctagggctccagcagcagcagcagccatttgcggcgtcgatgatgcatcagcatcagcagcaccagcaccagcaccagcagcagcagtcattcatggtggaggcggcggaggaagaagaagatgacgtgctcccttacaggaacctcatggagtctcagttgctgcatgattttgcaggagctagctaaggcaggctccagcttagcatgcagctaatttatttgattgttaaaggagattattgcgctcaaaagtttaatttaattaaggagatgtaggtaattaaatattacattattgttcttttatgaccccacctttcgttacattaaaaaaaaaaaaaaaaaaaaa

SEQ ID NO: 21630 - DNA, 3981 bp, Oryza sativa
  Clone ID: TF_OsC2791_1
tttttttttttttttttttttttttttttttgatttttttttttttatccatcaatggattcagcaattcagctgatgcatcctctcttttttttttttagttttctcgttttttggttcccccactcctactacatttggtacatgatgtatagctttctcaatggcctctgtgccaatcacaaggcccaaagtaaacgaatcacaaagcttcccatcaaaaagaaaaaaaaaaaagggaaaaaaaagcccggagaaccacctcaagaatcagctaatatacaatggtgaccctcatcatctcctccaatgttgatcataagaatttctaccatctgtcggattataacgttcttgctttccatgatgatgactccattgcctcgatgcctcagggttttgactctgatgacctgaattccagggtcttgaaggctcagggttgtagcttggttgtgcatgtgctgatgaactccactgccttgaaggctcagctgggttgctgtagctctgctgcccggagctccactgcctggaaggctcagcagtgacagtgttgtagctttgttgcccagaactccactgcctagaataaggctcaggattgtagctctgctgcccgtagttccactgccttgagggctcgggaacatagccttgtgagctactaccatacacagcaccagcaccaagctcaggagaccgcgagttccgccatagggcgtctcgcgccattgtcgtctggtactccgctgcgtgagtgtagccatttcggtccagtccctgccctgggtggagggagtgggacgagactggagctgaaccataagaattgtatgtagtagcttgtgtgctgtggttactgtaagcattctggttaggatacgtcacatggtttgaatttgatggggcagcgttaaaggaattagtagtgcgtgcaggtgcagcccatcgatcaggtgtagcatttcgcccagtggcggcaatggtagcaacactagattgccaggtgtatgatgtgtaagaggcatgtgattcagccaccgaagaatgtgatacagcagggtgtgagatgctctgaacctcatgggctagtttgttcaccgctggctgatgatggaccgccactgcaacaggatcagacgttaaagcatatgattgggtgtgctggtgtaccgtggctctgctcagaagattattcataggagcaacatgttgagttgacggatttacggagatcatcgactgggggagagatgtcatattagttcgagtctgtgccggcaaagcagaagctgaagcataaggttgtgaaggcaacgaactgacaacatttgagaaactttgctgcacgctgcttgcaacaggaggtgcatttgctctgtttggcaaatgggcgtgctgcaagttttgggtcctcacttgtgatgggaactctgaactccagccatccctggctatcaggtcttttggaggagttggcgatggaagcgaagcagggatagcttcaggaccagattcgggctctttttggaccccagaattgttggccaggctatttaccagctctgatagtccaaggccagtctgcttcaacatgtccagaagtgcaacggtctgctcacttggcagggtcccaccctgattagaagttagagcaaagacaagttgtggattcttgagcagcaccgcaagcagctcaagatctggttcagaagttgcaccgttcgcaccagcagcaactgctggagatactgatgaggttgatcctatttgcttgtccacaacaggaaccacaatgtttggaggggctgtgctcacgctatccgtttccatagcgtcagcatctggtggctgctcaattggaatttccggtgtaaggctgtcatcaaagtccatttccacatcccatgggccctttggattcaacggtatgtcctttagactagcataaaaggtttccttctcacgcctgtttctctgggtttggacctcaaattctttgctgttctctccagcacctaaactccaagcagggtctatccaaacctttgcaagccttcctacaaaaagaggaactgttgcaatgaactgcctgaaattatggtaatagctgccccatgtttgtttatggggaatgactggtaacttctcaattctcatatcactacagaaaattgccatcccctgctcttccaacaatttgatagcaggatgcttgttccaagctggtggtatctgccaaataactctcttggaatccaatttctctataaagttttctttggctgttacgttcagcttcaagctaactgcaatttctggcttatcaggtggagatagtgtactttgtttagaggttgatgggctagggtcaacaggttgtttaatgattgaagtaagaggggttctgggcacaagcggtacatttgaatcaactaagccagacggtttttgaatttccatcatatgaggtttttcaatcactttgcttgtgtcaaccttgccatatttctcctgcatgaacatggcacgcatctttgctttttggatatcatctgcagataacggtctactattgttcgtagatgtgcttctgacagggttaacattcttgccagcagctttccgatttggatgttctacaagtagaactttccttttctctttggattttgtctgcagagaactctttttatttgattcgtccgcagaagcagtgagcagcaatggcgtttttctgggctcaggcattctgctctcacttgcatcatcagtcaaggcaaggatgtcctcagtaatatcaacttcagatttccaagactcatcacggagaatttcacttatcctttgtttacagattaagtccttctgagatttcttcaatgcctgacttcttacaagcactttgctcaacctggagaggaggttcctcgccttgcttgatatgtcttgtgtcctataaaaccgcaacctgttaatagtttgcaatacagttgacatatgagctggcagagctttatgtaatgggagatgaagaagcaccttgaaaacaacaagaataactgttgtttgctcctcagtaactgcttggcccaaccacgtcgatacaatggccaaaccacccattgttaagaaccaactaagaacagttacattgtttatttgtagaattgattccatcaatttgacctgtccagagaatgtattctccttccgcattagaacaaagatactttccaaaaacttcttatcttctgactcaactccagcaacttcctcttgcttagtttccttttgaatgggatcgggattagtcttagcctcggtgggttgcattacacctattggggcaacagggattgcacagctctgcaggaccaccggcaattgtaaagagatttgaggaaccaccagatgcggcaaagaaatttgttgcgcctccaatggttctaatgttctcagaggctcaataacttgagcatgtgcctcaatgtcaacaggtgtctgctcagtgcttatggagcatacattgtcaggagccttggatgactctattctcagggctttctcacgtgataagcgaacaaattttcttactcgcgtacgttgacttgcaaagaactccctcacctgtgtaacagtaaccccaaaagatgcgctaatttcccgagtttctttttttccaatagtatccttcatagcaaaaagtgactgcatggacttgacagcctttggatttaacaaatcccttggctttttacctatcttgatagacaatgccccagcagccatctcctgggcgagggggttgacgccggtgaggcggcactgcgcgacgacgaggagctggagctggtccacctgcgcgtgcagcagttcctgctgcgccgccaccatggccgggatcgagtccccgtgggccccgccgcccgactcgaccagggccccggcctcgggcttgaaggggacgagctccat

SEQ ID NO: 21631 - DNA, 1391 bp, Oryza sativa
  Clone ID: TF_OsC1970_1
gaaatgacaatcttcctaaggcaattttttttacttaataaaaaaatgttttttttttcaaggacaacacagcaactcttgcggacccattatgtattgctcctttgttcgttcaaggaactactacagcaatatgagcgtgttcatgcaatggaagcagtaatggcttgatctcctcgtgaaggttctggagcaactatgtctgatgacgaagacaatcaggttgatagtgagagcaacatgtttgatggaaatgatggatcagatggtatgggctttggccccttaatgctgacggagggcgagagatcattagttgagcgtgtacggcaagagctgaaacatgagcttaaacaggggtacagagaaaagcttgtggacattagggaagagatactccgaaagcgaagagctggaaaactcccaggagatacagcgtctactttgaaagcatggtggcaggctcactctaaatggccatacccaactgaggaggacaaggctcgcttggtgcaggaaacagggttgcaactaaaacagatcaataattggtttatcaaccaacgtaaacggaactggcacagcaatcctgcttcatcctcatcagacaaaagcaagagaaaaagtgcaggtgatggcaaggccgagcaatcttggtagaacgtggttggagaagaagtatatatatgtaaataatgcatccattgtgaagaatgccagtatatttattgctcccaagatggcgattcggacagaagcttcctgggggcagaatgtcatgttataattttagtcatgtgaagctatagctatatatagtaatttatacgaaagaaattatgtcatgttataattttagtcatgtgaagctatagtgcgtatatatagtgacttaccagagagtagtttttatgtttgctgttggctagtgtgcatttgtagttgggacgtgctggctgtctctctacagctcggtacaaccatgtatttataacgtgttgtgaagcatatgttgtaaaatcgtggaatgggagtgttctgcgatccccatatgttgttgtaatgttgtatattgatgaccatgctgcaacggcagcatgtttgtaactcgttatatcctcaggctcttgtgttgttacaaattacagaactatattgtctttaacgagcatctcctgttggattaataatatatactaggggctttaaaggatccctccccccacaactcctcccgccccgacgaacccagggtggtggtggccgcccgtctccgccgccgcaaccgcggcgtccatcgccagcgcgtggtcctggtagtggaacgccatcacgcgcacccctgctgcttctgcagcgccccaagcccacgcgtccccggacgccgtggg

SEQ ID NO: 21632 - DNA, 1722 bp, Oryza sativa
  Clone ID: TF_OsC1621_1
ttttggacacaccttctctctcatcgaggtgggttaatatattcttctgggtgctttagcatccaagctccagtttcaccgagctaaggtagggggaagggaattgaattgaaggttcttgggtgctttcttttccagttacctcccaccttaggaaccctctgaaagacccctcaccatctcctttgtgtccttgctaaccaactccccattaaatccctctccgcgcgccttctcgctggccattagagctagctagcgagagctctagctacagctatacatacgtgtacccaacggccacggtcacccgcgcgagcgagcacgcgcaccaaccgatcgagcccaacaagctcgctcgctcttggtgcgcgcgcgcgcggcgagttcgatcgatcggtgtatacgcgtatcgtgttgtgtatgcaaggcggtgatcacggaggcatggagatgggcgtggggtcgttcaccggcggcggaggaggcggggagtgctcgtcgtcgtcggcgacggcggcggctgctgcggcggctgcggcggcggcggcggcggcggaggcggaggagcggcagctgctcaagggggagatcgcggtgcacccgctgtgcgagcagctggtggcggcgcacgtgggctgcctgcgcgtggcgacgcccatcgaccacctcccgctgatcgacgcgcagctcgcgcagtccagcggcctcctccactcctacgccgcgcaccaccgccccttcctctccccccacgacaagcaggagctcgactccttcctcgcgcagtacatgatgctgctgtgctcgttcagggagcagctgcagcagcacgtccgggtgcacgccgtggaggccgtcatggctaactggcacaacaactcacagacatcaacccttaaatcaaagcgtaaaaggtaaagggcagaaaaaaatgtatacctgacgtactcgctaatcaaatcaaaagaagacatggtgactcataagtaataagatcatcttaaattgtatatctagttattaattagtcagaggtgacaaattcatgacatacatactagtctgaccactggcatatgcgttgtaatttttgagcagatatgctcaagcaaattcttcttgttggtatagtttttaaggaagaggagggcaggaaagttgcctggggacaccaccaccatactcaagcaatggtggcagcaacactccaagtggccataccccacggaggatgataaggcaaagcttgttgaagagactggcctgcagctcaagcaaatcaacaactggttcatcaatcagagaaagcgtaactggcacaacaactcacagacatcaacccttaaatcaaagcgtaaaaggtaaacaaaccgttatccaagtattttatccacagtaatacaatgttgatgtttcagtaattaacaactgaattataacacaaacttcttttttctatatgtaatacaggtaaagggcagaaaaaaatgtatacctgacgtactcgctaatcaaatcaaaagaagacatggtgactcataagtaataagatcatcttaaattgtatatctagttattaattagtcagaggtgacaaattcatgacatacatactagtctgaccactggcatatgcgttgtaatttttgagcagatatgctcaagcaaattcttcttgttggtatagtttttaaaaaaaaaaaaaaaaaaaaaaaaaaa

SEQ ID NO: 21633 - DNA, 1253 bp, Oryza sativa
  Clone ID: TF_OsC1621_2
gcggcgcacgtgggctgcctgcgcgtggcgacgcccatcgaccacctcccgctgatcgacgcgcagctcgcgcagtccagcggcctcctccactcctacgccgcgcaccaccgccccttcctctccccccacgacaagcaggagctcgactccttcctcgtacgcatctatttaatttcttcctgagttcgatgcgccatgcttgattaatttcactaggttgaatttaatctttgcatttgtgcatgcatgcatacattacatgcaagtatcataccgtacgcactagctacatgattaactagaagctatccagccaagctaactgtatatatgcatactgaaatgatcgatgcaggcgcagtacatgatgctgctgtgctcgttcagggagcagctgcagcagcacgtccgggtgcacgccgtggaggccgtcatggcgtgccgcgagatcgagcaatccttgcaggacctaaccggtgcaactttggaggaagggacaggggcgaccatgtcggaggacgaggatgagacggcgccgatgctggagggcccgatggatatgggctcggacgggcacgacctcatgggcttcggcccgctcatgcccaccgactccgagcgatccctcatggagcgggtcaggcaagagctcaagattgagctcaagcagggcttcaagtcaaggattgaggatgtgagagaagaaatattgaggaagaggagggcaggaaagttgcctggggacaccaccaccatactcaagcaatggtggcagcaacactccaagtggccataccccacggaggatgataaggcaaagcttgttgaagagactggcctgcagctcaagcaaatcaacaactggttcatcaatcagagaaagcgtaactggcacaacaactcacagacatcaacccttaaatcaaagcgtaaaaggtaaagggcagaaaaaaatgtatacctgacgtactcgctaatcaaatcaaaagaagacatggtgactcataagtaataagatcatcttaaattgtatatctagttattaattagtcagaggtgacaaattcatgacatacatactagtctgaccactggcatatgcgttgtaatttttgagcagatatgctcaagcaaattcttcttgttggtatagtttttaattttgttgtcgtgggtgtacctgcatgcatacataaccccaagactaattcatttgctgtgcatatacattgaccattctataacaaaaa

SEQ ID NO: 21634 - DNA, 1785 bp, Oryza sativa
  Clone ID: TF_OsC72309_2
tcaggtagctggattcagtgctgcaaatgcagataaaccagcaccacatttttgtaccacatcttggctgttcatatgctccattgctagagcttgatttccagcaccaccacccgagctcctcttcagctcctcgcacatctcctcgatcattggcttccatagccgaactcgagcgtttatgaaccaattcgacacctggttcctgctgaggccgctccttgctgcgagcatctccttctcgctgtctttcggatacgggcggaggaagttctcgaacatccaggccttgaggacggcgacggacttctccgggaggccgcgctgcggccgccagcactgctgctcgccgcgccgcagctgctgcaccgcccagtgcttctggatgaacgccgactcccagctccgctccctctcgccgccggtcaccgccgacgacgactcgccgccgcggcaaggcctgccggccgcggcggcggcggacatgatctcgccggcaatgcggcgcctcaggccgtggtacattgccgacacggcgcggtgcgcgaacggcgcgcagatgctgctgctgctcatcccggcggcgcgcgccgtggcgtgcgtcagggtgttgaacctcgccgtcgtgctctggatctcgtcgaggcattggttgtacttctgatccatctgcgcatttgaattcgtatcgtcgtcaaaagatggtttcaaatttgattcgaaatggtagtacgaaatttgcttgaactgatgcctcgggagtcgtgtggagaagggcgagctcaccagctggagcatggtgaggagctcgctcctgagccgctgagccgaagcgtcgccgccgccgtgcgtgtgctcgccggaggaggcgatgagctggttgttggagctcacggcggacgacggcgcgccgccggccaccgagcagctcgacggcctcgagctgccgctgtcgacgccgctggccgagtcggcggcggcgtccgcgacgccgcccagcacgcagccgacggcgtcgttgagcacctgctgcgccaccgcggcgtatcgggaccgcgccaccaccacggcgaagttcgccgccgggtagtacggtacgagcggcggctcgggctccaccaccaccaccctgctcatctgcgtcagcccggaacggctcgccgccgacgagcactggtcgccgccggcgttgagcatgctgtccgaggacgacttggagcacaggctcagcgacagctcgctcgccgccgccgccgcggacacgaagccggcagcctccggcaccccggcgaggtaatacgaaccaccgtgcacaccggcgttgctgctgctccagttgcagctcggcttcctcgccgacgtcgagcaccaccccgccgccatgtcgcccggctggccgtggccgaggcacgcgaggctcaccgcgccgccggagctgtcgccgacggcgacgtcgtacccgccccccatctcctcctccggcggcgtcgtcgcgccgaggtagtcgccatgcccgtgcgccgccgccgccggcgcggcgccgaacagctgggtcgccagggacgcgagcacgaggttgttcgccgccgcgaagtgcgcgccgacgtccatcgccgccgccgccgcgtcgccgtagccgaagctcccgccgtgatcatgcggcggcgccatggccggatggaacagcggcacgtcggcgccattgccgctcgccgccatgaagtagccgccgttcatggcggcgtccaccgcaccgagctgcgagaacgatggattgccgctcat

SEQ ID NO: 21635 - DNA, 1995 bp, Oryza sativa
  Clone ID: TF_OsC72309_1
ctacaatattacaaccctcgttttgcgtatcttcccaatctcctcaatccccttctcttcaaacactccctccatctgagtgactgcgaatctgtcatggtgttttccatcacactgaacagccaaatgtgatggcttttttgacctttctaaactgagcacatctttgctgctaagatgctcaatctctgctgcgccatcgcttcctccggaggtcttcttgagctcctcgtacatgtcctcgatcatcggcttccacagtcggacgcgggcgtttatgaaccagtttgagacctggctcctgctcaggccgcttctcgccgccagcatgtccttctcgctgtcctttggatacgggcggaggaagttctcgaacatccaggccttgagcacggcgacggacttctccggcaagccgcgctgcggccgccacgactgctggtcacctcgccggagctgctgcatcgcccagtgcttctggatgaacgacgactcccagctccgctccttctcctccagcgccgccgccgccgccgacgacgacgacctcgccgtcgccgccgccaccagctgtcccatcacccgcctcctcaccctcctgtacgccgccgccaccgcccgccccgcgaacgccgccgtcagcccgccgccgccgccgccggtggagcgcaccatgctgttgaacctcgccgccgtgctctgcatctcctcgacgcattggttgcacttctcgtccacctgcatctcatcgccattggttcgcaccaagaaacggtttcttaggtgttcgacgaggaactgagccaagaactcaccagttggagtagcttcctcagacgctgcgcctccgccgcccacctcgcaccgccgctcccgggtgaggcatcctccgtcggcgccgtcgtgatcctcgccgaaaagcccgacgaggagcgcctggctcgcctcgccgccgtcgacgccgctggccgcgtccgcggcgacgtcttgcagcaggcaggcgacgaagccgttgagcagctcctgcgcgacgtgcgcgagcaccgctgaccgcgacaccacctgcgagaaatgcggaggcgccctcgagtggtacgcttgccttagctcgccggcggcggcggctgcggcgtcgtcgccgtgagtggggtggaacagggcggcgccggcgccggcggctgctgcctggtggtagccgaggccgcctccgctgctcacgtgggttaagccggagcagctcacttccgacgacgcgttcgccatgctgctcggggacgaacacttggtggcgccgagccgcagcgacagctcgctcgccgcgggcgccgccgccgccacggagctcgcggcgaaagggctcaagaacccggcgccggcgccggaggagaacccggacaggtagtacgcaccatgtaacggcgcaatgccggaccctccatagatccagccgccgccgccggcgtcgccgcacggcgcctctccggcgagccttcccatcctcgacgcctgagcaatggtgacacccgacgacgttccacacccaaactccaccgaacccagcaccgagtgcacggtgctgcagctctccgcgccaccggccgcggcggcggcgaccgcggcggcattcacctcctcctccgacacgctcccctgcggccgccgcagaggcacggcgcacgccagctcgtcgccaacagcagccaccggcgaggcgaccaagaactcgccgtccacatccccgaacccaaaaccaaagaacggcgccgccgcctctgcaccgccgccgccggcgacgaagcagcagctgatggcgtcgaggcccagctggtgataggatggattgctgctagtggacataaccggggtcagggactcaggggagagcaggggacgccatgattaccatcaggccacaccgagaaagagaagatgaagctgcattttttcagttttgcatggcatgcaatcatgcaggctccaaacctgcagcccggg

SEQ ID NO: 21636 - DNA, 870 bp, Oryza sativa
  Clone ID: TF_OsC354772_1
atggatcacatgcagcagcagcagcggcagcaggtgggtggagggggaggagaggaggtggcggggaggggtggtgtgccggtgtgccggccgagcgggacgaggtggacgccgacgacggagcagatcaagatcctgcgggagctgtactacagctgcggcatcaggtcgcccaactcggagcagatccagcggatcgccgccatgctgcgccagtacggccgcatcgagggcaagaacgtcttctactggttccagaaccacaaggcccgcgagcgccagaagaagcgcctcaccacgctcgacgtcaccaccaccaccgccgccgccgccgacgccgacgccagccacctcgccgtcctctccctctcgcctacagcagctggcgcgacggctccctctttcccgggcttctacgtcggcaatggcggcgccgtgcagacggatcaggccaacgtcgtcaactgggactgcaccgccatggcagccgagaaaaccttcctgcaggactacatgggcgtgaccggcggcggcggcgccgccgcggcggccccgacgccgtgggcgaggacgacgacgactcgcgagcccgagacgcttccactcttcccagtcggcggcggcgccggcgacggcgcgcatcgtcacgccggccacgccggtttcccgtccaacttccagcgctggggttctgctgctgctaccaccaacaccattacggtccagcagcatttgcagcagcacaacttttacagcagcagcagcagccagctgcacagccaggatgggccggcagcaggcacatccctggagctcactctcagctcctactactgctcatgctcaccttaccctgcagggtccatgtga

SEQ ID NO: 21637 - DNA, 919 bp, Oryza sativa
  Clone ID: TF_OsC91731_1
agaagtatcagcagtgaccatgttagtatccatgtggcagaaaagaagaaaagtagaagtacatctcatgatggaaagaccaaggaaaagggcaatggggaaatctcgtttgcgtgctctttcctgatcctcccagatactgcatgcaacaacggactttcccacaacacatgccgtatctcatgacatctcgtacgtactccttttgatgtggggcagctagaactaggactaggcacagcgacaagaggccaggtacagtcgcggcaagctgcatctcatgccatatgtgcggcacatcaatgcacgggtcgatctagaggccgaagctgcaaagcctgagctccagcggcggatcccggccggcagcgacgtcgaagaacgagatctccctgcactgctcgccaccgccgcccctcacataccggaccttgtccacctcgaggtcatacgacttgagtgggaacagctccagcgtttccacctccctcgtcggccgctcccacatcgcttccgtctccaccacatccctcacgtagcatgtcatgagccggtgatgatggccgtagcttctggcctcccgcttgctctcaggaggctgcaggacgaggtcggcgtcgccctcgtgggctgcggcgcggccatcgtcatcgttgctgccgctgtcgggggaggaggcgccgcggcggcgcttcttgtggtggtggcgctcgcgggccttgtggttctggaaccagtagaagacgttcttgctctccaccttgccgaatgcgctgaggtgagtggagatgcgctggatctgctccgtgctcggcgtccgcaaccccgctcggaacagctccgtcaggaccttcacctgctccgccgtcgggttccaccgcccacacttcacccccactcgcccgctaagagcctccat

SEQ ID NO: 21638 - DNA, 514 bp, Oryza sativa
  Clone ID: TF_LIB3475-008-P1-K1-B6
cccacgcgtccggcaaactgaagtactttgctccaatagcaatggtagcacagccaaaaacagacattttggtcctgcaattaatcagaaactgaaggcacatttcaaggaagatccataccctagtcgtgcaacaaaagaaaatctggcacaagagttaggcctcacatttaatcaggttttaaaacagtgatctttgttcttcctcccatgagcacttcgcagggctgtcactgtatctctcctccttaatagagtttctgttgacaggtcactaaatggttttccagtactcgtcattacgcaagagtggcagccacaaaaaaggagaacaacattgaaaatcatacggctgagaataataacaataccaacactgttgatagcatacaactgagaggatccaatgatattgttagtgtagatagaaatgatatggtctccgaggaaaggacaggacaaagtaatctcaatgaaggtactccattaagatcagataccagctgtgggcaga

SEQ ID NO: 21639 - DNA, 1731 bp, Oryza sativa
  Clone ID: TF_OsC520_1
ataaaaacaagccattcaaaattattacaccagccattacaccagctgcggccggctgcttttatctgatttgacaatggacgtgacggccacccgacctctcttttcctactagctctcccctaccctacccctctttccttctagcagtagcctctactacagtctacacaccctctctatgcaaaacgcaatctcatctctgtgcagccactcatccgatatttccccccatttcttttcctctccactgtttccctcctcctttaattattcccccccacttcgcctagctttacaaacccccacaaatcgtcattctaaccaaaagaaatcagcaggattagccctagctaagtactcccaatagctgtgataaactgataattagccttctcttcttccttgctgagctggtcggtgtcgtgtaccaagaaaccctcatcaagcacatacgctaatggaggagcttgaaggccaccggggtgaaggccggctgcctcctcctcctccgttgctgccgtttcccaaggtctccgtgcaagtctacaccgttcctagctcgtccaccgccgcctccgccgccgctgcaggcggagctcgtcaggctgttgcaccggcgacgcgggacggcggcgacggcggcggccgcgccgccggagttcttgacgaccctgtcaaggccaggatcgtctcccaccctcgctaccaccgcctcctcgccgccttcctcgactgccacaaggttggctgcccggcggaggcggccgaggagatcgcggcggcggcgcgggtgcgggaggcgcggcagcgggcggccgcggcggcgagccgcatgccgccggcgccggaggacccggagctcgaccagttcatggaggattactgcaagctgctcgtggagtgtaaggaggagctcagccggccgctccaggaggccgaggagttcctcaggacggtggagtcagagctcaactccatcaattctgggccaccccttacagctctaatctcagaatccaaagccggcctcgattcgtcggacgacgacgaacacgaagacggcagcggcatggagatgatggaggccgcggaagacgaggacctcggcatcatcgaccctcgctccgacgacaaagcgctgaagaggcacctgctgaggaagtacagcggttacctgggaggcctgaggaaggagctgtcgaagaagaggaagaaagggaagctccccaaggaggcgaggcagaagctgctcacctggtgggagctccattaccggtggccgaacccgtcggagatggagaagatcgccctcgccgagtcgacggggctggagcagaagcagatcaacaactgtttcatcaaccagcggaagcgccactggaagcccacggaggagatggagttcgccgtcatggaggcctaccaccaccagagcaccgatgccgcggcggcgttctacgtcgacgtcgacgcccgcctcgtcggagcgacggcggcggctccggcatcggccgtgtacaccgccaggccggatcatggcgtgtggcgcgcatagccgttgctcgattcgcccgttgccgccatctggaattaatctgaactgcccttgcctgttacatatagtagggttgttgatgatggtttcatatgtttttccccaaagggaaagtcagcttggacattggaccaatcaagaaatgaaatctcagcaaaaaaaaaaaaaaaaaa

SEQ ID NO: 21640 - DNA, 1806 bp, Oryza sativa
  Clone ID: TF_OsC95162_1
atggcgcacgatccgagcctagggtacgcggattacttcgcggcggaggtggatggcaccggctcctcggagttgtatgggttgcagcagcatcagcaggtggttggggtggcggagatgttcggggtgagggggctcatgccggcagcgcacgcgcacgagcagagcaagggtgtgggcgcgctcgtcgtcggcggcggcggcgtcgatgatggaggcgcgacgacgctgccgacggtccacttcggcgggctcggcgagctgcaccagcaccaacaccggcagagccaggcgccgctgtccctctcgctccacaggccggaggcggccgcgacgtcgctgctgatgcagcagcagcagcagcacctccaccaccagccgtcgccgccggcgggcgcggcgtcgacgtggcagctgcagcagggtgcgtggcatctccgcggctcaaggttcctcctcccgacgcagcagctcctgcaggagttctgcagcctccccgtgaagagcaccaccagcccatcatcggcaagcaaggcaaccaaaccgccgcaagaagaggccgccagcggcggaggctcgtcgtcgtggaccgcgccgacgcagatccagtccatggacgcggccgagctgcagcggctcaagggcaagctctacaccatgctcgaagaggtggataggaggtacaggaggtactgcgagcagatgagggcgctcgcggcgtcgttcgaggcggtggccggggagagggcggcggcgtcgtacacgcggctggcgtcgaggacgatctcgaggcacttccggagcctgagggacggggtggtggcgcagctgcaggcggtgcggaagcagctcggggagaaggacacggcggtgcccgggatgaccaagggcgagacgccccgcctccgggtgctcgaccagtgcctccgccagcacaaggcctaccaggccggcatgctcgagagccacccatggcgcccccagcgcggcctccccgagcgcgccgtctccatcctccgtgcctggctcttcgagcacttccttcacccaagaatgtttgccggtttcgtgacgatgctcaagctctcaccgcggtacccaagcgacgtggataagcacatcctcgcgaggcagaccgggctatcacgtagtcaagtggcgaattggttcatcaacgcgagggtgaggctgtggaagccaatggtggaggagatgtacgcggaggagatgaaggacgaggagggcagtggacagtccacgcaggcgagcaacccgcagaaccctaaccctagcagctacacgtcggaggtgcgcggcggcggcggcggcggcgaggaccgcggcgagcagaagccgtcgcgggcgcagctgctgcacgacgccggctcgctggcctccgtcgtgagcatcgggcacggcggcgcgggacggacgatggtcgatcaccaccatcaccagagccttaattttggcacgatggaccagctcgacttcgacgcgtacgaggcggccggcggcgggcaggggttcggcgccggcggcggggtgtctctgacgctggggctgcagcagcagcacgcggacccgcacgacggcgtgaacgtcgcgttcgccgccgccgcggcgccgcccaattcgtccggtgtcgccgcggagtacctattcatgggcggcggcgagcatcagcagcagctgcctcaaaccgcccagttcggcgccgtcatggaaggcgacgccgcgtcgcactaccgtggcctcagcgccaccgccgccgggttccacctcctccacgacctcgccgggtga

SEQ ID NO: 21641 - DNA, 231 bp, Oryza sativa
  Clone ID: TF_5103730
gagctgaagagccacctcctgaacaagtacagcggctacctgagcagcctatggagggagctctccaagaagaagaagaaaggcaagctgccccgggacgctcgccagaagctcctccactggtggcagcttcactaccgatggccctacccatcggagctggagaaggcggcgctggcggagtcgacggggctggacgcgaagcagatcaacaactggttcatcaaccag

SEQ ID NO: 21642 - DNA, 1332 bp, Oryza sativa
  Clone ID: TF_OsC244_4
ctccatttccatcaagcccaagaacgaactcaccacgctagtgttgagaagtggagagagttgagaggaatcaatggagatgatggttcatgggaggagagacgagcagtatggcgggctcaggctcgggcttgggcttgggctcagcctcggcgtcgccggtggtgcagccgacgacgagcagccgccgccgcgccgtggtgccgccccgccgccgcagcagcagctgtgcggctggaacggcggcggtctcttctcctcgtcttcctccgatcatcgggggaggtcggcgatgatggcgtgccacgacgtcatcgagatgccgttcctgcgggggatcgacgtgaaccgtgcgccggcggcagagacgaccacgacgacggcgagggggcccagctgcagcgaggaagacgaggagcccggcgcgtcctcccccaacagcacgctctccagcctcagcggcaagcgcggcgcaccatctgccgccaccgccgccgccgccgccgccagcgacgacgaggactccggcggcggatcccgcaagaagctccgcctctccaaggaccaagccgccgtcctcgaggacaccttcaaagagcacaacaccctcaatcccaagcagaaggcggcgctggcgaggcagctgaatctgaagccgcggcaggtggaggtgtggttccagaacaggagggcgaggacgaagctgaagcagacggaggtggactgcgagctgctcaagcgctgctgcgagacgctcaccgacgagaaccgccgcctccaccgcgagctccaggagctccgcgccctcaagctcgccaccgccgccgccgcgccgcaccacctctacggcgcccgcgtcccgccgcccaccaccctcaccatgtgcccctcctgcgagcgcgtcgcctccgcagccaccaccacccgcaacaactccggcgccgcccccgcgcggccggtgcccacccgcccgtggccgccggcggcggcgcagaggtcgtcggcgtagagaccccactactgattaattagttaattagagatgagtagtggctttttcttaattagcagggtattaattaattacttaattagggttggacccctgtagttttcttgtttatactacgtgtataatttagctctggttttgaactttttaattagtttcataatctttttttttcctatctctcacttcaccctgtttgttgtttactcagcaaagaatatggtgtctttgtataaagtgatgcatgaaatggatcataaaagttttcaaaaaaaaaaaaaaaaaaaaaaaaaaaaaaaaaaaaaaaaaaaaaaaaaaaa

SEQ ID NO: 21643 - DNA, 1600 bp, Oryza sativa
  Clone ID: TF_OsC1190_1
tgctgctccagcagcagaggctgcagtgcaatccgctgccaaattcctcttcttctccttcctactagcttttctcttcttcttcttcttcttcttggaaagctggaacttggagctgcttaagcttacacctgctgattcatctccagctgctgctgctgctgattcagtattattatgtgtggagatgtacagtagatgaggaggaaggaagtagctactggatagctagctgagctgagctaagctgagctaagcttcttggctaggtaggtagctagaggtgaggtgaggtgggggaagaggggattggacatggaggatctgtacagcatccacccgggaatctcccgcggcggcggtgggggaggaggaggtgcggccagcgaggcgtccggggtcgccggaggggggagctcgccgccgcatcccccaccgccggcgacgacggcggcggcggcggatctgacggagctgatgaaggcgcagatcgccggccacccgagctacccttccctcctctccgcctacatcgaatgccgcaaggttggtgcgccgccggaggtgaccacgctgctggaggagatcggccgggaggggcgcggcggcggcggcggcgcgacagccggcggggaaattggcctcgatccggagctcgacgagttcatggagacgtactgccgggtgctggagcggtacaaggaagaactcacacggccgttcgacgaggcggcctccttcctcaccggcatccacacccagctcgcctccctctgtggcggcgcgccgccgcccaccgacaactccgatgaaatggtggggtcttcagaggatgagccgtgctcaggagacgccgatgcagcagattttgggcaagaacacagctcccgcttggctgaccatgagctcaaagagatgttgctcaagaagtacagtggctgcctcagccgcctccggtccgagttcttgaagaagaggaagaaagggaaactaccgaaagacgcgcgatcggcacttatggactggtggaacacacattaccgttggccttaccccacggaagaggataaggtgaggctggccgcgatgactggcctcgacccgaagcagatcaacaactggttcatcaaccagaggaagaggcactggaagccatcggaggacatgcggttcgcgctcatggagggggtcaccggaggatcctcctccgggacgacactgtacttcgacaccggcacaattggtccatgatcagattgcactccaaattaaatgtagcaccttgcaacagacattggcaggtattacctgctgctacaccctctgtgaggagcaagggatgatcatatattaaaaggaaaaaaagatgaaatcaatcaataacctcatcattttgtcgaaattattgtgtatatggtgttgtaagagggagttgggatgacctgtaaaaacttgcctgcattcagctaccataacattaattaattgtttgtatccctgacaactgcatccccagttaaaaccattttagacaggaaagagtgaactatgagtaatagtaacatgtagcaataataaagatacttattttttcccttgc

SEQ ID NO: 21644 - DNA, 913 bp, Oryza sativa
  Clone ID: TF_OsC244_2
catcgtctctatagctacctaccttcatctctctctagagctagagctagcacacaagagagagggagagagagagagagagagcgcttggttgttggcgtggtggatggcgcaagatgatgaggacgtgggtctagctctgggcctctccctgggctccggcggccacaggcggcagagagaaagtagagacgaagcgccgtcgtcggcggcggcgtccctgctgacgctgaggctcccggcagagagcggggggcagccgcaggtggtggtgaagagggaggtggtgcgggcggaagaggaggagtacgaatacgagtacgagagggcgctctactcgtcgtcggctgcggcggcggacgacgacgagggctgcaacagccggaagaagctgaggctgagcaaggagcagtcggctctgctggaggatcgcttcaaggagcatagcactctcaaccctaagcaaaaggttgctttggcgaagcagctaaacctgaggccaaggcaagttgaggtgtggttccaaaacagaagagccaggacgaagctgaagcagacggaggtggattgcgagcttctgaagcgctgctgcgagacgctgacggaggagaaccgacgcctccatcgtgagctccagcagctcagggctctgacccactccaccgccgccggcttcttcatggccaccaccctccccgtccccgccgccacgctctccatctgcccctcctgcgagcgcctcgccaccgccgccgccgccggagcttcccccaccgccgccgccgaccgcaccaacaagcccaccgccccgcacttgttcagccctttcgccaacgcgcacggcaaggacgggcagtgggcgtgggcggtcggcaaggacggcgacgtggacggcggcgctcaccggcgctga

SEQ ID NO: 21645 - DNA, 1200 bp, Oryza sativa
  Clone ID: TF_OsC2119_1
atgggcgatgaagaagacctggagcttgtgcttggagtaagagcaactagaagagatgaacaggatgaccagacaacatgcacacaatcatcagaagaagctatggagggagaagaagatgaaactcgccctcatggcgaggctcctgtcgagagcttgagcttccctctgtttgtatcctctgcagagaccggcagtgcgaattcagagatgtgcacacgtggttttgatgtgaacactcggccagcagacggaggcgcagaggcagggaggccttcgtcaccatcttctatgcaggaggcatccacgagacagcaggtagctgatcaggaagctgcagacgatgaggataacggcggtggtggcgcgaggaagaagttgaggctatccaaggaacagtcctcgtttctggaggatagtttcaaagaacacagcaccctgactccgaaacaaaagagtgatttagctaatcggctcaaccttcgaccgcgccaagtggaggtctggttccaaaacagaagagctaggacgaagctgaagcagacggaggtggactgcgagcatctgaagcgctgctgcgagaggctgacgcgggagaaccggcggctgcagagggaggtggccgagctgcgtggcactctccgaaccaccacgtcgtcgtacccgccgctgtacggcctccaccacctaccagctgctgccggcacggtgttccgggtgtgcccttcatgtgagcatagcaaggtcgttgctgcggcagcttctgagagcttctctccgcgcgtcttcgccggcggcggcgcccctgccgccatcaccgctgccgccgccgtgccgtctccgggcgctggctcaccgccgtcgtcgtccgccgctttgttcggcgccagacggcctcattttggccccttcgccgccgccgtcatcccgccggtgctccgccgccagccatcggcgacgtcgtgaggtcttagcttgcagttttttttttcttgcactgcatctgcatgcacatgctaattaaatatgggatatatatatacgcgtgcattgatcatgtaaatgttttcccttttatgtttgttgttcatcaaaatcatgcttatatagggaaatatgtacatatagttctgttcatagaaaagattaaagtcatacatatactttgtaaaaatgtaaaaaaaaaaaaaaaaaaaaaaa

SEQ ID NO: 21646 - DNA, 3540 bp, Oryza sativa
  Clone ID: TF_OsC23897_1
atggggatggtacgaaagataggccgagctggtcgtgaggcagacgcctcctcctcccccgagctcctccccggtccagcccagccagccagcctcacgagcgaggacgctttcgttgcacgtactggaaccgcattgaagcacctgaatatcggtgtcgaggacgccgtcgacgccgcccccgcagtcggatccgcggacgggtccgacatccgccgtgcagtgaaccgccggaccctccgcccgcgccgcggcctgtgggtccgctctggtgtagcggccggctccatatcctcccccgacctcagcccagatgtacgagtgcctggggagatagacaatgaccgtgaggccttcgcccaccatggggcgcatcgtcctggactgcctagggtagtgggctctgaatcgggttgtgaggcgtgtgggaggggcggggtagatccaaggaagaggactttctcgagtttacgccgtggtgttttgcttcggcgaggaggcggcggcatgagctttgggggcctctttgacggcggcggcgggggaggcatgcagttccctttcgccagtggcttcgcgtcctcgccggcgctctccctcgcgctggacaacgccggcggtggcatcggcgggcggatgctcggcggcggcgctggcgctggttctagcgcgggcggcgcgatgacgagggacactgaggcggagaacgacagccggtcgggaagcgaccatctcgacgccatctcggccgccggcgaggacgacgtcgaggacgccgagcccagcaactcccgcaagaggaagaagcgataccaccgccacacgccgcagcagatccaagagctcgaagcgctgttcaaggagtgcccccatccggacgagaagcagcgcgccgagctcagcaggaggctctccctcgatgcgcggcaggtcaagttctggttccagaatcgccgcacgcagatgaagacgcaactggagcggcacgagaacgcgcttctcaagcaggagaacgacaagctgcgcgccgagaacatgacgatccgggaggcgatgcgcagcccaatgtgcggcagctgcgggagccccgccatgctcggggaggtgtccctagaggagcagcacctgcgcatcgagaatgcgcgcctcaaggacgagctcaaccgcgtgtgcgccctcgccaccaagttcctaggcaagcccatctccctcctgtcgccgccgcccttgctgcagccgcacctctcgctgcctatgcctaactcgtcgctggagctagcgatcggaggcatcggtggcttagggtctctcggtacactacccggctgtatgaatgagttcgccggaggcgtgtcgagcccgatgggcacggtgatcacgcctgcgcgcgcaaccggggctgctataccatcgctggtgggtaacatcgacaggtccgtgttcttagagcttgcaatcagcgcgatggacgaacttgtcaagatggcacagatggacgatccattgtgggttccggcactgcctggttctcccagcaaggaggtgctcaactttgacccatgcgtccgctccttcctaccgtgcattggcatgaagcctgccggctacgtctctgaggcctcgagggaatccggtctagtcatcatcgacaacagccttgcccttgtagagaccctcatggatgagagacggtggtctgacatgttctcgtgcatgattgctaaggcaacagtgcttgaggaggtgtctaccggcattgcaggaagcagaaatggcgcgttgctgctgatgaaggctgagctacaggtgctctcacctctagtaccaattagggaggttacatttctccggttttgtaagcagctggctgagggtgcatgggcagtagttgatgtgtccattgatggtttagtgagagatcataattctggaacggcacccacaggtggaaatgtgaagtgtaggagggtaccttccggctgtgtgatgcaagacactcccaatgggtattgcaaggtcacatgggttgagcatacggaatacgatgaggcatcagtgcaccagctctaccgtccactccttcggtctggtctcgcctttggcgccaggcgttggcttgcgacgctgcagcgccaatgcgaatgccttgccatcctcatgtcctctgctacagtgacagcaaatgactcgactgctatatcgcaagagggcaaacgaagcatgctgaagctggcacgccggatgacggagaacttctgtgctggggtgagcgcatcgtctgcacgtgaatggagcaagctggatggtgcgaccggtagcatcggggaggacgtgcgcgtgatggcacggaagagcgtgagcgagcctggagagccaccgggcgtggtgctgagcgcggccacctcggtgtgggtgcccgtggctccggagaagctcttcaacttcctgcgcgatgagcagctgcgtgcggagtgggacatcctcagcaatggaggccccatgcaggagatgacccagatcgccaaggggcagcgggatgggaactcggtttcactcctcagggccagtgctgtgagtgccaaccagagcagcatgctgatacttcaggagacgtgcaccgacgcttctggctccattgttgtgtacgctccggtagacatcccggcaatgcagcttgtcatgaatggtggcgactccacctatgttgctctgcttccatccggattcgccatcctgcccgatgggcctcgcatcggcgccaccgggtacgagacgggcggctctctgctcaccgtggcgttccagattcttgtcaacaaccagcccaccgccaagctcaccgtggaatcggtcgagaccgtgaacaatctcatctcctgcaccatcaagaagatcaagacggcgctgcagtgcgacgcctgagtgtttacagtggatttatgtccgcggggatacgccggcggcgacgagcctgagtcaagaacgaaccgcgcgttgaaaaaagaaaataacctttgctaggtgataaggatcttgcttggccggtccttagcacagagcaatggtggtggttcgggtattgactctggcctctaccgtacgccgatctctccccggcagccggtgatcattggatgatacagtaccatgcattttggacatttcttcgaggggttaaacttatgctttagtttcgtcgtcttagggagtcaaacctgtatacttttggcagttggctcatcgttgctctagtgttgtttgttttttgttgtgctatggctgtatgaggtagcctgtactagtagtttctcggaaatgctgggttcatactgtgctagtgtcgtccatacttcatataggttatggtacaagtgtaggatcaaattgaaggtttcagaaagtgtatcagccaataatgtctgtttgacagtggcattgctatggatcagctgaaaattgttttttgcaatacacatgggatcaaagctaaaaaaaaaaaaaaaaaaaaactcgagactagttctctctctctccctcgtg

SEQ ID NO: 21647 - DNA, 3033 bp, Oryza sativa
  Clone ID: TF_OsC434_1
ggagtctcgcaaccttccccttcccacctcccgctcctcctcaaccagcgccagccgcgtcagctcgcaataagcacttcggaccgccacggcgcgcgggtcttgcggcggtagtctctccctggcggcatgacgcggcggcgcacctggccgtgacgcgtcttgctaatggcagcggcggcggtggggggaaggggggagaggctgtcgtcctcctccccgacggcggcggcgccgcaggtggacgccgggaagtacgtccggtacacgcccgagcaggtggaggcgctggagcgggtgtacaccgagtgccccaagcccagctcactccgccgccagcagctcatccgggagtgccccatcctcagcaacatcgagcccaagcagatcaaggtctggtttcagaatcgcagatgccgggagaagcagcgcaaggaggcctcccggctgcaaactgtgaaccggaagctgaatgcgatgaacaagctgttgatggaggaaaatgaccggctgcagaagcaggtgtcccgtctcgtctacgagaacggctacatgcggactcaactgcacaatccttctgcagccaccacagatacaagctgtgagtctgtggtgacaagtggtcagcaccatcaacagcaaaacccagcagttctgcatccgcaaagggatgcgaacaacccagcaggtcttctcgctattgctgaggagaccttggcagagttcatgtcgaaggcgacaggaactgctgtcgaatgggtgcaaatggttgggatgaagcctggtccggattccattggaatcatcgctgtttcgcacaattgcagtggcgtagcagcacgagcttgcggccttgtgagccttgagcccacaaaggttgctgagatcctcaaggatcgcccctcttggtaccgtgattgccgatgcgtggatatcatccatgttatccctacgggtaacggcggaaccattgagctaatctacatgcagacttatgcaccgacaactttggcggcaccacgcgacttttggactctccgctacacaagtggacttgaagatgggagtcttgtgatctgtgaaaggtcattgactcagtccactggtggcccatctgggcctaacactccgaattttatcagagccgaggtacttcccagtggttatctgattcgaccatgtgagggaggtggctccatgatttacattgttgatcatgttgatttggatgcttggagtgtgcctgaggttcttcgaccgctctatgaatctccaaagatccttgcacagaagatgaccattgcagcattgcgacacattaggcaaattgcacatgagtcaagcggtgaaatcccctacggtgctggtcgccagcctgctgttttcaggaccttcagtcaaaggctcagcagaggtttcaatgatgctgttagtggatttccagatgatgggtggtctttgttgagcagtgatggtagtgaggacattacaatttcagtaaactcgtctccaaacaagcttgttggatcccatgtcagcccgaaccctctgttttctactgttggaggtggcatcttgtgtgcaaaggcatcaatgctacttcagaatgtacctcctgctctacttgtgcgatttctgagggagcatcgttctgaatgggctgatcctggtgttgatgcttattctgctgcttctttgcgagccagcccatatgcagttccaggcttaaggaccagcgggtttatgggcagtcaggttatactacccctcgctcataccttagagcatgaagagttcttggaggttattaggctcgaaggacatggtttcagccatgatgaggtgcttctatcacgggatatgtaccttctacagctttgcagcggggttgatgagaatgctactagtgcatctgcacagcttgtctttgctcctattgacgaatcttttgctgatgatgcaccacttttaccctcaggattccgtgtgataccactagatacaaaaatggatgggccatctgcaacacgcacgctcgaccttgcatccgcccttgaggttggaccaggtggagcttcgcgtgcttcagttgaagcatctggcacatgtaacagatcagtcctgaccattgctttccaattctcatacgagaaccaccttcgtgagagcgtggcggcaatggctaggagttatgtcagagctgtgatggcatccgtgcagagggtggctgtggcaatagctccttctcgacttggaccccagatcggaatgaagcaccctccagcctctcctgaggcgcttacacttgctagctggattggtaggagctatagggctcacaccggagcagatatccgttggtctgataccgaagatgccgattctcccctggcgctcctgtggaagcacagcgacgcaatactgtgctgttctctgaagcctgctcctatgttcaccttcgccaacaatgccggcctcgacatccttgagacgacgctggtcaacctccaggacatctcgctcgagatgatcctggatgacgagggccggaaggcgctgtgctcggagttccccaagatcatgcagcagggtttcacctatctccctggaggcgtctgcaagtcgagcatggggcggcaggcatcgtatgagcaggcggtggcgtggaaggttcttagcgacgacgacgcgccgcactgcctcgccttcatgctcgtcaactggaccttcatgtgatccaccatccatggtttccagcttccagctagtgcttttgcttttgtgccattgtggcaaactgaacaaagacctgaataccaccaccgtattgtattaaacatatgcgtccatacatgcatggtgcttgctttatcctagctagtgctagcacctgtgtgtatggtctctccatgtttgaagcttaaaattttagaaccctggttttttttttctgctgctgtgtggatgaacaagtttcaggacctatgtatctctttctatctatgctaatgctatgaattgtgtgatgtgcgc

SEQ ID NO: 21648 - DNA, 2765 bp, Oryza sativa
  Clone ID: TF_OsC775_3
ctcctccccctcttccttcttcctcctcccgccgccgccaccgccgcactcttcttcctcctcacatcactccactctgatctctctctttcagacagtagcaagagcagcagcagagagagagagatttttatgtgtgttcttgacgactgcgtgatcggctgtgccgccagatatagatagaccgtacaactgcagcgctagctatatatatgtttcgagtggggtgtgtgtttgtatatcgattgttgatttgttggtagatctgagctctgcgagtgttgcttcgtccatggtggatctctagctatttagggttgttggtctagctagatagctatatctttctctctctctagtactggtgtgtgcatatatttgtatatgctctgagggagagggagaggatgatgatccctggccggaacatgtcgccggcgatgatcggccggcccaacggcggcggcggcggcggcggcgtcgcctacgcttcttcttcctcggcgctctccctcatgcagagcttgttggatggacaccaccatcagctgccatcactgctgcagcagcaccacaatggacaccatctgcttgatcagcaccagcagcatcagcatcagcttcccccacaggcgacgacgacgagcgagagcgacggccgtgcccctcgcgacgagctggagatgagcaagtccggtggcagcgacaacctggagagcggcggtggcggtggcggaggtggctccggtggtgatcaggaccccaaccagcgcccccgcaagaagcgctaccaccgccacacccagcaccagatccaggagctcgaggccttcttcaaggagtgcccccaccctgatgacaagcagcgcaaggagctcagccgcgagctcggcctcgagcccctccaggtcaagttctggttccagaacaagcgcacccagatgaagacgcagcatgagagacacgagaacaatgcgctgcgcgcagagaacgagaagctgcgggcagagaacatgaggtacaaggaggcgcttgccaacgcgtcctgccccaactgcggcggtccggccgccatcggcgagatgtccttcgacgagcaccacctccgcctcgagaacgcgcgcctccgcgacgagattgacaggatctccgccatcgccgccaagtacgtcggcaagcccgccgcggccgtctcggccgcgtacccgccgctgccgccgtcgaacaggtcgccgctcgatcatatgggcattcccggcgctggcgccgacgtgttcggcgccgacttcgacaagccgctcgtcatcgagctcgccgtggccgccatggaggagctcgtcaggatggcgcagctcggcgagccgctctgggcgccggcgctcggcggcgaggcgctcggcgaggaggagtacgcgcgcacgttcccgcgcgggctagggcccaagtcgccggagctccggtcggaggcgtcgagggagacggcggtggtgatcatgaaccacgtcagcctcgtggagatgctcatggacgtcgggcagtggacggcgctcttctcgagcatcgtgtcgcgcgcggcgacgctggaggtgctctcgacgggcgtcgccggcaaccacaacggcgcgctgcagctcatgtccgccgagttccagatgccgtcgccgctggtgccgacgagggagacccagttcctgcgctactgcaagcagcaccccgacggcacgtgggccgtcgtcgacgtctccctcgacgggctccgcgccggcgccgggggcggatgccagccggcggcggcgcgcggccaccggcgccgcccctccggctgcctcatccaggagatgccgaacggctactccaaggtgacgtgggtggagcacgtggaggccgacgaccagatggtgcacaacctgtacaagccggtggtgaactccggcatggcgttcggcgctcgccggtgggtggcgacgctggagcggcagtgcgagcgcctggctagcgccatggcgagcaacgtggcgtcctcgggcgacgccggcgtgatcacgacgtcggaggggaggcggagcatgctgaagctggcggagcggatggtggcgagcttctgcggcggcgtgacggcgtcgacgacgcaccagtggacgacgctctccggcagcggcgccgaggacgtccgcgtcatgacgcgcaagagcgtcgacgaccccggccgccctcccggcatcatcctcaacgccgccacctccttctggctccccgtcccgccttcccgcgtcttcgacttcctccgcgacgactccacccgcagcgagtgggacatcctctccaatggcggcgtcgtccaagaaatggctcacatcgccaatggccgcgaccacggcaacgccgtctccctcctccgcgtcaacaacgcgaactcgaaccagagcaacatgctgatactgcaggagtgctgcacggacgcgacggggtcgtacgtgatatacgcgccggtggacgtggtggcgatgaacgtggtgctcaacggcggcgacccggactacgtggcgctgctgccgtcggggttcgccatcctccccgacgggccggacggcggcggcgggtcgctgctgacggtggcgttccagatactggtcgactccgtgcccaccgccaagctgtcgctcggctccgtcgccaccgtcaacagcctcatcgcctgcaccgtcgagcgcatcaaggccgccatcaccggcgacaacggcgtcgcgccgccatgcccacggtga

SEQ ID NO: 21649 - DNA, 942 bp, Oryza sativa
  unsure (1)..(942): unsure at all n locations
  Clone ID: TF_OsC155919_1
cggacgtgtcagnnacgcgtggtgccaccgctcgcgggaattgtcaagctagctagccttctcatcagcctggctctcagtctcaaagaaagcacaaaggtagctagcttagcatcgattgaagctgaccagagagatagttaagaatttgccatagcttagtgtttggtgcatacacacaactgctctcgttgtttttgctcttttgggttcgctcggaagatgagccgtgaggaggatgagaagctgctgttcccttcgttcgccttcccggcggagtgcttcccggaagccgccacctccggtggcgagcagaagaaggctcggcagcggcggaggaggaaggtgaagccggaagcggcggcagcgttggctggagagagcggaggggatgagcaggcgaagaagcggcggctgagcgacgagcaggcgcggtttctggagatgagcttcaagaaggagcggaagctggagacgccgcgcaaggtgcagctcgccgcggagctgggcctcgacgccaagcaggtcgccgtctggttccagaaccgccgcgcccgccacaagagcaagctcatggaggaggagttcgccaagctccgctccgcccacgacgccgtcgtcctccagaactgccacctcgagaccgagttgctgaagctgaaggagaggctggcggatgtagaggaggagaaggcgaagctagcagctgtcgccgcggcgacgaccggcggcggtggtggcggcggcggcggcagcagcagcccgacctcgtcgtcgttctccacggtgacgtaccacccggcgctggcggggcagttcggcgtggaggcggcggccgaggaggccgacctcacctacatgagtgagtacgcgtacaacagctacatgctggagttggcggcggccggctactgcggcggggtctacgaccaattcagctga

SEQ ID NO: 21650 - DNA, 2973 bp, Oryza sativa
  Clone ID: TF_OsC8602_1
ttagcgatctcggtccaagtgtccaagtgacacccatttgccggtggcgcgcctttgggcccatggccatggcgcacatgcttggatgggccggcccgtcgctccacgcctcggatcaccactgtcttcgcccgcggcggcgcacgccgccgccggagcccctgccccctctcgggcggcgcggcggggaccggggctcaccgcggccatgcgctgttcttgctatccctctcgtcagtttgtgccctcaccctgatgatttccgtttcactagccttgcacttcttgtcttcttccactcaacaggttggcgctaggttttgccgattggggatgaactcgtgacgaaattgcaatgtggggctctctctcggtaatggattggagaagtgatgaacggcgagcttaaacttatggcttcctatgtgagcaagcttaagttcatcttgcaaaaagatcagcagcaggagccccatactgcgaaccttctagtcctacttgggagtagcaatcaggacaaaagaaatggcctctcacagggagaaaacagaatggacacttgtaccagaaagaagccaagaagataccaactcctcaccatgcaacaaaaagaaacgcttaatcgtgcatttcaatcatgtccgaaccctgatagaaatgacttgaagaagttggccaaggaactaaacatgactgagacccaaatcaaatattggttccagaactgcaggacaaagatgaagaaattcaagaacaatgaggagcgcaaactactgcagaaggagaatgaggagctgaagaaggagaatgcagagttgagaaataggatgaagaactcaacatgccgcgcttgtgacctccctttgttccatatagattgccgtcattgggagaatccaatgctcaacaagggtaatcatggcgttacaagtaatctcattcctcaggcagtgtcatccttgctccccagctcaagtggttttgtagcttcaggctccaatcttagtagcaatgctgtgctcatgcccgtatctgccatgccatcatcagttttgcagcctgctccagccgtctctggtgccaattttcccatcttgcacaatctatctgccaatgcaaatgatggctatacggaaaaaaacgtacttgatctggcgaaccgtgcaatggaagagttctttagtctaatgaaggagaatgagtctcttcttgtcaaaaaaaaggagaatgggcctctctggctcccacacatggatattctgggagtcgaatcacttaactaccaggaataccttgcaaaatccaggacgattggacaaaaacctgttgacttcaaagtggtcgtcaccagggacactgccattgtcaatggtagctgtgttgacctcgtcaaaagccttttggatgctaaccgctggagagagttgtttccaggcatcgtggcaagtgcaaacaccaccaagatcatctctactgggccctctaacttgcacgacgggttgcttcaattgaaaaatttgcagatgcgtgcagagctccaggtaatgtcacctgaagtcccagtttgcgatgtgacattcttgaggcagagtgtgcagtttggaagtggactgtggtgtgtggttgatgtgtctattgataccatccttcctggagagagtaaaacagctcagtccagtgtgcagaccagcagtacagctgccagacgcatggaagtcaggctgttgccatcaggctgtgttattgaagaaatggagaatggctattccaaggtgacctggatggtgcatgcagcttatgatgagagagcagtgccagtgctttatcattcacttctccgctctgcaaaagcccttggtgcgtgccgctgggtagcatcactccagagacacagccagttcctttccggcctgcacaaatacatcttttgtcctgacagcacaatgacagaagtggtgatgcgaagaaaagtcctgtacctggtgaagcagatgacgagcagcttcacaggcctatttgcgtcgatgtctaaggccacgctgcaagatggtgatgatactcacttcgcgcatcagatagttggtggtgcaacaggtgaacctgccggactgctgctgagcgccaccacaaccatatggctccccggcgtgaacccgaggcacgtgtatgaccacctgcgtgatgagcagtgccatggtgaatggcgctgcctcctcggtgagcagctgcatcagggcaatgccttgccgtatggtgcccccctgaatggtgagaccgtgccagagttctatcgcatggtgaacgggctgcatgaagggcatgctatctccctgatcagccccagagaaatgggtggtaacataagcaacactctgctcctgcaagaggcaagaactgatctttctggctccctcatagtttacgccaggacagatgtgaacaccgtgcattccatcatgaacagtggcctcaaccctgccaccgtcttcctcgtatcctctggatgtgccattcttcctgattgcctggaatcattccctctacacccagctgcaactgcagatcaggccggcacctccagtgccgctatcgctagcaggagcgaaaccggtgggtcattcgtcaccgtcacttaccagatgtttttcagcagccaaggtggcgcagcacctgccagctcatcaattcatcaaggccgtgatgcgctcaagaaagccaccgacattttcaaggtggtcctcgacactctcaccgtggcatagcgcaataccccaggggtagcatttgcatgcgaaagtgaaatccagatcgagttaaatttcagtgtttaagactatgttgtttctgttgttcaggggatggctttatctctgatagacccgtggatcatgctgtttaccttgtttaccattttcagactatcgatttgaaatgttgatcagacatttataataattggaactttgagacatc

SEQ ID NO: 21651 - DNA, 1286 bp, Oryza sativa
  Clone ID: TF_OsC230307_1
gggctgcaggaatcggcacgagggctgctcttgtagatccaagctttcttcttcttcctcttgcagctagctagtgttcttcttcttcttcttctcactgttccctagtttcttcctctcagatccattttgtatatcttctctcttcattgttgattctctcaagaattgggctcatgaagaggcccagctgcagaggctcctccatggccatcatccatgacacctctgatcaacaagaggacaacatgaggtcgtacatggacggcggcggcgcggcggcgtacgaggaggaggaggaggaggttgaggacgacgacggcggcggcggcggcggcggcggcggcggcggtggggggctcggggagaagaagcggcggctggcggcggagcaggtgcgggcgctggagcggagcttcgaggcggacaacaagctggacccggagcggaaggcccggatcgcccgcgaccttcgcctccaccctcgccaggtcgccgtctggttccagaaccgccgcgcgaggtggaagaccaagcagatcgagcgcgacttcgccgccctccgctcccgccacgacgccctccgcctcgagtgcgacgccctccgccgcgacaaggacgccctcgccgccgagatcgccgacctccgggacagggtggacggccagatgtccgtcaagctggaggccgtggccgcggacgaacaccagccgcctccgccgccgccgccgccgccactggcgtataacagcaaggtggtggacggctcgacggacagcgactcgagcgcggtgttcaacgaggaggcgtcgccgtactccggcgcggccatcgaccaccaccaccaccaaactccggcgagctacgacacggcggggttcacctccttcttcgcgccatccaccacgctcacctcgtccctctccttcccttccatgttccacgcgtcatcgcatttcgatggccaccaagaactcctcgtcggcggcggcggcgccggcgcagtggccgacgccgacctcggaggcgccggattcttcgccggcgacgagcacgccggcggcctctcctggtacggcgccgagggttggtagaagctagagcttagctagctagcgagagagtgagctcagctaagcttaattagctggcttgattgcttgctttgtggctggttggtgacgccattgttgtaaattacggcattgttaagttgtacatgcatgcatgggggtaattataactaaagtcaatttctatagtttttactaaaaaaaaaaaaaaaa

SEQ ID NO: 21652 - DNA, 3007 bp, Oryza sativa
  Clone ID: TF_OsC25864_1
ctagctagctagctagctactcctattgatgatatcgccggccggacatatgcgcaggatgctcggggactgccaggtcctgtcgtccatggccgccatggccggggccgcctcctccgccgacgcgctcttcgcctcgccgctcatccccaaccccgctctcgccggcttcatgtcctcctccgccgccatgcccttccaccacttctccaacgccgccgccaccttaatacctaaggaggaggggttgatgggcggcctccatgtggccaaggacgaggggatggacctcgagatggacatggagctcagtggcggctccggcagcgcccacctcgacggcctcctcagcttcgccgacgtcgacgacgaccacaagccgcagcacagcggccatgaccagccgcccgacgccgcccagcccagcggcgccgcggggggcaacgccaagaagaagcgctaccaccgccacacggcgcaccagatccagcagatggaggcgctgttcaaggagtgcccgcatccggacgacaagcagcggctgaagctgagccaggaactgggcctcaaacctcgccaggtcaagttctggttccagaatcgccggacccagatgaaggcgcagcaggacagggcggacaacgtgattctgcgcgcggagaacgagaacctcaagagcgacaacttccgcctccaggccgccatccgcaacgtcgtctgccccaactgcggccacgccgccgtcctcgccgacatgtcctacgaggagcagcagctccgcatcgagaacgccaggctcaaagacgagcttgaccgcttggcctgcatcgccacccgctacggcggcggcggcggacggcagccggtgctgtcgacgtcggccctgagctgcatctcggcgccgccgccggtcctcatgccaccgctcgacctcgacatgaacgtctactcgcggcacttcgccgagcaggcgccggtcatgggctgcggcgacctcatcccgccacccgtcgtgccgcagcacgatggcgcggcggcgtacatgggcgccatgatggcgcccgtgcaggagcaggacaagcagctggtggtcgacctcgccgccacggcggcggaccagctcgccaggatgtgccgcgccggcgagccgctgtgggtgcggcagcgtggcgcggaggtgatggccgtggaggagcacgcgcggatgttcagctggccggtggacggcgcgaagcagggagacggcggcgcggtggcgagggcggaggggacgcgtgacaacgcggtggtcatcatgaacagcatcaacttggtggacgccttcctcgatgcgaacaaatggatggagctgttcccgtcgattgtttgcaaggcaagaacaatccagatcataaaccacggagctgcgtctggtcacctcggcagtggaactctcctcttgatgcaagcagaggtgcagttcttgtcgcctctggtggcggcgcgcgaggtggtgttcttccgttactgcgtgcacaacgccgacgaggggagctgggcgatcgtggatttcccggcggaagggtttgaggaggggctcctccaagcctcggtggtcaggtgccggcggcggccgtccggctgcatcatccaggacatgcccaatggatactccagggtggtgtgggtggagcacatggagatggtcggggaggagaagccgctgcagccggtgttcagggactacgtcgccagcggcgccgccttcggggccacgcgctggctctccatcctccagcgccagtgcgagcgcctcgccagtgagctcgcccgtaacatcgccgacctcggagtgatccgcacccctgaggcaagaacaaatatgatgaagctgtcgcagcggatgatcaccactttctgtgctaacatcagtgcttctggaacccaatcttggacggccctctcggattcaacccaggacactatcagggttacaactcggaagaacactgagcccggacagcccagcggtgtcatcctcaccgctgtctccacaagctggcttccttttacccatcagcaggtgtttgagcttcttgcagatgaacaacagcgctgccagcttgagattttgtcaaacggcggctcccttcatgaggtggcacatattgcaaatggatcacatccaaggaattgcatctctcttcttcgcattaacgctgcaagcaactcgtcacagaatgtggagctcctgctgcaggagagcagcacccaccctgatggtgggagcctggtggtgttcgcgacggtggacgtggacgcaattcaggtgacgatgagcggcgaggatccttcctacatccctctcctccccctgggcttcgccatcttccctgccaccagcccatcacctgctgctgcacccaccatcagctcaagcaccaccaccaccactggcaatggcaatggcgaaaccagtagcactcctccaagaaacagcagcagcaacaacaacaatgcagatgagctgctgcctcccaatggctgcctcctcaccgtcggcatgcaggtgctggccagcgccgtaccttctgccaagctcaacctctcgagtgtcactgcgatcaacagccatgtctgcaacgccattcaccagatcacagctgcactcaaaagttcagcaggtggtgctgggggtgagccggcgtccgatcagtagcaaaggagacctggaggagaggggatcggagcaacatgggatcagacaccaaaatgcctcccaatttatttcgctaacatcgcagtttgtttttctgttagctctcggtctggctggttcatcaggtgcaagggagggtttgacaagaagccaacactaacagctactcaaatctctcctctcttcccgccatatttctgcctctcaaaatgacgaaaatacccccaaccagccaacaagcaaagccatggggggcattttgatcattttgggaagctacttctgctgagaaagaaaaaaaaaaaaaaa

SEQ ID NO: 21653 - DNA, 415 bp, Oryza sativa
  Clone ID: TF_LIB3432-004-P1-K1-G7
gatcggcgtcggcgtgtgtgtatgtaggtgcatctgctggagaggagcttcgaggaggagaacaagctggagccggagcggaagacggagctggcgcggaagctagggctgcagccgcggcaggtcgccgtgtggttccagaaccgccgcgcgcgctggaagaccaagcagctcgagcgcgacttcgaccgcctcaaggcgtcgttcgacgccctccgcgccgaccacgacgccctcctccaggacaaccaccgcctccactctcaggtcatgtcgttgaccgagaagctgcaagagaaggagacgacgaccgagggcagcgccggcgcggccgttgacgtcccgggcttgcctgcggcggccgacgtgaaggtcgccgtcccggacgccgaggaaccggcgctggaggaggcgg

SEQ ID NO: 21654 - DNA, 378 bp, Oryza sativa; identical to SEQ ID NO: 12101
  Clone ID: TF_OsC330010_1

SEQ ID NO: 21655 - DNA, 3018 bp, Oryza sativa
  Clone ID: TF_OsC23897_2
atgcagttcccgttctccggcgctggcccgggcgtcttcacgtcatcgccggcgctctccctcgcgctggcggacgcggtggcaggccggaacagcggcggcggtgggaagatggttaccgcggcccatggcggcgtcggcggaggaggaggaggaggacgcgcgaaggcgagggacgcgttggaggtggagaacgagatgagccggtccgggagcgaccacctcgacgtcgtctcttgcggcgacgcgggcggcggcggcggcgacgacgacgatgacgaggacgccgagcacggcaacccgcccaagcgcaagaagcggtaccaccgccacacgccgcagcagatccaagagctggaagcgatgttcaaggaatgcccccacccagacgagaagcagcgcgccgagctgagcaagcggctcggcctcgaaccccggcaggtcaagttctggttccagaatcggcgaacgcagatgaagatgcaactggagcgacacgagaactcgctgctgaagcaggagaacgataagctgcggtccgagaacctgtcaatccgggaggccacgagcaacgcggtgtgcgttggctgcggcggcccggcgatgctcggggaggtgtccctggaggagcaccaccttcgcgtcgagaacgcgaggctcaaggacgagctcagccgagtgtgcgcgctcgccgccaagttccttggcaagtccatctctgtcatggcgccaccgcagatgcatcagcctcatcctgtgccaggctcgtcgctggagcttgcggttgggggtatcggttcgatgccatcagccacgatgcccatctcgacgatcactgattttgctggcgccatgtccagttcaatgggcacggtgatcacgcccatgaagtctgaggctgaaccatcggcaatggctggcattgacaagtccttgttcttggagctagcaatgagtgcaatggatgagctagtcaagatggctcagatgggggatccgctatggattccaggtgcctccgtaccttcctcgccggcaaaggagagtctaaacttcgaggagtacctaaacaccttcccaccttgcatcggggtgaagcctgaagggtatgtatcagaggcatctagagaatctggcattgtcatcattgacgatggcgccgcgcttgtggagaccctcatggatgagtttgaattcttgcgacagcgacggtggtccgatatgttctcatgcatgattgccaaggcatcaaccactgaggagatttctactggtgttgctgggagtagaaatggtgcattgcttcttatgcaggcagagctacaggtgctttctcctcttgtgcctattagagaggtgaagtttctcaggttctccaaacagctggctgatggtgtatgggctgtagtggacgtttcggctgatgaattgatgagggatcagggcattacttctgcatcctcgactgcaaacatgaactgccgaaggctgccttctggttgtgtgctgcaggacactccaaatgggtttgttaagtatttagttcaaatatcagtattttctgaagtctataatctctctattgatcagtttctggatctgcctcctgctttcatggtcacatgggttgaacatacagaatatgatgaggcatctgtgcacccgctctaccggcctcttctccggtctggtcttgcccttggtgcagggcgatggatcgcgacattacagcggcagtgcgaatgcttggcccttctcatgtcttctattgcattgccagagaacgactcatcagctatccatcctgaaggtaaacggagcatgttgaagttggcaaggaggatgacggacaacttctgtgcaggggtgagcacatcatctacccgtgaatggagcaaactggttggattgacaggcaacattggggaggatgtgcatgtaatggcgcggaagagtgtggatgaacctggaacgccgccaggtgtggtgcttagtgctgctacatctgtgtggatgcctgtgatgcctgaacggctcttcaacttcttgcacaacaaggggctgcgtgctgaatgggatatcctcagcaatggtggccctatgcaggaggtgacaagcattgccaaggggcaacagaatggcaataccgtatgtctactgaaggctagttcttctgttccccttaccaaaaatttcactgtgcagcccaccaaagacaagcagaacagcatgctgatcctacaggagacgtgtgcagacgcatccggttcaatggttgtgtatgctcctgtagacatcccagcaatgcaccttgtcatgagtggtggggattcgtcatgcgtcgcccttcttccatcaggttttgccatcctgcctgctgggcctagcatcggcgcagatcacaagatgggcggttcattgctcaccgttgcattccagatacttgccaacagccagcccagtgctaagctcacggtggagtcagtcgagaccgtgagcaaccttatctcctgcaccatcaagaagatcaagacggcgctgcattgcgacgtgtgaacccaacaaggggggacttttggcctagtgggagcggctgtggcgatgagcctgagtcaagaacgaaccgcgacataggaagggacctttgctaggtggcaaggaccggacggggcaggtccttagcacagagcaatggtggtggttcgggtattgactcagcctctcccgcctccgttctctcctgtgactggtgcatgttgaagtgaacctgcattttggacgccatgtagcaggccatctttctttctttttcctttttctttttctttttctttttttagggagaagggagtcatctgtgttttttgttggctggctcagggtgttggtgtttctggtttctagcttttgttacagggagatgtgatacattttgtagaagctccgaattgtcgtgctggtatgtgaggttctgatcataggtctgtgtttgatagtctcgagctatcaacgcctggc

SEQ ID NO: 21656 - DNA, 1852 bp, Oryza sativa
  Clone ID: TF_OsC2116_1
ccacgcgtcccggaaaccgagaaagagagagagagagagagaggtagggagggaagaagagtcactccacactccacactctcatcccctggtccctttcttggatcatgagaaaccgcgcaacaaaattgcaattctaggcagcatttggaccggggacttggctacgtggtgtttggccatggatcgcagcgtggaattaagaccggcgaggactcagcgacggaggcacccgcgtcattcctacgcttctgtgcccgtcgtcttctcgcagtgagagagagagagagatcgaccaggcgttcactgaattttactagaactcggcatgaagcgacccggcggtgccggcggcggcggaggcagcccatcgctcgtcacgatggctaattctagtgatgatggatatggaggggttgggatggaggcggagggggacgtggaggaggagatgatggcgtgcggcggcggcggggagaagaagcggcggctgagcgtggagcaggttcgcgcgctggagcggagcttcgaggtggagaacaagcttgagcctgagcggaaggcgcggctggcgcgcgacctcggcctgcagccgcgccaggtcgccgtctggttccagaaccgccgcgcgcggtggaagaccaagcagctcgagcgcgactacgccgcgctccgccattcctacgactccctgcgcctcgatcacgacgcgctccgccgcgacaaggacgccctcctcgccgagatcaaggagctgaaggcgaagctcggggacgaggaggcggcggcgagcttcacgtcggtgaaggaggagccggcggcctccgacgggccaccggcggcgggatttgggtcgtccgacagcgactcaagcgcggtgctgaacgacgtggacgcggccggcgccgcgcccgcggcgacggacgcgctggctccggaggcgtgcacgtttctcggcgcgccgcccgccgcgggcgcgggcgcgggcgcagcggcggcggcgagccacgaggaggtgttcttccacggcaatttcctcaaggtggaggaggacgagacggggttcctcgacgacgacgagccgtgcggcgggttcttcgccgacgatcagcccccgccgctgtcgtcgtggtgggccgagcccacggagcactggaactgaagcaaatccggcgtaaccgcagccgagagagagagttggaaaacactatgcctgggggaataaagaattctgcaggaaagcagggtcttatctgcaattttgtaaaaaaaatggacctctacgtacttctctagtctcttttgccaattctcgcgcacattagctgtagcactgcagtgtagtaaaatcctactactccattacctctccaatttctagctctcacttccctacttaaactcatctgagctctaatgtaagcatatgccatccaaaatggaccataaatatgtcactagcagtaggatggtaattaggacttaaaaaaaaaaaaaaaaaaaaaaaaaaagctgcggaagcagcccatacatcgccacgatggctgattagagcgatgactgatatgggaggctcgtgctcaaggtcaccgacaaccacgagtgcttgaagtttaagacagatcaagctcaggatgcatagaagatggaaaaactgaacaccattttttttactctcatgacccatggacctgatgctgatataagtgatgtttcggggaaggaacaggctgaacaacagcattcatagaaaggccggggcaggaggcagcagtgtattgggtctgtcttgattttgttcaaagtaatcataactggaatgggggttgggactatttggctctttgattgc

SEQ ID NO: 21657 - DNA, 765 bp, Oryza sativa
  Clone ID: TF_OsC2116_6
atgaccaacgcaggaagcacccccaccattgatgatggatatggaggggttgggatggaggcggagggggacgtggaggaggagatgatggcgtgcggcggcggcggggagaagaagcggcggctgagcgtggagcaggttcgcgcgctggagcggagcttcgaggtggagaacaagcttgagcctgagcggaaggcgcggctggcgcgcgacctcggcctgcagccgcgccaggtcgccgtctggttccagaaccgccgcgcgcggtggaagaccaagcaaacacttgcaagcgactcaagcgcggtgctgaacgacgtggacgcggccggcgccgcgcccgcggcgacggacgcgctggctccggaggcgtgcacgtttctcggcgcgccgcccgccgcgggcgcgggcgcgggcgcagcggcggcggcgagccacgaggaggtgttcttccacggcaatttcctcaaggtggaggaggacgagacggggttcctcgacgacgacgagccgtgcggcgggttcttcgccgacgatcagcccccgccgctgtcgtcgtggtgggccgagcccacggagcactggaattgaagcaaatccggggtaaccgcagccgagagaaagagttggaaaacattatgcctgggggaataaagaattttgcaggaaagcagggttttatctgcaattttgtaaaaaaaatggccctgctgacttatgtagtagttcactcgattgcttcgatatttatgtttcaattccaag

SEQ ID NO: 21658 - DNA, 1101 bp, Oryza sativa
  Clone ID: TF_OsC224908_1
caattcattcccccgagctgagctgagctctcattccttccttctcctttccgccggcctcgcctctcgtctcctcctctcccctaccgatacgcacgctcgcttgcttgcacctcgcgcgcgagagacgagagagagacggcgagccctggcacgcacgagaagcgaatcgaagtggcggcgacaggagcagctgctgctggtggattatccgtcgtcaacatggctcaggaggacgtcggtcacctgagcgacgccggcctggcgctgggcctgtccctcggcgggggaggaggagggacgaccgacgcggcggcggcgcaccgtggcggctgccggcggccgtcgccgtcgtcgcagtgcccgccgctggagccgtcgctgaccctgagcttgcccgacgacgcggcggccggcgcggccgcgaccgcgaccgcgaccgcgtccggcgggggcggccctgcgcacagcgtgtcgtcgctgtccgtcggcgcggcggcggcggcggccgtgaagagggagcgcgcggaggaggccgacggcgagagggtgtcgtcgacggcggccgggcgtgacgacgacgacgacgggagcacccgcaagaagctccggctgaccaaggagcagtccgcgctcctggaggaccgcttccgggagcacagcacgctcaacccgaagcagaaagtcgctttagcgaagcaactgaacctcaggccaaggcaggtggaggtctggttccaaaacagaagagcaaggacaaagctgaagcagacggaggtggactgcgagttcctgaagcgctgctgcgagacgctcaccgaggagaaccgtcggctgcagcgcgagctgcaggagctccgcgcgctcaagttcgccccgccgccgccgtcctcggcggcccaccagccgtcgccggcgccaccggcgccgttctacatgcaactcccggccgccacgctcaccatctgcccgtcctgcgagcgcgtcggcgggcccgcgtccgccgccaaggtcgtcgccgccgacgggaccaaggccggccccggccggaccaccacccaccacttcttcaaccccttcacccactccgccgcctgctga

SEQ ID NO: 21659 - DNA, 2142 bp, Oryza sativa; identical to SEQ ID NO: 12114
  Clone ID: TF_OsC64951_1

SEQ ID NO: 21660 - DNA, 2870 bp, Oryza sativa
  Clone ID: TF_OsC42451_2
atggctgcggcagtggcaatgcgagggagtagcagtgatggaggtggctatgataaggtttccgggatggactccggtaaatatgtgcgctacacgcctgagcaggtggaggcgcttgagcgggtgtacgccgattgccccaagccaacctcctcccgcaggcagcaactgctgcgtgagtgccccatacttgctaacattgagcccaagcagatcaaggtctggttccagaacagaaggtgccgggataagcagcggaaggagtcttcacggcttcaggctgtcaacaggaaattgacggcaatgaacaagctacttatggaagagaatgagcgactccagaagcaggtctcccaattggttcatgagaatgcccacatgcgacagcagctgcagaatactccgctggcaaatgatacaagctgtgaatcaaatgtgactacccctcaaaaccctttaagggatgcaagtaacccctctgggctcctttcaattgcagaggagaccttgacagagttcctctcaaaggctactggtacagctattgattgggtccagatgcctgggatgaagcctggtccggattcggttggtattgtggccatttcacatggttgccgtggtgttgctgcccgtgcctgtggtttggtgaacctagaaccaacaaaagtggtagagatattgaaagatcgtccatcttggttccgtgattgtcgaaacctggaagtctttacaatgattccagcaggaaatggaggaacggttgaacttgtctacacacagttgtatgctccaacaactttagttcctgcacgagatttttggacgttacggtacacaaccacaatggaagatggcagtcttgtggtctgtgagagatctttaagtggttcagggggcggtccaagtgctgcctctgctcagcaatatgtgagagcggaaatgcttccaagtggatacctggttcgcccatgtgaaggtgggggatcaattgtgcacatagtggaccatctggatcttgaggcatggagtgttcctgaggtgcttcggccactctatgaatcttcaagggtagtcgctcagaaaatgactactgcggcactccggcacatcagacaaattgctcaagaaacaagtggggaagtggtgtatgccttggggaggcaaccagcagtgctacggacttttagtcaaaggctgagcagaggctttaacgatgccattagtggtttcaatgatgatgggtggtctataatgggcggagacggtgttgaagatgtagttattgcttgcaactcaactaagaaaattaggagtaacagcaatgctggcatcgcctttggagcccccggaggtattatatgtgctaaggcatcaatgttactgcagagtgttcctccagcagtactggttcgatttctgagggagcatagatctgaatgggccgattacaatattgatgcatatttggcttcaactctgaaaacaagtgcatgttcacttactgggttgcgacccatgagattttctgggagccaaatcatcattccacttgctcacacagttgagaatgaggagattcttgaagttgttcgccttgagggtcaacctcttactcatgatgaagctcttctttcaagggatatccacctgcttcagctctgcactggaatagacgagaagtctgtgggatcctcctttcagcttgtgtttgcaccgattgatgatttcccagatgaaactccattgatttcttctggcttccgtgttataccacttgatatgaaaacattagaactaatagaggcatttggtttcaaatattcccttggaaaaataaagcaagatggtgcatcctctggtaggacattagatttggcatctagtcttgaagtaggttcagcaacagctcaagcctccggagatgcatctgcagatgattgtaacttgcgatctgttctgacgatcgcttttcaattcccttacgagttgcatctccaagacagtgttgcagctatggctcgccaatatgtccgtagcattgtttctgctgtgcaaagagtgtcaatggctatctctccctctcaaactggtctaaatgccggacagaggataatctctggtttccctgaagcagcaacccttgctcgatgggtttgccagagctaccattaccatctaggggtagagttacttagtcaatcagatggagatgcagaacaattgttgaagatgctatggcattaccaagatgctattttgtgctgctcattcaaggaaaaaccggtgtttacatttgccaacaaagcaggactggacatgctagaaacttcccttgtcgccttacaggacctcacattggacaggatctttgatgagcctggaaaagaagcattgttctcaaacattcccaaattgatggagcagggccatgtctacctgccatcaggcgtgtgcatgtcaggaatgggtcggcatgtttctttcgatcaggccgtggcttggaaagtgcttgccgaggatagcaatgttcactgcctggccttctgtttcgtcaactggtcctttgtgtgaccatcccacatccactgcgaagtgaagattcatttttgcttgttcaagactgttttgcactagatctagacctgagaatctagtagtatttgcgaaatttctcgcttatgtaaatgtaatctcgctcccattccatcaagtacccaagtacaaggcagtggccaagtggttttagttgtagggggattggaacaatcctgacggttggggacttggggtccttcccagcaaaggaaaaacggaacctgtaaggggtcaaaactccatgccagattttgaaatcagcccaattagct

SEQ ID NO: 21661 - DNA, 2854 bp, Oryza sativa
  unsure (1)..(2854): unsure at all n locations
  Clone ID: TF_OsC1713_3804
atggacgcgagcaagtacgtgaggtacacgccggagcaggtggaggcgctggagaggctgtactacgagtgtcccaagccgagctcgctgcggcggcagcagctggtgcgggagtgcccggcgctggcgaacgtggacccgaagcagatcaaggtgtggttccagaaccgccggtgccgggagaagcagcgcaaggagtcgtcgcggctgcaggcgctcaaccgcaagctcaccgccatgaacaagctcctcatggaggagaacgaccgcctccagaagcaggtctcccagctcgtctacgaccacggccgccacggcgtcgccgccgccgggatgatgcggcgagttcctgccttccctcctcaggccgccgccgccgccggccaccagctcgccaccgccaccgacaccagctgcgagtcggtcgtcaccagcggccatcatcatcagcagcagcagcacaacgtcgtccagccgccgccgcgcgacgcaagcccagctgggctgatgtcgatcgcggaggagacattgacggagtttctgtccaaggccaccggaaccgccgtcgagtggctccaaatgcctgggatgaagcctggtccggattccattggaatcatcgccatctcgcatggctgcgccggcgtcgccgcgcgagcttgcggcctcgtcggcatggagcccgctaaggttgccgaaatactcaaggatcggccgctgtggctgcgcgattgccggtccatggatgtggtgaacgtgctccctgctggcgccaacggcaccatcgagctgctctacatgcaggcaagaacacacaagcctgaaaattctgaacctgaacctgaaattctgaagctgaaatttgtattcgatcttcagctctatgctccgacgacgctggcgccggctcgcgacttctggctgctgcggtacacctccattctcgacgatggaagcttagtggtgtgtgagagatcactcagtagcaagcaaggaggcccaagcatgccacttgtccagccttttatcagaggtgagatgcttcccagtgggttcttgatccggcctagcgatgttggaggcagcgtgatacacatcgttgatcatatggacctcgagccttggagcgtgcctgaagttgtacgacctttgtatgaatcttctgccatggttgcgcagaagatctcgatggcggctttgcgctacctgaggcaggttgcacacgaagatacacgttctgtgatcacaggatggggaaggcagcctgcggctttgcgtgctctgagccaaaagctcaccagaggattcaatgaagctctcaatgggcttgccgatgatggatggtccgtgatcgagagcgatggcgtcgacgatgtttgcatctctgtcaattcatccaaagtgatcggttgcaatgcaacattcagcagtggactccctattgtcagtaccggtgttctttgtgccaaggcatccatgctgttgcaggatgtctctcctccatcactactgcaatttttgcgcgaacaccggtcacagtgggccgacagcaatttagacgcattcttcgcctccacgatgaaaccaaacttctgcaatttacccatgtcccgtcttggaggattcagtggtcaggtcatacttcctttagcacacacgtttgaacctgaagagttcctggaagttatcaagctaggaaacgccagcaactaccaagatacactggtgcaccgtgatctgttcctcttgcagatgtacaatggagtagaggagagcagtgcaggaacatgttcagagctcatctttgcgcccatcgacgcatcgttcagtgatgattccccactgctgccttccggtttccgcatcatcccaatcgattctcctctcgacacgtcgagcccgaactgcacgttggatctcgcgtccacgctcgaagccgcgacgccacggagcaggatcagcggcgtcaatggcggcggcggcggctgtgctgctgctgcggcgagctctagctccaaggcggtgatgacgatcgcgttccagttcgcgttcgacggccacctgcaggacagcgtggccgccatggcgcggcagtacatgcgcaacatcatctcgtcggtgcagaggatcgccgtggcgctctcgtcctcccgcctcgtccctcccggcgccggcgccgccgccgcgcagctctcaccggtgactccggaggcggcgacgctgcccagatggatttgccagagctacagatttcattttggagatgaactcatcaaatctgtagatgcaaacagcagcaatgaatcgattctgaaagcagtttggcatcatccgagtgccatactctgctgctctctcaaggcgatgccagtgttcacatttgcaaaccagtctggcctcgacatgctcgaaacaactctggtggcgctccaagacatgacgctggagaaagttttcgacgatcaagggaggaagaacctgtgcacagagctccccaacatcatggagcaggggatggcgtgcatggagggaggggtgtgcgtgtcgagcgttgggagggcggcgtcgtacgagaaggcggtggcgtggaaggtggtcgacggcgacggcggcggcgcccactgcatctgcttcatgttcatcaactggaccttcctttgatttcatttcattatacaccccaatgcaaaacggatatataatattacaactagtgcaatttacgtacgtaatctcatgaaacagcgtgtacaaatgttttggattttgagaaccncggtgctagtttttgtacggatcgatagtggatacattctctgttcggagtagggataaaaaaaaaaaaaaaaaaaaa

SEQ ID NO: 21662 - DNA, 3783 bp, Oryza sativa
  Clone ID: TF_OsC81847_1
atggcggcggttcggaagatggcggccaatggcctcgcagcaaaaagggagaatacagggacaaagaaatctcccctgcaaatccagatgctggagagattctactctgaggtacaataccctcagtcggaggacattgcagagtatgcaacatctgttggtttgacttacaatcaggtcagaatatggtttaaggagcggaggaggaaagagaggagagaaacggaatctttaggggcgcatatggaaaagcaacttagtgcaagatcaaatgggttcagatgcagcagcagcaggtcttcctcttttagccggtctaccatgtaccgtactgtgaatttacagccagaggacgaccgttatgttgacaagggtatgagcttcacaggagagaaacacacactccgatcacaagttctgtttcccaaggattatatcctgaggaaagtcttccgcaaggatggtccacctcttggaagcgaatttgatccccttccccatagtgcacctggccatctcagagatactacagacgaccatttctaccagaaccaaagagtaataaagaagagaaagattgtggagcctaccactcagagatcttccctgccatgtggggacaatggtcctgtgaggaaacatggagccgggaaaggtctaatgacagtgtggcatgcaatgtattcccatagtagcaaaattcaagatggatctaattttattgatgaaactggttgcttgaggtccttgagaccattagatgattgtggcagaatagaggattgcgatgatggaaagctaattcaggtgccaagtagcagagttactgatccgaagaagcatcctccaatggaatgccatctttcagttgatgaatcacaatccccagtgctacaggctaaccaagtgactttagttgatgatgaggagcttgaactccgtgaattgcaagcaggtcctaacccattgagatgttcagctcacctttcttcaagtgggagacatggctgccctctttgtaaagatttactttccaggtttcctccatcaagtgtcaagatgaaacagccattctccacaagaccttgggggtcatcaccagaaatggtgaaaaagcttttccaggttgtccggtttatctacaatcgttttggttatatggatgtccatcccttcacacttgatgagttggcacaggcatttcatgacaaggttagggaacaggagtttgatatgaatttttggatcaagtctctgaattctcttacctgggttgaaatactacgtcaagttttggttgcttctggttttggttcgaaacatcatatgctgaatcgggatttttttaataaggagaaaaatcaaatggttaaatatggtttacgtcctcgtacactgaagggtgaattgtttgcactattgtctaagaaaggtagtggtggcttaaaggtatcagaacttgccaaatcacctgagattgttgatcttagcatctccagcacagaaatagagcagctgatctattcaactctttctagtgatatcacattatttgagaagattgcgccttctgcatatcgtctccgtgtagatcctcgaattaaaggaaaggaagactctggatcagataccgaggactctggaagtgttgatgatcacagtgatgctagcagtggtgctgatgaatctgatggttcacatgagatgagtttttctgagcatgaacatagaatccttagaagaaagtggaaaaatggtcatgaaaatgtgaatagatgtagtgaaattgatgaaagttattctggagaacgatggcttctggggttgatggaaggcgagtactcagacttaagcattgatgagaagttggattgcttggttgctttaatggatgttgtttctggtgctgattctgctccaagacttgaggaaccatcaagagtcgtgcctagcataccgagagcacagccgcatgtgtcaggtgggaaaataaagaaatcgacaagaaacatttgtcaatctagtgatgagtgctttaatgcatcaggaagcatgtatggtttggattcttctatgcatgagcagtcaagaagcctgagaagtcgtgattatgttgcttactctggaaggaatgatacgtctacaggagttgctcatcaaccacaagttgttctcttaggatccgaccgtaggtataataattattggctcttccttggaccttgtagagcagatgatccaggacatcgtagggtgtacttcgagtcatcagaagatggtcactgggaggttattgattcaccacaggagttactttccctactagcttcgctagacagcagaggtactagggaagcttatcttcttgcgtcaatgaaaaagagacagacatgcctttttgaagccatgaaaaagcattacgaaaatagagatgcagttcaacctgcaatgccatctgatacatctcactctgagacaagtagtggagatggagcttcacccaagctaagtagtggagatggagcttcgccaacatcagacattgacaatgcttctgtccccacaaatccagctgagaatatgataaatgcatcatctgcaatagcaattgaagttgggaggagaggtgatgagaaaatattgaagtgggaaagatctcaaacatttgataaatggatctggacttctttctattcttgcctaactgctgttaagtgtggcaagaaatcattcaaggaatcactagttcgctgtgaaagttgtcatgatttgtattggagagatgaaaagcattgcagaatatgccactctacttttgaagttagctttgatcttgaagaacgatatgctatacatgtggctacatgcagggatcctgaagatgtgtatgatgtgccaaatcataaagttctgccttcacagctacaagcacttaaggcagccattcatgctattgaggcacacatgcctgaagcagcgtttgctggtttgtggatgaagtcttcgcacaagctgtgggttaagcggctgcgacgaacgtcatctttggcagagcttttacaggttcttgttgattttgtgggggcaatggatgaggattggctgtacaaaagttcatcatctgtaagcttttgttcgtatttggatgacattgtcatatacttccaaacaatgccacaaacaacatcagcagttgcactgtgggttgttaaattggatgccctcatcacgccttatttggaaagagctgattctgacagagcattgggcgaagagtctgtgcagacaagaacgcgagcatgcggtgagatagctaggaatcgatgatggaattctttcttttgtggtactccaagcaaagcacccagctgacacgttctttctcatcaactgcaagtttttttgtttgattgtcgagcttttttctcaagactgagacaaccataatgtctcttccttgagcatcaggccttagcagaagccatggcttcctagttctgctggatacctggagaacatccttgttcccacccaacagaaagtcgtcccttatgtacaatagtagacaggaaaaaaaaggcttttttttgttaataatcattgcttcccccatgtgaatttttttgctcccaacattagtgatcacgaggaatactaaaaacttctatataggtcattgccggatagatgatgtatgttgttcatgaactaaggcgaccccttttgatgcaataagagggtcagatatctcctttttgatcggttaaaaaaaaaaaaaaaaaa

SEQ ID NO: 21663 - DNA, 599 bp, Oryza sativa
  unsure (1)..(599): unsure at all n locations
  Clone ID: TF_LIB3598-004-P1-K1-B9
gcgttcgcagctagctagctgggctaggatgggggtgggtcggggtgaccaccaccacctccagcagcagcaccagttcttgatgccaccgcctgcgccggtggtgccgccgcagctgtgcatgccggcgatgatggcggacgagcagtacatggacctgggcggtggcggggcggcngcggcgcggggggggggcggggccggggagaggaagcggcggttcacggaggagcagatacggtcgctggagtccatgttccacgcgcaccacgccaagctggagccccgcgagaaggcggagctggcgcgcgagctgggcctgcagccgcggcaggtggccatctggttccagaacaagcgcgcgcggtggcgctccaagcatttcgagcacgactacgccgcactccgctccaagtacgacgccctccactcccgcgtcgagtccctcaagcaagagaagctcgctctcaccgtccagttgcacgagctaagatagaggctgagggaacgggaggagaggagcggcaacggtggtgccgccacgacggcagcaagcagcagcagctgcaacggatcaggcagcgaggaggtcgacgacg

SEQ ID NO: 21664 - DNA, 708 bp, Oryza sativa
  Clone ID: TF_OsC52478_2
ttggtacggacgcgcacagctagctagctgggctaggatcgccatggatcggggtgaccaccaccacctccagcagcagcaccagttcttgatgccaccgcctgcgccggtggtgccgccgcagctgtgcatgccggcgatgatggcggacgagcagtacatggacctgggcggtggcggggcggcggcggcgccggggaggggcggggccggggagaggaagcggcggttcacggaggagcagatacggtcgctggagtccatgttccacgcgcaccacgccaagctggagccccgcgagaaggcggagctggcgcgcgagctgggcctgcagccgcggcaggtggccatctggttccagaacaagcgcgcgcggtggcgctccaagcagctcgagcacgactacgccgcactccgctccaagtacgacgccctccactcccgcgtcgagtccctcaagcaagagaagctcgctctcacccagcggcgcgagctgattatgcttccgggaggcgaggacggcggcaagcaccgcggcgccaccgccgacgaggaggccgccgcgaccgcggcctcgctgaacgacctatgcgccaccgccggggatgcgggggggctccccgcgctggcgccgttcccgagggcggcggctcgtcctcgccgtcgtgcacagcgccgcactgctcgtggtggccgtgctcctctccg

SEQ ID NO: 21665 - DNA, 3819 bp, Oryza sativa
  Clone ID: TF_OsC42451_1
atggcggcggcggtggcgatgcggagcggcagcggcagcgacggcggcggcggcgggtacgacaaggccgggatggactccggcaagtacgtgcggtacacgccggagcaggtggaggcgctggagagggtgtacgccgagtgccccaagcccagctcctcccgccgccagcagctgctccgcgactgtcccatcctcgccaacatcgagcccaagcagatcaaggtctggttccagaacagaaggtgccgagataagcagcggaaggaggcatcaaggcttcaggccgtgaaccgaaaattgacggcgatgaataagcttctcatggaggagaatgagcgtcttcagaagcaggtctcccagctggtccatgagaacgcgtacatgaagcagcaacttcagaatccgtcattgggcaatgatacaagctgtgaatcaaatgtgaccactcctcagaaccctctgagagatgcaagtaacccgtctggactccttacaattgcggaggagaccctgacagagttcctctccaaggctacagggactgctgttgattgggtgccaatgcctgggatgaaggttgattgccaacttctcagattcactctgcctgcatcaaatgaccctggtccggattcgtttggtattgtggccgtttcacatggttgccgtggtgttgctgcccgtgcctgtggtttggtgaatctagaaccaacaaagatcgtggagatcttaaaagaccgcccatcttggttccgtgattgtcgaagtcttgaagtcttcacaatgtttccagctggaaatggtggcacgatcgaacttgtttacatgcagatgtatgctcctactactttggttcctgcacgagatttttggacacttagatacacaactacaatggaggatgggaggcttgtggttcccgtcctcgctgatgatgacgcagcggttgctcgccacgcacctctggtaatgaggagtaacagaaaggctggcatcgactttgtagacccccgagctactttctgtcctgaggcggcaatgttagtgctgagtgtgcctactccagcaggggttcgagttctgagggagcatggctctgaatgggccgattacaagactgatgcagatctggcttcagctctgaaaacaagtgcatgttcacctccagggttgcgacccaggagattttctgggagcagatcattaagtggttctgggggcggtcttagtactgcctcggttcaggaagttgtgagagttgagatgcttcccagcttatacatggtgcgcccatgcgatcgtgggggatccatcgtgcacattgtggaccagcagcagccggggaggtggtgggatcctcctttccgcttggctctgcaccgattgatgatttcccagatgaaactccattgatttcttctggcttccgtgttataccacttgatatgaaaacagatggtgcatcctctggtaggacattagatttggcatctagtcttgaagtaggttcagcaacagctcaagcctccggagatgcatctgcagatgattgtaacttgcgatctgttctgacgatcgcttttcaattcccttacgagttgcatctccaagacagtgttgcagctatggctcgccaatatgtccgtagcattgtttctgctgtgcaaagagtgtcaatggctatctctccctctcaaactggtctaaatgccggacagaggataatctctggtttccctgaagcagcaacccttgctcgatgggtttgccagagctaccattaccatctaggggtagagttacttagtcaatcagatggagatgcagaacaattgttgaagatgctatggcattaccaagatgctattttgtgctgctcattcaaggaaaaaccggtgtttacatttgccaacaaagcaggactggacatgctagaaacttcccttgtcgccttacaggatctggatcttgaggctttgtttgttccagatgtgcttcggccactcttcgagtcatttagggtagttgctcagaaaatgactactgcagcactacggcacatcagacaaattgctcaagagacaagcggggaggttgtttacgctttggggaggcaacctgctgttttgcggacatttagtcagaggttgagtagaggcttcaatgatgctataagtgggttcaatgatgatggttggtctgtcatgggtatggatggcattgaagttgtgatcattgcttgcaatgcaaagaaggttaggaatactagcacttcggccaatgcttttgtaactccaggaggtgttatatgtgctaaggcatccatgctactgcagagtgtcccacctgcagttttggttcgatttttgagggaacatcgttctgaatgggcggattataacttcgatgcatattcagcttcatctctgaagacaagctcatgttcacttcctgggttgcggcctatgagattttctgggagccagatcattatgccacttgctcacacggtggagaatgaggagattttagaagttgtccgtcttgaaggacaagcacttacacatgatgatggtcttatgtctagagatattcacctgcttcagctttgcactggaatagatgagaaatcaatgggatcctgcttccagcttgtctctgcaccaatcgatgagcttttccctgatgatgctccgttaatatcttcaggctttcgtgttataccgctggacatgaaaacagatggtacacctgctggtagaacattagatttggcatctagccttgaagttggttcaactgcacagcccacaggggatgcatctatggatgactgtaatctacgatcagtgctgacaattgcctttcagttcccttatgaaatgcatctccaagacagcgttgcaactatggcccggcaatatgtccgcagtattgtttcctctgttcagagagtatcaatggctatttctccttctcggtctggcttgaatgctgggcagaagataatttcaggcttccctgaagccccaacgctagctcgttggatttgccaaagctaccagttccatttgggggtggagttacttaggcaggcagatgatgctggggaagcactattgaaaatgctatgggattacgaagacgctattttgtgctgttctttcaaggaaaagcctgtgtttacttttgccaacgagatgggactaaacatgctagaaacatctctcgtcgctctccaagatctctcactggacaagatatttgatgaagccggtaggaaggccctatacaacgagatcccgaaattgatggaacagggttacgtgtacctgcctggtggagtgtgcttgtccgggatggggcgccatgtttctttcgagcaagctgtagcatggaaggtgctcggagaagacaacaatgtgcactgcctcgccttctgcttcgtcaactggtccttcgtgtgacccaaaatccaatccaccatgctcgcagtcatcgtcgttgtcgtcagatctccattttttgcaatctctgtagaagagaggacaccaaaccaaccacaaacctgtcagctgttagctaatgattctactagcttttctagatctttgaaggcaaaatgctgccggtgcctgtaaaaagtgtgtgcgtgcgtgtgtaaatttgggcgcgttttgcactaatttgatctggggtaaggaggcgctggctgctgctgtgctgtagtttggtaaaagttgagtacactaaccttggatggtctcgaactgtatgatgaaattcctagcagtaaaatttcaacttggatccgtg

SEQ ID NO: 21666 - DNA, 1185 bp, Oryza sativa
  Clone ID: TF_OsC2118_1
ggctctgagcgagagggccagccacgcacgcacgcacgccaccgcgctccattggccaccccctcgccatcgccacgattaaactactctcttgctactccccctccatccatccacacactccaccatttcctcttcttcttcctccatatcacacggttttcgtccatcgatcatcagagctcgatcgggcgccatggatggggaggaggacagcgagtggatgatgatggacgttggagggaagggcgggaagggcggcggcggcggcggcgcggcggacaggaagaagcggttcagcgaggagcagatcaagtcgctggagtccatgttcgcgacgcagaccaagctggagccgaggcagaagctgcagctcgccagggagctcgggctgcggcctcgccaggtcgccatctgcttccgcagcaagcgagcgcggtggaagtccagggagctcgaacgcgcgtacttccccctccgcgacgcctacgacgccctcctctggacatacgagtcccttaacaaggagaagctcgccctcatcaagcaggtggggaagctggtggagaagctggaggaggcgcggggaaagcacggagatagagccggggacgacgcgcggtcgggaggcctcgccggcattcagaagcaggagctcgtccctccggacggagccgccagcctccactaatcggccgagggtggcgggacgtcgtccacggagcagacctgcagcagcacgccatggtgggaattcgagagcgagtgagcatccacactgttactactaggctactcatggatgatccatcgatcgccacagatcatgcatgccacgatcagaatttcaattcgccgcgaggacggatcaaacctgtactagatcggatcagagcaaacatagcagagaagatgatcaaaccaacagtgatgtgtacatagatttctgtagatcaaaaccccaggcagtctcctctccatccagccatcagcatgcgaaaattctctctcttttttttcccctccaagtcttactcgacttcgatgttgttatcacaacaccacatcatgtaatccagcaacacgccgagatgaaaaaaaggttaaaaagcttatagagttcgttcatttgatggatccaaaaaaaaaaaaaaaaaaaaaaaaaaaaaaaaaaaaaaaaaaaaa

SEQ ID NO: 21667 - DNA, 1459 bp, Oryza sativa
  Clone ID: TF_OsC1620_1
tagtggatccccgggctgaggctttcccctgcagatatcacaagctgaagctgctgcacctgcacacgccttctctagttctctccagcttacagctagctgcagtgcaagcagctgctgaattcccccatgagcctctgcctccctgcctgcccccgtatgtagcaagaacaagaacaccagcgagtaacacaggctcgctacagtggtactagattaccgcttgtgcgggcatagtgatcgtctatagttgtgaattgtgatgcagcagcataggtggtgagctgctgctgctggtacgtagatggaggatctgtacagcatccacccggggatctcgcgggtcggcggcgcggcgagcgaggcgtccggcgtgggcgtcgtcgtcggcggcggcggcgggtcgtcgtcgtcggatctgacggagctcatgaaggctcagatcgccggtcacccgcgctacccgaccctcctctccgcctacatcgagtgtcgcaaggtgggagcgcctccggaggtggcgtcgctgctgaaggagatcggccgggagaggcgcgccggcggcggcggcggcggcgccgggcagatcggcgtcgaccccgagctcgacgagttcatggaggcgtactgccgggtgctggtgcgctacaaggaggagctgtcccggccgttcgacgaggcggcgtctttcctcagcagcatccagacgcagctcagcaacctctgcagcggcgccacctcgccgccggccaccaccgccacgcactccgatgaaatggtggggtcctccgacgaagaccagtgctcgggggagactgatatgctagatatagggcaagagcaaagctcccgcttagctgaccacgaactcaaggaaatgcttctgaagaagtacagtggctgcctcagccggctccggtccgagttcctgaagaagcggaagaaagggaagctaccaaaggacgcacggtcggcactgcttgaatggtggaacacacactaccgctggccatatcccacggaagaagataagctgaggcttgcagcgaggacaggtcttgacccaaagcagatcaacaattggttcatcaaccagaggaagaggcactggaagccatcggacgggatgcggttcgcgctcatggagggcgtggcgggtggatcgtccgggacgacgctctacttcgacactggcacaattggaccatgaattcatttttgagcaatgccgcctcttgagaaaattggccatttaggcagtaatagtaggacatggtatttggtggtgattgtgtctagctatgatcaatctttcagcaggtcagtgttattcagttcagggtaaagtaattgcctcattgttttggcagatcatgtgtatatggcatcgtaccaaatcaaaatgtataatcgttaggtaatatatatcttggggagacctgaaaaggctgttattagt

SEQ ID NO: 21668 - DNA, 2546 bp, Oryza sativa
  Clone ID: TF_OsC1034_1
ccggccgggacggggaaatacaacagaatcgaaatacagaatactgggataacgacacactgggagtcacttgcaacctttagggttgaatctccggagatggaaatgaatcaacagcataatgagggcaacgaatctttcgtggccttgatgaacggttttgctggtgacgggacggcaacactaccgaatgatggggagcagagaatgagtattccagcaagagaattatttgcagcaattgaggccgactcaggcttgttgcctgtgaacagtagcaacactaatgaaaaaaggaagaggcgtctacagaggctcactggcaaacagtcggaggtacttgaggggtttttcagcatctgtgggcatcccgatgatggacaaaagaggcatctgagtgagacaacaggtcttggtttagatcaagtgaagttttggtttcagaataaaagaacacaagtaaagactatgtgctggaaggaagagaactataagttgtcggtggagaatgaaattctgagggatgagaacaggagagttaagatagctcactgcactgctgtatgcctcacttgctgtaattcatcagtacagaaccagcttgccgttgagatggaaaggttaatggggcagagtgagtggctgcaacaagagattgcacggtcgaatggaacacccccggctgcaaaccttgcctttcaacttaattcatcagcagactatgtattttcagggcaacatgaccaacaaatgattgctgaactagccaaaaacgcaatgcacgcattgattattttggccgaatcccatgtcgctctatggtttcccgtccctggctgttcttatgaagtattgaacaagatggcttatgaccaagcatatcctggggataacagtgcaaacgccattggattcaagacagaggctactcgtgcagtttctatggtgatgatggactacaaaagcgttgtggatttcctcatggatccttacaactaccgaactttctttcctgaagttatttccggggcagtaaccaacaggatctacacgtggcctaccagtgatggttataatggggttatacaactgatgactgtcgagatgatgttcccatcgcccctggtaccggctaggaaatgcacattcctgcgctattgtaatgtgctgaacgaaggattagtggtcgtcattgatgtgtcattggacgatggcagtatcttctccaaatgccgtaaaatgccatcagggtttctgatccaatccataaggccaaacagctgcaaggtcactgccatagagcacgtccttgcggatgacaccggtgttcatgagctctaccagcctcgtgtgaatggactcgtcttcggagctcggcgctgggtggcgaccatggcgcggcagtctgcacgcatgagagatgttcatcacaacaagacagctccgcaagtcagcacgaaggggaggaagaatctaatgaagctagcggacgacctgctcgcgagcttcgccggcggcatcgccgccactggcggaggaacgtggaccgtcgtgatcggcgccggcacggagaaggacatcagggtcgcgtacaggaggaccaccgagggcagcagcagctacaacgcgatcctgtccgtcaccgcgtccctgcgtctgccgctgcccatgaggaaaaccttcgatctgctcaggaaccttactcaccgctgcaagtgggacgtcctggtgcacggcagcgtggtgaaggaggaggtcaccatcgccagaggcgtcgggaacgacgacactgtcaccgtcctccactgcaagcgcgccggcagggaggacaggggaaggaccatgatcctgcagaacaacgggtacgacgcgtcgggctcgttcatggtctactcccagatcgacagcgagctgatgaacaccatggtcctgagccccagcgacctgccgcccgggcggggcgggccgtccctctaccccaccggcttctcccttctccctgacgtcgaggctgcccaggacagcagcggcatcgccctcggcgaggttgggggaactctcatgaccatgggcttccagattccggtgaagctcgccagtggggatcgcatgtattcccggtctgcggcatcggcaatcaggctcatgactgacaccattgccctcgtcaagaagacgctgatgaacgagcattctggtatctacggggttagcccgttccacccctagattcagaaaaacaccagagggagaaaagggaggtccgtgtgcagataaaaatcaagaacatgcgaaggggattcatcggctccgatcaccctgcatctcccagaatttgctgaattaattagaactttaaggttgtgttaacaacctgtaataatgtttttaaggccaaacttatatcgtgtctttgctgtaataatgtagtatgcgcctgatggatgtcgactgccgtgtaccgatgcagtttgcttcgcagagacgcggatacatttgctatcgtatggatgctcctttagaagcaaaaaaaaaaaaaaaaaaaa

SEQ ID NO: 21669 - DNA, 2181 bp, Oryza sativa; identical to SEQ ID NO: 12117
  Clone ID: TF_OsC1034_2

SEQ ID NO: 21670 - DNA, 1347 bp, Oryza sativa
  Clone ID: TF_OsC244_3
atggatctcggcctcagcctcggcctcggcctcgcctcgcagggcagcctcacctcctccaccaccaccacctcctcccccggcgccggatcatcctccccgtgggccgccgcgctcaactccatcgtcggcgacgtgaggcgggatcaggccgcggcgcatgctgccgcggcggtgggggttggggttgggggcgaggagatgtaccaggggagggcgtccacgtcgccggacagcgcggcggcgctgtcgagcgcgagcgggaagagggagagggagctggagcggtcgggatccggggttgacgacgacgacggcgcggacggcgccggcgggcggaagaagctcaggctgtccaaggaccaggccgccgtgctcgaggagtgcttcaagacgcactccactctcaaccccaagcagaaggtggcgctggcgaacaggctggggctgcggccgcggcaggtggaggtgtggttccagaaccggagggcgaggacgaagctgaagcagacggaggtggactgcgagtacctgaagcggtggtgcgagcgcctcgccgacgagaacaagcgcctcgagaaggagctcgccgacctcagggcgctcaaggccgcgccctcgccggcgtccgcgtccgcgatgcagccctcctcctccgccgccgccacgctcaccatgtgcccctcctgccgccgcgtcgccaccgccggcgcgccgcaccagcctaaccaccaacaatgccatcccaaatctaacaccaccatctcctcctcctccaccgccgccgccgccgtcgccgtcgccggcggcaacgtgctgcccagccactgccagttcttcccggccgccgccgccgccgccgaccggacaagccagagcacgtggaacgccgccgcgccgctcgtcaccagagagctcttctagaaacaatccatccatcgccatgacaaacttgggaaaggatcaagctttgattggtcaagacagtgtttttaccaggtggtgatttggttaattaattaattataattaatcactcaaaaggaggggattaattgccttgatttggtacctaattactagtatgattagcagtagtagtagtagcacaaatttggtttggattaattcagtttgattccatgatatgaacaaaggaacaaagcaacaaaaaaatggccgtctgctttttcttggacggcattcttatatgtaccaattcaccaaatctgctggttggtggattaacagcttgataattggtatattgattgtactactaccactaattgattgaattatgagaaaagttaatgaaatcaaaaaaaataaaacagcaaaacaaaa

SEQ ID NO: 21671 - DNA, 1029 bp, Oryza sativa; identical to SEQ ID NO: 12116
  Clone ID: TF_OsC157633_1

SEQ ID NO: 21672 - DNA, 2346 bp, Oryza sativa; identical to SEQ ID NO: 12126
  Clone ID: TF_OsC775_2

SEQ ID NO: 21673 - DNA, 1858 bp, Oryza sativa
  Clone ID: TF_OsC1920_2
ttgacgcctgggcggacgcgcgtaaaaatcccaaaaacaaaaaataataaaaaaaaagaaagagagagacatttcgcatctgctgccctgcctcctctcccatcacctgcccattttttcacattgaggcccctctgaaaatattatatttacaactaggtccctggccgggccggccggccaccggaaggagcacctcgccggagaaggctttgtctcttctttttcttctcctcctcctcctccatcggcggcggcatggggttctcgctgtaccccatgaagacgtcgacgcgcatgctgtggagcaccagcttcttccgccataaggtcgcctcctccttctaagcccacgccctctcgggcggcggcggcgagccggcggcggagcgcgcggttggtaggtgcgcgtgcgtgcgtgaacgggagagcagcttcgagatcgggttttcttgggttcttggagaagggaggagaagagggggaggagagcatggatcccggccgcgtcgtgttcgactccggcgtggcgcggcgggcgtgccccggcggcgcgcagatgcttctcttcggcggcggcggcagcgccaacagcggcggcttcttccgaggcgtgccggcggcggtgctggggatggatgaatcgcggtcgtcgtcgtcggcggcgggggcgggggcgaagcggccgttcttcacgacgcacgaggagctcctggaggaggagtactacgacgagcaggcgccggagaagaagcggcggctgacggcggagcaggtgcagatgctggagcggagcttcgaggaggagaacaagctggagccggagcggaagacggagctcgcccgccgcctcggcatggccccccggcaggtcgccgtctggttccagaaccgccgcgcccgctggaagaccaagcagctcgagcacgacttcgaccgcctcaaggccgcctacgacgccctcgccgccgaccaccatgccctcctctccgacaacgaccgcctccgcgcgcaggtaatctcattaaccgagaagctgcaagacaaggagacgtcgccgtcgtcggcgaccatcaccaccgcggcgcaggaggtcgaccagccggacgaacacacggaggccgcgtcaaccaccggcttcgccaccgtcgacggcgcattggcggcgccaccgcccggccaccagcagccgccgcataaagatgatcttgtgagcagcggcggcaccaacgacgacggcgatggcggcggcgcggccgtggtggtcttcgacgtcaccgagggcgccaacgaccgcctcagctgcgagtcggcgtacttcgccgacgccgcggaggcgtacgagcgcgactgcgccgggcactacgccctctcgtcggaggaggaggacggcggcgcggtcagcgacgagggctgcagcttcgacctccccgacgccgccgccgccgccgccgccatgttcggcgccgccggagttgtgcaccacgacgccgcggacgacgaggaggcgcagctcggcagctggaccgcctggttctggagctgatcgatggaagcatggagcattggagccatgctatcaatgaatgaatgaatcaaatgaccttgagaccctcctctccgtcctttcttttgccctatttttaatcgctgttatatgttaattatgtgcaattaaagtgtacgtgttttgtcgtaagttgtgtttgttcaaattgtatgttttgaaggtgtcatgtattcatacacgatatgatatatagacgggatcatgaatgatactcggaaagattggaataattccatgtagtgttgagcaataataaacattttcctccgataagatgtttttatgatt

SEQ ID NO: 21674 - DNA, 597 bp, Oryza sativa
  Clone ID: TF_OsC434_3
tcgttctcgctacctttcccttcccacctcctcctcctcctcctcaccaccaccacgcgcctccgctcgcaagaagcacctccgaccgccatggcgcgcgcgggagctggcggcagtctctccctggaggcatgacgcggcggcgcccgtggccgtggctcctgttgctactactgcgaccaactactgcgctcggtcggcggtggtggtggccctggtcgtcgtcgtagcgcgtcggcggaggcgggagaagaaggagaagggtcgacggggatggcggcggcgatggtggcggcggtgcatggagtggggaggcaggacaggtcgtcgcctggcggcggaggggcgccgcaagtggacacgggcaagtacgtgcgctacaccccggagcaggtggaggcgctggagcgggtctacggcgagtgccccaagcccagctcgctccgccgccagcagctcatccgcgagtgccccatactcagcaacatcgagcccaagcagatcaaggtctggttccagaaccgcaggtgccgcgagaagcagcgcaaggaggcatctcgcctgcaaactgtgaaccggaaattgactgcgatgaac

SEQ ID NO: 21675 - DNA, 1269 bp, Oryza sativa
  Clone ID: TF_OsC52478_1
gcacgagtggctcgcccggccttacattcgacgaactgatcgaatggagatgagcgaccgccaccgccgccggcagccgcacaagttctagacgacacggccggcgccggtggagcagccgcagttctgcatgcggccgatgatggcggcggagcagcacgcggccctgggcggtggcggggcgacggcggcgccggcggcggcggtggcggggagaggaagcggcggttcacggaggagcaggtgcggtcgctggagacgacgttccacgcgcggcgggccaagctggagccgcgggagaaggcggagctggcgcgggagctcgggctgcagccgcgccaggtggccatctggttccagaacaagcgcgcccggtggcgctccaagcagatcgagcacgactacgccgcactccgctccaagtacgacgccctccacgcccgcgtcgagtcgctcaggcaggagaagctcgccctcgcagaccaggttcgtgcgccattgccgaccaatcatcagctaagagagaggctgagggaacgggaggagaggagcggcaacggtggtgccgccacgacggcagcaagcagcagcagctgcaacggatcaggcagcgaggaggtcgacgacgacaagaggaatagcgtgatgaacgcgagcagcagcggcctcgtggaggaggactacgtgagctgcctcgcggtgccggtggtggacgtctcggaggacggctcggcggcgtgcggcgggtcgtcgtacgagtacgaccatcacctagactacttgggcggcggccagctgcccgatccgttctgcggcatgccggatctgtgggagatatggccaatggtggaatggaacgcagtagcatgaaagacagagagtagtatattaccctaggttaatttgtgtgtacatgtagcttaaagtacgtggatcacgtctcctcgactgatctgccgtctcccttggacagagagggaaaagagggccgtggcaatgacgtgtggggccggtttgtagattggggttgcaagaggaatctcgttggagtagtggtggtggaaaccttggaagcaattaagccaatggactttgtgttttggatggtgctaaaatggagaaaactagatcgagctcattggaagagttgcataggaattcaagcatcttttgtggtcacttcgaattcggatttagtagtaatctattcgaaagatgttcaattgacgatattattaaactagttttatatctaaaaaaaaaaaaaaa

SEQ ID NO: 21676 - DNA, 1373 bp, Oryza sativa
  unsure (1)..(1373): unsure at all n locations
  Clone ID: TF_OsC1920_3
tcgcttagagaagcatctgcgcgccgccggggcacgcccgccgcgccacgccggagtcgaacacgacgcggccgggatccatgctctcctctccgacaacgaccgcctncgcgcgcaggtaatctcattaaccgagaagctgcaagacaaggagacgtcgccgtcgtcggcgaccatcaccaccgcggcgcaggaggtcgaccagccggacgaacacacggaggccgcgtcaaccaccggcttcgccaccgtcgacggcgcattggcggcgccaccgcccggccaccagcagccgccgcataaagatgatcttgtgaatggccagcaatggcgccgccgccggcgccatggccccgttcttcccgcccaacttcctcctccagatgcagcagcctctccccctccaccaccagcacctccaggaccacgcccatggcggccacggcggccaccacctcctccctcctcctcctccctccctctcccccttcctccccgacctcgccatggacgcgccgccgccgccaatgtacgaggcgagcggcggcgatggcggcggcggaggggcggcgtcggaggatgaggaggatgggtgtggagggggagggggtgggggtggtggggagaagaagaggaggttgagcgtggagcaggtgaggacgctggagcggagcttcgagtccgggaacaagctggagccggagcggaaggcgcagctggcgcgcgcgctggggctgcagccgcggcaggtggccatctggttccagaaccgccgcgcgaggtggaagacgaagcagctcgagaaggacttcgacgccctccgccgccagctcgacgccgcccgcgccgagaacgacgccctcctctccctcaactccaagctccacgccgagatcgtggcgctgaaggggggagcggcggcggcggggggaggagggagcagctgcaggcaggaggcggcgtcggagctgatcaacctcaacgtcaaggagacggaggcgtcgtgcagcaaccgcagcgagaacagctccgagatcaacctcgacatctccaggccggcgccgccgccgccgccgccgccggccaacgagagccccgtcaaccgaggcatcccgttctacgcctccatcggccgcggcggcgcaggcggcgtggacatcgaccagctgctcctccgcggcggccactcgccgtccccggctgccgtgacgacgccgccgccgcccaagatggagctcgggattacaggcaatggcggcggcgcggacgccgccgccgccggcgcgggcagcttcggcggcctgctctgcggcgccgtcgacgagcagccgccgttctggccgtgggccgacggccaccaccacttccattaa

SEQ ID NO: 21677 - DNA, 3516 bp, Oryza sativa
  Clone ID: TF_OsC1920_1
ctcgccttcctcgcttgatgagctaaggagatcgagttgaggacaatggccagcaatggcatggcgtcctccccttcctccttcttccctccgaacttcctcctccacatggcgcagcagcaagcggcgccgcctcacgacccgcaagaacaccaccaccaccaccaccatggccaccatggccaccaccatgagcagcagcagcagcagcagcatcaccaccacctgggtcctcctccgccgccgccaccgcacccgcacaacccgttcttgccgtcctccgctcaatgcccgtccctccaagaattccgaggcatggcgccaatgctggggaagcggccgatgtcgtacggcgacggcggcggcggcggcgacgaggtgaacggcggcggcgaggacgagctgtcggacgacgggtcgcaggccggggagaagaagcggcggctgaacgtggagcaggtgcggacgcccgaccccgcgcgtccgcccacacgaccaaaatattataggaaataaaaaataatttcctggttagaataaacacatttttaaaaaaaccaagaaaagattttcctcttctgttacattccttcttccttctccggccaccggagccgtagccgaattgtgcctcttctccggcgaggggagagggagagagggggtgtgagttttgctccttccggcgagtggtctcctccccgcgcggctgaggagatctctcgggacatcggggttggggcggcgtgcatgatggggttctcgctcacgccgatgaagatctccacgaggcttctgtggagcaccagcttccttccgccacaagatcgccgccaccatcgcgtcctcctcctccttcttataagatcatcttctccgccacagcaatctgtaaatatatacacatcgaacgcgacaagcgcgtttgattgattgggatttttctcccctgtcctcacgacaagtaattaaggggcgcgatctcgatcgctagcgttgggaggttgatacgcgatggggtccggccggctcatattgagcacggcgggcgccggggccgcgcagaggctcttcctcggctgcggcgctggcggcggctggagcggagggatggacggcggcaggactatgagccatcgaaggacgaaatgagtgaatcgaatgactggaggccctcctgtcgttcctttcttttgccctatttttaatcgctgttatatgttaattatgtgcaattaaagtgtacgtgttttgtcgtaagttgtgtttgttcaaattgtatgtgctggagatgaccttcgagcacgggaacaagctggagcaggagcggaagatgaagctcgcccgaaagctagggctgcagccgcggcaggtcgccgtgtggttccagaaccgccgcgcgaggtggaagacgaagcagctcgagcgcgacttcgaccgcctcaagcggccgctcgacgccgtccgcgccgacaacgacgccctcctcgaggacaacgagaacctccacgccgaggtcatgtcgttgaccgagaagctgcaagagaaggagacgacgaccgagggcagcgccggcgcggccgttgacgtcccgggcttgcctgcggcggccgacgtgaaggtcgccgtcccggacgccgaggaaccggcgctggaggaggcggcggcggcgttcgaggagcagcaggagcagcaggtgaaggccgaggacaggctgagcacgggcagcggcgggagcgcggtggtggacacggacgcgcaactggtggtcgggtgcggccggcagcatctcgccgccgtggacagcagcgtggagtcgtacttcccgggcggcgacgagtaccacgactgcgtgatgggccccatggaccacgccgcggggggcatccagtcggaggaggacgacggcgccggcagcgacgagggctgcagctactacgccgacgacgccggcgtcctcttcgccgaccacggccaccaccaccaccaccaacacgcggacgacgacgaggaggacggccagcagatcagctgctggtggatgtggaactagatttctcgcgcgcgcgcgcgcgcgcgtcgtcgtgcattcaattctcgtgttaaaaaaatcgttctctttttcatttttccgcttctttgtctgtaatgttgagtttcgatcggctatgagaaggaaggaggtgtatgcatgtgcatggtatggtagggtaacacatcggtgaatcaaatctgtcatggtgatgtacgagaattgaagaacatgggggtagcaataagtgcatggaggcaagtactcttttcaatggcacataccaaatcatgtcgtcgaattgagatttttattagtcttgaattcttcttgaaaaaaaaaaaaaaaaagaacggagatccatgtgggtttcagtgttggcagaaaggttgttggaatcggtgacatgctcaccaatgcaaatagtggcgctgaaggggagggaggcggcgtcggagctgataaacctgaacaaggagacggaggcgtcgtgcagcaaccgcagcgagaatagctccgagatcaacctcgacatctcgcgcacgccgccgcccgacgccgccgcgctcgacaccgccccgaccgcgcaccaccaccaccatggcggcggcggcggcggcggcggcggtggcggcatgatcccgttctacacctccatcgcccgccccgccagcggcggcggcgtcgacatcgaccagctcctccacagctcgtcgggcggcgccggcggacccaagatggagcaccacggcggcggcggcaatgtgcaggcggcgtccgtcgacacggccagcttcggcaacctgctctgcggcgtcgacgagccgccgccgttctggccatggcccgatcaccagcacttccactgatcgatcgatccatggatccaaccaaccaaccaaacaaccattggcaacaacaaactatcttgcagtgatgaagcgatcgacagtatgtacggggtgatgaattaacgatgatcacacaccaacgcaagcgcatgcacgtgtgtggaagattcagacgcatgcatttggattaattcttggagagatcgagcaagcttaattgggaagaacaatgagaaggttgtgtatgatgatgatgctagctacgagtattgaggtgatgaatgcattgaatttttctcttgggtttgaagaggatatcgaatcgaaggaacttgtagatgaataagcgagtgagatggaacgacgtacgtagggttagattttggagttcagtagtagtatattctgtcactttttatctattttttttatttattggggtcttattttttcccctttttctttacatacataaatttgtgaactttgtcagccagtgtttgttgtgtataggtgcatggtgattcttctttcttcccctaatctgtgtggatcatgtccctgtgttgaaaaaaatgttcattaaatttcgctcaagcaatctcacaattccgttgtaccctaaaaaaacaa

SEQ ID NO: 21678 - DNA, 3058 bp, Oryza sativa
  Clone ID: TF_OsC2076_2
tgtagccccttggtcaaagcatttatcaactactgacctgcgattatcaacaccaatttatcatgttattgagttaggatttattaggaccccaccatttcccagagacaaaaacttcttttgatctattggggtatttccaacagataacgatttatgctgcatctgcgcagtaggctctttctaccaatgttaagagtagtgcggtcaggaatagctacaaacaaattgttaaaaggggtaggaaaggctccgaaatatcaccaagtaaaacatatcccctgagatcgactcatagtaatgtaatgatgcttcgcggtgcctcaaaaaggaatacttagtaacctaatgtgcccacaaatgagaatactggtatccaacgagttgcgaactaaaggtgtacaagctaacacttgacgccttcaccttgcagagcgcttagatgaacctggaaaagtaagaattagacacataataagcttcgaaatgatggtgctggtgttcaaccagccgaaaagaaaagaaaggtaggcagacccccaaaaggaggaactcccaaggacgattacctcatgatccgaaagcgagttagatatgttttgaatcgaatgaactatgaacaaagtttaattcaagcctatgccagtgaaggttggaaaggtcaaagcttggaaaaaataagacctgagaaggagcttgaacgagccaaggtggaaattctgcgatgcaagtcaagaatacgggaagcttttcggaatttggattccctcctatctgagggaaagctggatgaatctatgtttgattctgctggagaaatatctagtgaagatattttctgtgctgcatgtggttcaaaggatgttacattaaaaaatgacataattctttgtgatggaatctgcgacagagggttccaccagtattgtttaaaccctcctttgcttgctgaagatattccacagggggatgaaggatggctttgccctgcatgtgattgcaaaattgactgcatagatgtattaaatgaactccaaggggtcaaactctctatccatgactcttgggagaaagtttttcctgaggcagcatcctttttgaatggttctaagcaaattgatgcgtccgatcttccatcagatgattcagcagacaatgattatgaccctactttggctcaagggcacaaggtggatgaagaaaaatcttctggagaagatggtggtgaaggattagattctgatgactcatcttctgaggattctgaatcttctgagaaggaaaagtctaaaacttcacagaatggaaggacagttgatgatcttggtttgccttctgaggattcagaggatggtgactttgatccagcaggtccagattccgacaaagaacaaaatgatgaatcaaactcagatcagtcagatgaatcagattttacatctgactctgatgatttttgtgctgagattgctaaatcctgtggtcaggatgaaatctcaggcccttcatcatcacaaatcagaacagtcgatcgcaccgatggaagtggttttgatggtgagcctaatgcagaaaattcgaatcttgcatttatggagacagagctagagcaagacatggtgctaccaatttctagtaaacgacaagttgaacgtttggattacaaaaaactgtataatgaggcttatggtaaagcatcatctgattcaagtgacgatgaagagtggtatggaaatagtacacccgaaaaaggtaatttagaagacagtgaaacagattcgcttgctgaatcacctcagggtggaaaaggattctctagaagagcaccagttaggtaccataataatgaacatactccacagaatgtaaggcccggtggttcagtaagcgaccagcaaactgaagtactttgctccaatagcaatggtagcacagccaaaaacagacattttggtcctgcaattaatcagaaactgaaggcacatttcaaggaagatccataccctagtcgtgcaacaaaagaaaatctggcacaagagttaggcctcacatttaatcaggtcactaaatggttttccagtactcgtcattacgcaagagtggcagccacaaaaaaggagaacaacattgaaaatcatacggctgagaataataacaataccaacactgttgatagcatacaactgagaggatccaatgatattgttagtgtagatagaaatgatatggtctccgaggaaaggacaggacaaagtaatctcaatgaaggtactccattaagatcagataccagctgtgggcagagtgtggctgtgactcctatggtacacccagaaaaccagggcaatgattcctcaagtaatgttagaacaccaaatgctaagtctgcggagaaattgatccctggactggaaaattcagatgaggctaggcgaaaggcggtacaacgggaactgagaaagatgaagactggcaggtgaaactccctagtgttcgagttatttgaccagatgtgcagagaagcaagtttttgtatgctgcctagattgcttttaatcagatgtgcagagaagcaaagattttttttccttcttgtttgtggtcgcaaaaaagcctgattgttgtagctgctatgtttgttccctttggctgtccatccagaatttctgataagatgacacttggaagcacatcctgcagcactccagttacaggaatgggttcagttgactgtaacagtttagcatagtccgtagtggacagtagctgtgttgtttgtcgtgccctgtagtcctgtactaccttgaattaggactgctaagtgaaccgatacaagtacttgtgactgaaatctatacctctttttttctttccaccttgggaatttgtagaacaaaaccgatgtctgatgatatgctatctaggaatagcaactgttgtatttttgttcctgtttagggagatttagattctgatgagcaaaaaaaaagtaaaaaacttttaagaatttgaaaaggctgggtttcccagtttttagcttctactaaaaaaaaaaaaa

SEQ ID NO: 21679 - DNA, 1663 bp, Oryza sativa
  Clone ID: TF_OsC1191_1
gttcttctgaggatgacatggacccaagtggccgcgaaaacgagccgcctgagatcgacactcccctccctctcgccattggagctagacagctcgagctccaggaggaagaagagagagagcctagctgctagggtttccatcggatttggttttttattttctttttgtttcttgtgtgtgttttgatggatcagagctttgggaatcttggaggaggaggaggagcaggggggagcggcaaggcggcggcgtcgtcgttcctgcagctgccgctgtccacggcggcggcggccaccgcgtactacggcacgccgctcgccttgcaccaggcggcggccgcggctggcccgtcgcagtaccacggtcacggtcacccccaccacggcggcggccaccaccacagcaagcacggcggcgccggtggtggggagatctcggcggcggaggccgagtccatcaaggccaagatcatggcgcacccccagtactccgccctcctcgcagcctacctcgactgccagaaagtcggagcgccgccggaggtgctggagaggctgaccgccacggcggcaaagctggacgcccgccctcccggccgccacgacgcgcgcgacccggagctcgaccagttcatggaggcgtactgcaacatgctggccaagtacagggaggagctgacgcggccgatcgacgaggccatggagttcctcaagagggtggagtcgcagctcgacaccatcgccggcggcgcccatggcggcggcgccggctcggcgcgcctcctcctcgccgatggtaaatctgaatgtgttggttcttctgaggatgacatggacccaagtggccgcgaaaacgagccgcctgagatcgacccgcgcgctgaggataaggagctcaagtttcagcttctgaagaagtacagtggctacttgagcagcctaaggcaagaattttccaagaaaaagaagaaaggaaagctgcctaaggaggccaggcagaagctgcttcactggtgggagctgcactacaagtggccttacccctcagagacggagaagattgcgcttgcggaatcgacaggactagatcagaagcagatcaacaactggttcatcaaccagaggaaacggcactggaagccatcggaggacatgccgttcgtcatgatggaaggttttcacccacagaatgctgctgcattgtacatggatggcccgttcatggcagatggaatgtaccgcctcggttcgtgaacctcgatctcgatcatcggcgtgtttgatgagagatccaatgccaagataaattgatcatggaatgtattcagcatgcgttgcaatgcatggacattgttatggaatttttggtttatttacctttcaccgtggattgacaaggtctcgatcatgttagtgttgatggcttatagttctccagtaatgttgttgtttttcctttcgatggcttgtaaaagtttaggtgtatcggaatttcgatcaacttgctcgtacgctggtaattaatttggtgatggtctatatgttgtatggttgtgcgtttcagattggtgttcaaagttgcctatctgaaacaattatatatatttatattgcttctcattttaaaaaaaaaaaaaaaaaaaaaaaaaaggggggcctcg

SEQ ID NO: 21680 - DNA, 1240 bp, Oryza sativa
  Clone ID: TF_OsC1920_5
cagctttttccgcccaagatcgccgccaccatcgcgtcctcctcctccttcttataagatcatcttctccgccacagcaatctgtaaatatatacacatcgaacgcgacaagcgcgtttgattgattggatttttctcccctctcctcacgacaagtaattaaggcgcgcgatctcgatctctagcgttgagaacttgatccgcgatggagtccggccggctcatcttcagcacggcgggctccggcgccgggcagatgctcttcttggactgcggcgctggcggcggcggcgtcggcggcggggccatgttccatcgaggggcgagaccggtgctcggcatggaggaaggagggcgcggcgtcaagcggcccttcttcaccacccccgacgagctcctcgaagaggagtactacgacgagcagctcccggagaagaagcggcgcctcacgccggagcaggtgcatctgctggagaggagcttcgaggaggagaacaagctggagccggagcggaagacggagctggcgcggaagctagggctgcagccgcggcaggtcgccgtgtggttccagaaccgccgcgcgcgctggaagaccaagcagctcgagcgcgacttcgaccgcctcaaggcgtcgttcgacgccctccgcgccgaccacgacgccctcctccaggacaaccaccgcctccactctcaggtcatgtcgttgaccgagaagctgcaagagaaggagacgacgaccgagggcagcgccggcgcggccgttgacgtcccgggcttgcctgcggcggccgacgtgaaggtcgccgtcccggacgccgaggaaccggcgctggaggaggcggcggcggcgttcgaggagcagcaggagcagcaggtgaaggccgaggacaggctgagcacgggcagcggcgggagcgcggtgtgtggacacggacgcgccaactgggtggtcgggtgcggccggcagcatctcgccgccgtggacagcagcgtggagtcgtacttcccgggcggcgacgagtaccacgactgcgtgatgggccccatggaccacgccgcggggggcatccagtcggaggaggacgacggcgccggcagcgacgagggctgcagctactacgccgacgacgccggcgtcctcttcgccgaccacggccaccaccaccaccaccaacacgcggacgacgacgaggaggacggccagcagatcagctgctggtggatgtggaactag

SEQ ID NO: 21681 - DNA, 1174 bp, Oryza sativa
  Clone ID: TF_OsC2115_1
tctccctccgcctttgccccgccttccctgcccttttctcttgctgagccgcttctgcattggcttgtgatgatgggggccacttctccgtcaggcctggagctcaccatggctgtccccggcctcagctcctctggttcagaaggggccggttgcaacaacaacaacgccggtggcggctgcaacatgagggacctggacatcaaccagccggcgagcggcggcgaggaggaggagttcccgatgggcagcgtggaggaggacgaggaggagaggggcgtcggtgggccccaccgccccaagaagctccgcctctccaaggagcagtcccgcctcctcgaggagagcttccgcctcaaccataccctcacgccgaagcaaaaggaggccttggcgatcaaactgaagctgcggccgaggcaggtggaggtctggtttcagaaccgtagggcaaggacgaagctgaagcagacggagatggagtgcgagtacctgaagcgctgcttcgggtcgctgacggaggagaaccgccggctgcagcgggaggtggaggagctgcgggcgatgcgggtggccccgcccacggtgctctcgccgcacaccaggcagccgctcccggcgtccgcgctcaccatgtgcccccgctgcgagcgcatcaccgccgccaccggcccgcctgccgtgcgcccgccgccgtcgtcagccgccgccgccgccccctcgcccttccaccctcgccgcccctctgcggccttctaggcccaaggtctcgcatcctaaaggccacaaaaagatgggcctcgccgtcccgtgtaaattgaaggagacgacgcagcggtagagggccccgtgtcggcgttgttgcgtcgggtccagtcgtctcagaggagtcagaggcgtggacaaaatgtttgttgcggtgtttgtgttccattggtcgttgatcttagcttgatgatctgtgattcgcgccttgctcgtctaggtttctcttgggccgacgcatgatcttttttcccccgtgtcggaccttattgggccttttgagatcgacgggccccctccttgtttcgcatgtggacatgttatttcgtccttttgggccaacaattcagcacggtggccaacggtgcgtagttcgtcgccgttttctttcaaaaaaaaaaaaaaaaaa

SEQ ID NO: 21682 - DNA, 2616 bp, Oryza sativa; identical to SEQ ID NO: 12079
  Clone ID: TF_OsC310466_1

SEQ ID NO: 21683 - DNA, 843 bp, Oryza sativa
  Clone ID: TF_OsC244_8
ctaccaatgcgagcagagcacgccctctgcaatcatgccgtccatccccaggtccggcagcagccttgccttgccccggcgttggtttttgagggagcgatgatggagagggccgaggacctgcgcctgagcctcagtctcagctcgccgcttattgctcctcgtactcaccatgtcgccatgctgttccacgctcctccagagaaaagattcctggagatgccgctgctccctgctgcgaagcggagcgaggtcgtcgcggcagaagaggagcgcgcgggcctgcgcggcggcggcggcagcgacgaggaggacggtggctgcggcatcgacggctcacgcaagaagctccggctttccaaggaccagtccgccgtgctcgaggacagcttccgggagcaccccaccctcaaccccaggcagaaggcaactttggcgcagcagctcgggcttcggcctcggcaggtcgaggtgtggtttcagaacagacgcgcaaggacgaagctgaagcagacggaggtggactgcgagttcctgaagcgctgctgcgagacgctcacggaggagaaccggaggctgcagaaggaggtgcaggagctgcgagcgctcaagctcgtctcgccgcacctctacatgaacatgtccccgcccaccacgctcaccatgtgcccctcctgcgagcgcgtctccaacaccaataacaactccagcgccgccgccgccgccgaccgccgcggcatcaggactactactgccgcaggcggcggcagcgtcgtcgacaccgccgccgacgggggcatcctctgccaccgcccgatcgccgtccggccgcagcagtcatga

SEQ ID NO: 21684 - DNA, 4000 bp, Oryza sativa
  Clone ID: TF_OsC36_9
atggcggggaacgagtggatcaatggctacctggaggcgatactggacagcggcggcgcggcggggggaggtggaggcggcggaggaggtggtggtggaggtggaggtggcggtggaggtggagggggagggggagtcgacccgaggtcgccggcggcgggggcggcgagcccgcgtggcccgcacatgaacttcaatccgacgcactacttcgtggaggaggtggtgaagggcgtcgacgagagcgacctccaccggacgtggatcaagctggagcttgagggaatcctgaggatttctgcacggaggaaggagcaggagcaggtgcgccgcgagacttcggaggaccttgcagaggatctgtttgaaggcgagaaggcggacaccgtcggtgaattggcacagcaagacactcccatgaagaagaagttccagaggaacttctcagagctcaccgtcagctggtccgacgagaacaaggagaaaaagctgtacattgtgctcatcaggtcttataccgcttactttactcattggtgccattctgtatatgccactaaattgcaaaattttactgagttcctttattctttgttctactttagtcttcatggtctagttcgtggcgataacatggaacttggtcgggattcagatactggaggacaggtgaaatatgttgttgaactcgcaagagcacttgcaatgatgcctggcgtgtacagagtggatctgtttactcgtcaagtgtcatctcctgaagtggactggagctatggggagcctactgaaatgttaacctccggttccactgacggagagggaagcggtgagagtgctggtgcgtacattgtgcgcattccgtgcggtccaagggacaagtacctccgtaaagaggccctgtggccttacctccaagagtttgtcgacggagctctcgcgcatatcctgaacatgtccaaggctctgggggaacaggttagcaatgggaagctggtcttgccatatgtaatccatggccactatgccgatgctggagatgtcgctgctcttctttctggtgcgctgaatgtgccgatggttctcaccggtcattcacttgggaggaacaagctggagcagatcatgaagcaagggcgcatgtcgaaggaggagattgactcaacttacaagatcatgaggcgcattgagggtgaggagctggccttggatgcagcggagcttgtcataacgagtacaaggcaggagattgatgagcaatggggactgtatgatggctttgatgtcaagctagagaaagttttgagggctcgtgcgaggcgcggagttagctgccacggccgttttatgcctagaatggtggtaattcctcctgggatggatttcagcagtgttgtggttcctgaagataccagcgatggagatgatggcaaagactttgagattgcctcgccgaggtcactgcccccaatctgggctgaggtgatgcggtttttgaccaatccccacaagccaatgattctggctctgtcaagacctgatccaaagaagaacatcaccacccttgtcaaagcatttggagaatgtcgcccactgagggaacttgcaaacctaattctgatcatggggaacagggatgacatcgatgagatgtccgctggcaatgcaagcgtcctcaccactgtcctgaagctgatcgacaagtatgatctgtacggaagtgttgcattccccaagcatcacaagcagtcagacgtaccggagatttatcgcctcacagggaagatgaagggcgtcttcatcaatcctgctcttgttgagcctttcggtctcaccctgatcgaggctgcggctcacggtctcccgatcgtcgccaccaagaacggcggtccggttgacattaaaaatgctctgaacaatggactgctggtagacccgcatgaccagcacgccattgccgacgcgctgctgaagctggtggcggacaagaacctgtggcaggagtgccggaagaacggcctgcgcaacatccagctctactcgtggccggagcattgccggacatacctcaccaggatagccggatgccggatcaggaacccgcgctggctgatggacacgccggcggacgcggccgccgaggaggaggaagccctggaggactcgctcatggacgtccaggacctctcgctgcgcctgtccatcgacggcgagcgggggtcatccatgaacgacgcgccatcgtcggacccgcaggactcggtgcagaggatcatgaacaagatcaagcggtcgtctcccgcggacacggacggcgccaagattccggccgaagcggccgccaccgccacctccggtgccatgaacaagtacccgctcctccgccgacgccgcaggctgttcgtcatagccgtggactgctacggcgacgatggcagcgccagcaagaggatgctgcaggtgatccaggaggtgttcagggctgtccggtcggactcccagatgtccaggatctccgggttcgcgctgtcgacggcgatgccgctgccggagacgctcaagcttctgcagctgggcaagatcccaccgaccgacttcgacgcgctcatctgcggcagcggcagcgaggtgtactaccccagcacggcgcagtgtgtggacgccggggggaggctgcgccccgaccaggactacctgctgcacatcaaccaccggtggtctcacgacggcgccaagcagaccattgccaagctcgcgcacgacggatccggcaccaatgtcgaaccggacgtggagtcctgcaacccccactgtgtctccttcttcatcaaagaccccaataaggtgaggacgatcgatgagatgcgggagagggtgaggatgcgtggcctccgatgccatctcatgtactgcaggaatgcaacaaggcttcaagttgttcctcttctagcatcgaggtcacaagcactcaggtatcttttcgtacgctggggcctgtctgtgggaaacatgtatctgatcgtcggggagcacggcgacaccgatcacgaggagatgctgtcagggttacacaagacggtgatcatccgcggcgtcaccgagaagggctcggagcagctggtgaggagctcagggagttaccagagggaagatgttgtcccatccgagagccccttgattgctttcacaaagggtgatctgaaggccgatgagatcatgcgtgctctcaaggaggtcaccaaggctgccagtggcatggattggcagaggccattgtgcaagactgcttattggttccaatcaagagtgtatactaacatggaagaaaaggaggaaatgaccatgctttcccttggagttggagctgctagcaagcactcaatatccaacagaaaattcagactgaaagaagtgacagatcacaaattcaaccttggagatcaagatcataacagtggccatgtgaggaagaagctaaggcttagcgaagaacaattgactgtgctggaaaatatgtatgaagctggcagcaatctcgaccaagcactaaaacaagggcttgcggagaagctgaacataaaaccactccaagttgaagtctggtttcagaacagaagagcccggaccaaacataagcagatcgaagaagaatgcaagaaccgaggtggttggagggcctaaaggttaacttttagttgcactggatttgagtctttctgttttttttttttttttttttttttttttttttttttttttttttttttttttttttttttttttttttttttttttttttttttttttcagaaaaatggacatctgcgctcactaggacacaaaagttcagtcccagttgtgagtagtgacaacaacatgacgatgtcagttacacctaaaagttcactaaacatatatcctcaaagtttgagcaaatgagcagttacctaatccatcactagcaaagtaaaatagaagagtgaaacattgccggaagggt

SEQ ID NO: 21685 - DNA, 1714 bp, Oryza sativa
  Clone ID: TF_OsC139567_1
aaaagatacataatccagaaaatctaattaaagagaaaccaacaagtttgtgaaaataagacaggatgacatgcaaaatatctaagctcaatacataacagaaggctaatgaacctaaataaatacaatggttcaaaggctaatgaatacagtaccggtttcatgattccatttgcccatctaaacgatacgatgcattccgagaatttgtatagctagtagatcatagtcctttcaaactatagtgtaaggcaaatcctatgaggacaacatagggaaaactgctcattgaagctatagaggattgtacatagtcaagaagcaacatttggtttagtcaaaatctggcaaaccatgccacttgccaacatgcccatagtatcatcaacaagcattgtctaatctccaactcaatgatcttcacaatcgaagaaactccaattttctggcagatggcaacgcgatcatgagactttatcagaccaaaagctttaccatggacaagagcaacctttaaaactactaactcatttgtagcgctgatcgattcagccttcaggacaaagtgaaagaagatcgttacaaactcaccatcaagaaatatccacacaatcacctaacacctaagtgtgcagagtgctatttatcggcttcttgcagctaattcagcaacagaacaggtttacactagaactagctattctccgtagaatgtcgacaagaccatgataaccaacgtgtggacgtaaggcaaacttcgcaatttcagtaagcaaaatgaacggcaagttaccagcttcactttttacaggggaaaacagtatggtgtctaatgcaacgaacctagtaaccgcgtgccagaattgccgcgtcatcaatacatatcaaagctttcaccggatcgcatgtgggggaagctcccgggtcaaatgaagcaagggtgtttgtaggaggtacttggatttgacataacattgtcgtagaaggacatctggcccaaactgcctgacgatcgcgagctactgtcattggatgcatacatcatacgacggatttgctcatgctccgtgtcaaagtggtgcatctccgagatcctttcgctattgtgatctctcatggctatgttctggtgaagcggcctatctgatttgggttttttgtcagttggggactcctcatccgcttcagcttcagattctgcattattatttggtaaagcagcttgcttccgtttcgatcgtgcccgcctgttctggaaccagttatagacatttgtctctgagatctggccatgctgtgagagctctgctgttatgtcctttatcttttgcttgcttggtgttccattgccttggtcaaagatgttctcaagaatctgcaactgcattggggttggtgtccatcgctgccttgctgtgatcttgtgacctccgggaaccattagaggatcacagtacagattaccaagcctcattcctgcaatggagtcctgctgcgcggtgagggcgcggtgcatctcgacgagctgctcgcagatggtggcgtagatggagatctgcttccggagcacctccatctgctcgtccgtcatcaccttcacgtacccgagccctccttcccctccgcccctgtcgtccaccgcctcgccggaggacgccttggccttgtcccactccatgcctctacagggaggcgaaaaggaattgcctcgtgc

SEQ ID NO: 21686 - DNA, 1164 bp, Oryza sativa
  Clone ID: TF_OsC267403_1
ccataaacattgtgatcttccttccatattgcattcgattacaccctgaagatcgtaaaaaaagtccgtccttataatttttaatctgcttaatttatacattagcatcatattgctagtaaccaagcataaaaaaggaatataaatatatgtgtgtgttttcaattaacatagaaaatcccagccagagatatcacgcgatcaattccagaaccactcccagctgtttagcggcgcctcctcatccgccgccaccgtcgccgccacggcgtgctcgaaggcgtcgccgacgagcgtagcgtcgaccgggagtaagacggaggaagaggggtagtcgtcgtcgctgccggcgccgccgcagtcgtcctccgacgacgagggcggcgagcgagcgccggcgaagtaggactcggggctgtcgttgctggccgctcttgccgccgccacgcgcgccgccggcatcgcgacgccgccgccgccgccgttggtggtggtggtgctcccggcggcgtcgtagaggcggcgaccttcttcgagctgaaacgacttggcgctttcaggtgcggctggcacggcggtttgctccgccggcgccggcgacggtgacggtgacttcccattagcttgcagcttctcggttaataggatcacctgagatcggaggctctcgttgtcggcggcgagcgcggtgcggccggcgaggagctcgtcgtgggcggcccggaggcggtcgaagtcgagctcgagctgcttcgtcttccacctcgcgcggcggttctggaaccacacggccacctgccgcggcgcgatcccgagacgccgcgccagctcgctcttccgctccggctccagcttccgcttctcctcctcgaagctccgctccagcgctcgcacctgctccgctgtcagccgccgcttcctcgccgccgctgacgacgacccctgctcgtcgacgccgtacagctcgtcgacgaggtcctccatctggagctccagctcgtcgtgcgtcgtcgtcaggaacggcctcttccgccgccgccgccgcagctcggcctcctccatcaccggtgagcctacacgttcacacacgtaagcaacgcgttccaagctatatatatagaaccactgatctgggtcgatcgacacctccgacgaagccgccat

SEQ ID NO: 21687 - DNA, 1764 bp, Oryza sativa
  Clone ID: TF_OsC10707_1
ttttggccaacccgccgctggctcgctttatatcccgcgtgagctccacaccggccgggaagcggaggtccggaggaggaagcggcgagagaagctcagctaggcagggcgacgggcagaaacgcgaccacggcaacaaaccccgccgcgcgcgcccaccgtgccggttacatgggagtagaggcgggcggcggctgcggtgggagggcggtagtcaccggattctacgtctggggctgggagttcctcaccgccctcctgctcttctcggccaccacctcctactagctatacacacccatctcaccataacacacatacatagatagatagatagatagatacatacacacaaacataagtagctaggtagagaaagagatcatagcgttaggtgatcgatcgatggctgctgctgaggcggcggcggcggtggggaagcagcagcagaagggcggcgggggaaggggaggaggcggcggtgggccggcgccgttcctgacgaagacgaaccagatgatggaggagagcgcgcacgttcttggtgtcttttggggaaaaacatgtccttattgtcttgtgttgattaggacagaaacatgttacgattgcccctcaatacgttcacacgatctgaccggggctaacgagagatggcgactattcatgcagggtttccggaaggtggtgcccgatcggtgggagttcgccaacggcaacttccggcgaggagagcaaggcctcctctccggcatccgccgccgcaaggcgacgacgcctcagtcctccaaatcctgcggcagcggcgtcaacgtcgcgttccctccgccgctgccccctctgcccccggagccgtcggcgaccacgtccagcggcaacgaccgcagctcctcctccgcgtcctcgccgccgcgggcggacatcaccagcgagaacgagcagctcaggaaggacaaccaaacgctgacgatggagctggcgcgggctcggcggcactgcgaggagcttctgggcttcctgtcgcgcttcctcgacgtccggcagctcgatctccggctgctcatgcaggaagacatgcgagcggcggccggcggcgtcggcggcgagcagcgcgtgcaagagcacgcccgggaggagaagtgcgtgaagctgttcggcgtgctcctcgacgacacccatggcgccgccacgaggaagagggcgcggtgcgaggaggcggctgccagcgagcggccgatcaagatgatcaggatcggcgagccgtgggtcagcgttccatcgtcggggccggcgcggtgtggcggcgacaactgaagtccaaacttgtgcatgccacggccatgacctgatcgaccaggcgaacggcaagcagaaggcatgcatggtgaggttggtggcaagaatggtccgatcaaccaagtcattaggtaaaacgagacgaattaagcacgccaaatacgtgcggccctgtgttaatcacgggttgctaccatgctagtagtaaggtaggaacagtacgaggagtcaaggctgaccgaagcgaagcagccggctcttgtgtctggacgttgtttcagttaacactgaaagcttcaccttactatggattatacattttttagataatggaatataatatcccggtctttacttcgtccggcagctcaacacctacgtacgtacacattacacacactcgatctcttgctccatctcgatactcgactcctaactttgttggtttgatcatcatatcatcatcct

SEQ ID NO: 21688 - DNA, 1871 bp, Oryza sativa
  Clone ID: TF_OsC165344_1
ggaaccccccactcaacggaataagcttgggccgctgggggcgctgctgcacgggccgcagctgccgccgttcctgtccaagacgtacgacctggtgtgcgagcccggagctggacggggtcatctcctggggccacccgcggcaacagctttcctcgcctgggacccccccgccttctcgcgcgacgtgctcccccaccactgcaagcacaacaacttctccagcttcgcccggaagctccccacctatggttttcgcaagcatcatcctgctcgttgggagttatggaccacaacaccgaccctcctccgaccaccatggtggacgccgcggcggcgctgctgctggagcccaagctggaggggtacgacgacgacggcggcggcgagccgctgcagccggccccgttcgtctctccgctggaccagctgatgcagccgccgcggccgctggaggcgctgctgcaggggccgcatctgccgccgttcctgtccaagacgtacgacctggtgtgcgagccggagctggacgggggtcatctcctggggcccacgccggctacagcgtcgtcgtccgggacacctccgccttcgcgcggaacctcacgtctcacccgacctagtactacagcgtctccaccagcgtaacaacgtttaccgcctagtctgtccgctaagcacatactgagaaaaagaagattggtcatgatgaaatcccaggacatagcaaacattggttgatgaagattgtacgtcgcaggtactcaccaacacaacaaagtggccttcagcatggatcttcagttgaatccggtttagaccctgaactcaacacactgagaagggagaagagtgcattgcttcaggaggtgaccaggctgaagcaagagcaccttcagacaattgaacaaatgagcacgctgaatcagaggctagaatcagcggaagatcggcagaaacagatggtctctttcttggccaagctcctccagaacccaactttcctgaggcaacttaagatgcacagacagcaaaaggaaatcgactccaccagagtgaaaaggaaattcctcaagcatgtaccacatggcaacattgactcaggtgagtccagctcacaacacactggagagagcaatttagatttctcccctacgtccctggaccttccagccacgcacagtgacatcttagaccttcagaattttcttttggaagatggggacctcaatcttgccatgctgccagagaacataggacttgatggaatcgaagcaccagacgacatcggggcgttggttcagggatttgacacacaggaggaacttgagcttggtagcggagttgagctactggaaatacctccagcttctggtcctcgtggccaagatcccacgattggcagatccaagggaaagaatgtattgtctccaggattggatgctacctcttctgaagctgattgcctcggatcattttctgacaatatggggatgctttctgactccatgttacaaacagcgggtaaattgatggatgcagatgatgacgagcgaatttggggcgtcgatgcttcgtcggctttacaaagttcttgcagtggcactagtcagcaagcatatggtagtcttgttagtgatccctatctgatggagatggctaataagcctgaaaaattctgggagctcgattttcaggcactggatgatggagatctgcagctggacaatcctgagaaggtgctggacacaggcgtggttgctcaggctcaggcgcttgaattgggtggcctgactcaggcaaccgaattaaagaaggcatgcttttttctcaggctcatcactcagggcaccaaccaaacaggcccttag

SEQ ID NO: 21689 - DNA, 297 bp, Oryza sativa
  Clone ID: TF_LIB3433-009-Q6-K1-C9
gtttgtctcattaaaatctacagggcttcagaaaggtcgatcctgataggtgggagtttgcgaaatgagggttttctcaggggccaaaggcatctcctgaaaacgataaagagaaggaagcccccgtccaatgcacctccgtcacaacaacagtccctcacatcttgtctggaagttggtgagtttggattcgaggaagaaattgacaggctgaagcgtgataagaacatcttgatcacagaggtagtaaagctaaggcaggagcagcaggccactaaagatcatgtgaaagccatg

SEQ ID NO: 21690 - DNA, 561 bp, Oryza sativa
  Clone ID: TF_LIB3599-044-Q1-K1-G1
cccacgcgtccggtgggggaaagggaacaacagcttcgtcgtcgccgaccccttcgtcttctcccagaccctgctccccgcccacttcaagcacaacaacttctccagcttcgtccgccagctcaacacctatgtcagtctcgtcactcccagttctatttcatcgtctcatcatactccccccctctctgcacttcacatcatgctgccatggattctcagtggtacccaactcaaagtgagttctgaggggcttcggccatggcccatggatctgagctacatggttcttgagttcgtgtgtgcgtgtgttttgggagattctttggaagatgagataaaaaattgttgtggtggttggcatgttgattttgtagacttggagagacaggaggtgagaggtgaggacaacagagtttgggacccatcatttattggtgtagccttaaattgtacatatgcgctgttgtaaattcagctagctgtacatcttggtgtactaaaatctggtggacaaagccaagaatagaaatcattccatgtctgatgttcttttttccc

SEQ ID NO: 21691 - DNA, 1685 bp, Oryza sativa
  Clone ID: TF_OsC98500_1
atggaagttgccgccggcgcccgcggcggcggggccggcggaggagggggaggccccgcgccgttcctgctcaagacgtacgagatggtggacgacccgtcgacggacgcggtggtgtcgtggagcgacgcctccgacgcgagcttcgtcgtctggaaccacccggagttcgccgcccgcctgctgcccgcctacttcaagcacagcaacttctccagtttcatccgccagctcaacacctacatatctttattggaaaatgattcttcaacaatgttttgtctaactactaagaagttggtattgcaaggattccgtaaaatagatccagagcgatgggaatttgccaatgagtacttcatcaagggacaaaagcacctgctgaagaatatccacaggcgtaagcctatccacagccacagccatccaccaggtgctctgcccgataatgagcgtgcaatatttgaggatgagatcgaacggctttcacgagagaaatccaacctccaggctgacctctggaaatccaagcagcagcagtcgggaacgatgaaccagattgaagatcttgagcgacgagtgcttggcatggagcagcgacagaccaagatgattgccttcttgcagcaagctagtaagaaccctcagtttgtcaacaagcttgttaagatggcagaagcatcttcgattttcacggatgctttcaataagaagagaaggttacctggtttggattacagtatcgagaacacagaaaccacaagcttttatgatgaccatagcagcacttctaagcaagaaacaggcaatcttttaaatcagcacttctctgataagcttaggttgggactttgtcctgccatgacagagagcaatatcatcacgctaagcacgcaaagctcaaacgaagataacagaagccctcatggtaaacatccagagtgtgacatgatggggagggaatgtctcccgttggtgccgcagatgatggaactctccgataccggcacatctatctgcccctccaagagctcttgctttgcaccacctataagtgatgaaggcctcttaacatgccatctgagtctaactcttgcatcatgctcgatggatgttgacaaaagccaaggcctcaatgcaaatgggaccactatagacaacccaactgaggcagcaacagctaccatggaaaaggatgacaccattgacagaagcttcgatgacaaccaaaagaaatcagctgattctcgtacagcagatgccacaacaccacgagcggatgcacgagtagccagtgaggctcctgcagccccggctgcagtggtgaatgacaagttctgggagcagttcctaacagagcgacctggctgctctgaaactgaagaagcaagctctggcctaagaacagatacttccagggagcaaatggagaacaggcaggcatatgatcactcacggaatgacagagaagacgtggaacaactgaaactctgaatttactatagaattatacaatttacaagaagggatacaggcgtacagtgtaagatgtttagaatcaggaacctgctgttaaacatgacagatcaatgggtgtacaacatcacacaggtgtacatattttttttccctgaatgtttcggagggttaagattaatagttcgattaaccacaccagttgttgt

SEQ ID NO: 21692 - DNA, 698 bp, Oryza sativa
  Clone ID: TF_OsC255623_1
cgggcggctccccggcgggccggggcccttccctccactgcactagcaccactgcaactactagtatagcaagaagggtgatgccgacgacgacgacggcgcggggcggtggcggggtggcgccgttcgtggcgaagacgtaccggatggtggacgacccggccaccgacggcgtcatcgcctggggcagggacagcaacagcttcgtcgtcgccgaccccttcgccttctcccagaccctcctccccgcccacttcaagcactccaacttctccagcttcgtccgccagctcaacacctacgggtttcgcaaggttgatccggacaggtgggagttcgcgcacgtgtcgttcctgcgcggccagacgcacctgctgcgccggatcgtgcgacggagcagcggcggagggggagcgaagaggaaggaggaggccggcggttgcggcggcggaggggaggcggccgccggggacgtcgacgaggagagcgccgtggtggccatggaggtggcgcggctgaggcgggagcagcgggagatcgagggccgcgtcgccgcgatgtggcgccgcgtgcaggagacggagcgccgccccaagcagatgctcgccttcctcgtcaaggtcgtcggcgacccgcagttagtcactatatttcgtgtactagcatatatttcacctagcagtggttttctaagtatc

SEQ ID NO: 21693 - DNA, 868 bp, Oryza sativa
  Clone ID: TF_OsC278100_1
aacaatcttagcgaggaaaaagcgagcgcttttttcttatcctgttccgcgggcgcgctggcgcgaccgaacctgggagtgatacttgcgaattacacgatcggttgtggcactatgaatgggcggcgagtgcaaggtccaccagctccaggccgccggcgacgggggcccaggcgccgtcgcgccgttcgtggcgaagacgttccacatggtgagcgacccgtcgacgaacgccgtcgtgcgctggggaggcgccggcaacacgttcctcgtgctcgaccccgccgccttctccgacttcctcctcccctcctacttcaagcaccgcaacttcgccagcttcgtccggcagctcaacacctacggattccgcaaggtggatccggacaggtgggagttcgcgcacgagtcgttcctgcgggggcaggcgcagctgctgccgcggatcgtgcgcaagaagaagaagggcggggcggcgccggggtgcagggagctgtgcgaggaaggggaggaggtgcggggcaccatcgaggcggtgcagcggctgcgggaggagcagaggggcatggaggaggagctccaggccatggaccagaggctgcgcgccgccgagagccgcccgggccagatgatggcgttcctcgccaagctcgccgacgaaccgggcgtcgtgctgcgcgccatgctcgccaagaaggaggagctggccgcggccggcaacaacgggtccgatccctgcaagaggcggcggatcggggccgacacggggcgcggcggcgtggcgaccggcggcgacgcggccgagatggcgcagagcagaggcaccgtgccgttcccgttctctgttcttggccaagtgttctactag

SEQ ID NO: 21694 - DNA, 1338 bp, Oryza sativa
  unsure (1)..(1338): unsure at all n locations
  Clone ID: TF_OsC108229_1
atgggctctaagaagcggtcgcctcagcatccggccgccgcggcgccccctcccgccgtcggcggcggcggcggcggcgaggtctccggcgatggtggcgcctcgacggcgaacgggccggtggtgccgaagccgtcggaggtggcgccgttcctgacgaaggtgtacgacatggtctcggaccccgcgaccgacaacgttatctcgtgggccgagggcggcggcagcttcgtgatctgggactcgcacgccttcgagcgcgacctccacaggcacttcaagcacagcaatttcaccagcttcatacgccagctcaacacctatggatttcgtaaagttcaccctgatagatgggagtgggccaatgaaggttttattatgggccaaaaacatcttctgaagaccattaagaggaggaagaagtcttctcaggaatcacctagcgagatacagaaggcgcctgtcaaaactgcacctggtactgaaaatattgagataggaaaatatggtggccttgaaaaggaggttgaaacccttaagagggataaagctcttctcatgcagcagcttgtagatctcaggcactaccagcaaacatctaaccttgaagtgcagaatttaattgaacggcttcaagtaatggaacagaaccagcagcagatgatggcacttctagcaatcgttgtccagaatcctagttttctcaaccagcttgtgcagcaacagcagcagcagcgcagatccaactggtggagtcctgatggaagcaagaaaaggagatttcatgctcttgagcagggccctgtaactgatcaggagacctctggccgtggggcacatattgttgaatatctcccacctgtcccagaaacatcaggtcaagtaaatccagtggaaggagccatttgttcggccaactcacaaccagttccaagtcctgcagttgccacacccatggacatgcaaacgtctaacgttgctgatactctcggttcatctgaggagcctttcgctgataactctactctacatgaatgggatgataacgacatgcagcttctgtttgatgataacctagacccaatacttccaccatttgagaatgatggtcaaatgggccctcctttgagtgttcaagattatgattttccgcagttagagcaggattgtctgatggaagcacaatataactccaacaatcctcaatatggtaatgactaattactgtataccctatgtttttgttcatcattttgtggaaaacaagcgtgatgtcattttagttaactgtggagtttctangtgcatgtttcatgccaaaaaaaaaaaaaaaaaaaa

SEQ ID NO: 21695 - DNA, 1952 bp, Oryza sativa
  unsure (1)..(1952): unsure at all n locations
  Clone ID: TF_OsC8038_3
atggcggagcagggggcgggcgaggcggatgcgggcggcggggagccgccgccggcggcggtgatgacggcggcggcggaggcgttggcggggcagaggtcgctgccgacgccgttcctgacgaagacgtaccagctggtggaggacccggcggtggacgacgtgatctcgtggaacgaggacgggtcgacgttcgtggtgtggcggccggcggagttcgcgcgggacctcctccccaagtacttcaagcacaacaacttctccagcttcgtgcgccagctcaacacctatggatttaggaagatcgtgccggaccggtgggagttcgccaacgactgcttccggcgaggggagaagcgtttgttgtgtgatatacaccgccggaaggtggtggcggcggctgccgcggcgccgccgccgccgtcgccggggatggcgacggcagctgccgcggtggcttcgggagctgtgacggtggccgcggcgccgatacctatggcgctgccggtgacgcgggcgggctcgccggcgcactcctcggaggagcaggtgctgtcgtcaaactctgggtcgggggaggagcaccggcaagcgtctgggtccggctctgcgcccggcggcggcggcggcggctccgcgtccggcggcgacatgggcgaggagaacgagcggctccggcgggagaacgcgcggctgacgcgggagctcggccacatgaagaagctctgtaacaacatcctcctcctcatgtccaagtacgccgccacccagcacgtggagggctccgcggggatatcctccatagcgaactgctccggcgagtcgtcggaggccgttcccccgccgccgcctctccccccggcgatactcgatctaatgccctcgtgccccgccctggccaccgccgccgccgctgcggggctcgccatagacggcgagcccgacccgagcgcgcggctgttcggcgtctccatcggcctgaagcggacgcgagacgacgccgccgccgccgccgacgaagacggcggcggcgaggatcaggccgagcacggcggcgcggacgtgaagccggaggcggcggatccgcatcccgccggcggcggcggcggaagcagcacggaggcgtcgccggagtcgcacccgtggcccatataccggccaacccccatgtaccacgcggtcaggcccacttgcaacgggccggacagggccgggtccgaccaagacgggtccagctccagcgtaagatccatcaggatgccggtgcacagtttggtcagttttacaagtgttttaggtgttagtgccaaaaatggtggtgacatagggcggaagcactagtaccagctgtgcagaaagtcctcctattcctcaaatgcattctcgtgtagatacacgagcgaaggtttctgaaatagatgttaattcagaacctgctgttacagaaactggtccatcaagagatcaancctgctgaagagcctcctgctgtcacacctggtgcaaacgatggcttctggcagcagtttcttaccgagcagcctggatcatcagatgcacatcaggaggctcaatcagaacggcgagatggaggaaacaaggtggatgagatgaaatcaggagatcgacaacatctttggtggggcaaaaggaacgttgagcagataacagaaaaacttggacttctcacctcaacggagaaaacctgacataattttgtttttctttttgtagatgaaaaactattaattcaggaacgctgacattggtgccttcctcagtgagatatgttgactaacatctatttcgcagtgtaccgtattttttccatcatgtaccgtaatgtatcatagtgccatacattcatctttggtccattgacactttctgatatcattgtgcgtgatttctaaaatattctcaagtttggttaaatgttacagattctattt

SEQ ID NO: 21696 - DNA, 1405 bp, Oryza sativa
  Clone ID: TF_OsC68408_1
ttttttttttttttttttttgaagcaaatttttacatcattacaacgcacaactgcatttagttagactgttatatgtacatacagcaccctcaagtccactgtcaaagtaccatacattcagatccaaaactaattccacaaagctgaacagaatacgatggtaattattgcggcaatagtatgtacagctgatgctaccataagatcatcaccatgggggaggagacctactcaaattgatcatcctcaaagcggataagtataatgacaagcttgattaacaagtactcaagggtcgttggagctgcagcaagatcagaccagagctactactgtggcgatttggtgctgcttgagttgaggtagcccatcttttgagacagcaagttcatatcatctatagcggggttcctggtatcctcatcgagcccaccctcgtgcagcaggtcctcccagaaatcctcatttaactctccgttagatggcttgattttcccgtgttcagagctactggaagcaacatcttgttgcgccttgcctccattggcctcaacagatgaactttcaagatctgatggaacaccattgaaaagtgaatccactggatcatgtggttcaaacattacctgtgacacttgctcggggctagaaccggtacccatgctatcaagttcaggtccctggtcaatgcggcgccttcttttctttgagacgaactcttcaagctccttcctcatctcactctgggagaacagctggcgtatgaactcaggattatgcataactcgtgacaagaatgccatcatgtgctgttgcttttgctcagtaccttgtagcttctgttccatagcttgcaggtctgactttgtgttttgctgctcctgcctcagcttcaccacttcagccatcaacagatgtttgtccctcttcaactgatcaatctctccctcatatccgaagtgccctacctcaaggaatgagccaagagattgctgacttggagatgaattcggaggtttccgacgctttatgcttttaaggagatgcttctgtcctctcagaaaaccctcatttgcaaattcccacttgtcaggatccaccttcctgaagccataggtattgagctgccggacgaagctggagaagttgttgtgcttgaagtacctcggcagcagcacgttcccaaagaggtgaggatcccacaccacgaagctgttgttggtggcgctccacgacacgacggcgtccgtggtcgggtcatccaccatgtcgtacgtcttggtgaggaacggcggtgggccgccgtcggcgagcccgtccatcggcctcggcggctggccattcgccacgcccgtcgacggcccgctctccaccttcaccgggttcaccactcggtagttcat

SEQ ID NO: 21697 - DNA, 1983 bp, Oryza sativa
  Clone ID: TF_OsC561_1
cgccctgcacccgttgccaccaccaccgccttctccgccgcgccgcctcctctcgcgtctcccgctcgtgcagggcgcgcgtcgtcgggcgagctgctgccgtctccgtggccgtggctgatcagaactagttggcgttcgatcggaaagtcgctgtcttttggcgactcggtgagaatttgcgccgcggttcaatgtgaaaaattttggcccgtggcgagttggatttggcgccgagtccattcaggtggttaagacttgttcgtgggagagcgaagctgcgcgcgttaagaccgggctccgttcttgcatcgtgcagagcagctgctggtttgagaattgagaggcgcggttgacatggagagttccaacctgggcggcggcggcggcggaggcggcggcggtgggccgccgccgttcttgatcaagacgtacgagatggtggaggacgcggcgaccaaccacgtcgtgtcgtggggccccggcggcgccagcttcgtcgtgtggaacccgctcgacttctcccgtgacctgttgcccaagtacttcaagcacaacaacttctccagcttcatcaggcagctcaacacctacggtttccgaaaaatcgatcctgagagatgggagttcgcaaacgaggatttcataagagggcacacgcaccttctgaagaacatccatcgacgcaagcccgtgcacagccactccctccagaaccagataaacggaccactcgccgaatcggagaggcgcgagctcgaagaagagatcaaccggctcaagtacgagaagagcatcctcgtcgcggacctccagaggcagaaccagcagcagtacgtgatcaactggcagatgcaggcgatggaaggcaggctagtggcgatggagcaacggcagaagaacatcgtggcctccctgtgcgagatgctgcagagacgcggtggcgccgtgtcgagctcgctgctggagtccgaccatttcagcaagaagaggagggtcccgaagatggatctcttcgtcgacgattgcgcggcgggcgaagaacagaaggtgttccagttccagggaattgggacggatgcaccggccatgcctcccgtgcttcctgtgaccaatggtgaggcttttgacagggttgagctgagcctggtctccctggagaaactcttccagagagcaaatgatgcttgcacagctgctgaagaaatgtactcccatggtcatggtggtactgaacccagcactgctatatgtcctgaagagatgaacactgctccaatggagacaggcatcgatcttcagttaccagctagcctccatcccagctcacccaacacagggaatgcccatctccatttatccactgaactcacagagtctccaggttttgtgcagagtccagagctgccaatggcagagattcgtgaagatatccatgtgacaagatacccaacacaagctgatgtaaattctgagattgcctcctccactgatacttcacaagatggcacgtcagaaactgaagcttcgcatggaccgaccaacgatgtgttttgggagcggttcctcacagagactccacggtcatgtttggatgagtcagaaagacaagagtctcccaaggacgatgtaaaagcagaattaggctgcaatggcttccatcaccgggagaaggttgatcagatcaccgagcaaatggggcaccttgcttcagccgagcagactctgcatacctgatgcagtaataccatttgcgcggattcatagttcgtgtgtaaattagcgaagatgtaaattatagcttagatcggattagaggcttgcgtgttactttacagatttcaaccttttattagattacaataggtctttcacaatttatgattctgttctatccgctgactactgtgcataaattttttttagtagaccatatccatttttgtactccattgcccttctaagattcctcgttaaaatctc

SEQ ID NO: 21698 - DNA, 1345 bp, Oryza sativa
  Clone ID: TF_OsC84754_1
gcaaaaaattgtcaatatataccattaagaatgatggctcaactttacatcaccagacatatactacacagcacgccggatccgcaatataaattggacctatcgctataaaactatcactataatacaattacaccgatatacaataagagctatcacaaaaatggttggacaaatcggagccacttgatctacttttggctactattgcttagataacccagcttctgcgctaatgcatcgacatatctaggtcttcttcgctccatccctggaatcccagcatcatctcttgctccttcattcagaagctcctcccagaagtcgtcggttaactcggtttcgttgctagcctgatttcgtggctgatttcgagtcctgttgacatcctgcttgcccttcccaagaccctggatgttcagtgctaaattctccagttcagactttgcaggctcatcattcagttcagcaaatggccttggatcaaacagcaatgtcgactcgagttgatcgccctggctgacctccccggggttgagaaatggcactatgtctatcgacctcgtcctcttcttcgagaatgtgtcctcgagccccttcattttatcctgctggtgaatcaactggtgaaagaagtcagggttctgcattgctcttgccaagaaacccatcatctggacctgcttctgctccgcatgttgcagcctctcttccatggctcgcatattggctttcgtgctttgctgcttgtgccttagtttcacaacctccgcgagtaagatgttcttgtcacgctttagcctgtcgatctcttcatctaatccgaactgaccaacctcaaggcaggtgccaagtgcctgctgagatccagggagataagacaatggtctcctcctcttaatcatctttagaagatgcctctggcctctcaggaaaccatcattcgcgaattcccatctgtcaggatcaatctttctgaaaccctgaaatctcaaactgtagaaatgtgatcgcttgttcaggtaattcgtccggaccaagaagtaggtgttgagctggcggacgaagctggagaaattgttgtgcttgaagaagcgtgggaggaagacggcggcgaagacgtgggggtcccagacgacgaagctgctgcccgcgcggccccacgagacgacgccgtcggtggccgggtcggccaccaggtcgaacgtcttggtcaggaacggcggcggcccgacctcgtgcagcccctccatgggcctcggcgcctccccctcctccggcgagctcggcggccactcctccttcaccatccccggcatcatcttctccattcctgcagcccggg

SEQ ID NO: 21699 - DNA, 1484 bp, Oryza sativa
  Clone ID: TF_OsC8038_8
atggagtgggaggaggagagcgaggcggcgcgtcagaaggcggcggcggcgtcggcgtcggtggtgcccgcgccgttcctgaccaagacgtaccagctcgtcgacgaccccgcgaccgaccacgtcgtgtcgtgggaggacgacgacggcggcgagtccgcctccagcttcgtcgtgtggcggccaccggagttcgccagggacatcctccccaactacttcaagcacagcaacttctcctccttcgtccgccagctcaacacatatgggtttaggaaggtcgtgccggagaggtgggagttcgccaacgagttcttcaggaagggcgagaagcagctgctgtgcgagatccaccggcgtaagtccgcggcggcaacgtggccaccgttcccgccgccgccgccgcctttctttgccccgcgccatttcgcggccggtgccttcttccgccacggggatggcatgctccatggccgcttgggcgcgttggtgacgacgacggagcggcgccattggtttgagagcgcggcgttgccggtggcgccgtcgtcgcggctgctctcgcagctggggccggtgatcgcaccggcgcgccgcgcggcggcgacgccggaggaggaggcgctgatgcaggagaaccaccggctgctacgcggcaacgcggcgctggtgcaggagctggcgcacatgcgcaagctctacagcgacatcatctacttcgtgcagaaccacgtgcgtcccgtggcgcccagcccggccgcggcggccgcgctgcacggcctcggcgttctacggccgccgccggcgggcgggaaggcgcccgcgtccgaggtgcgcggcgcctccggccggagcgccacgtccagtagctcgctcacggtggccgaagaccagcccacgctgctggctctgcggctgccgcggacgacggagaagatcatcaacgaggtgtccggcggcaacggcggcggcagcaccaagctgttcggcgtgcacctgagcagcgccgacgagcagacgtcatcaggcgcgagccgcaagagatcaccgccgcaagagcagcctcctacgtcgccggcgccgaagcggacgctggtggtggagcacagcgagctgagattgagcatcgtgtcgccaccgtaggaggatcaggccgagcacggcggcgcggacgtgaagccggaggcggcggatccgcatcccgccggcggcggcggcggaagcagcacggaggcgtcgccggagtcgcacccgtggcccatataccggccaacccccatgtaccacgcggacaggcccacttgcaacgggccggacagggccgggtccgaccaagacgggtccagctccaggtgagttggcccccccaaccctgtagaagcttttagacccctatattacttaattgcccctaccctacactattatacgcaactaattatgattagtacgtaattagcggcgaaataatattactaccacta

SEQ ID NO: 21700 - DNA, 1957 bp, Oryza sativa
  Clone ID: TF_OsC8038_2
atggcggcggatggcgtgctggccggaggcggtgggtgccgcgaccacgtcggcgcgacgacggcaagaggcgatgggcggcgcgacaatagccggcggcggcacgcgtgcgtcgacggctgggggcaggaccgcgcccgcacgaggggagacgacggccagcggcgctatgcgcagtgccgcggtggctggggagatatttggagatggggagggttgattaggaagcaaccagacaccacggtgtatccaggccagatctgcgcggccgccggcggcggcggtggcatggctgaccagaccgctgctgccgttgtcgtcggaggaggagcggcggcgacgatgggggagccatctccacctccgccggcgccggcagcggaggcggcgggggtgggggtggggcagcagcagaggacggtgccgacgccgttcctgaccaagacgtaccagctggtggatgacccggcggtcgacgacgtcatctcctggaacgacgacggctccaccttcgtcgtgtggcgccccgccgagttcgcccgcgacctcctccccaagtacttcaagcacaacaacttctccagcttcgtccgccagctcaacacctacggatttaggaagattgtcccggacaggtgggagttcgccaacgactgcttccgccgaggggaacggcggctgctctgcgagatacaccgccggaaggtgacgccgccggcgccagcggcgacgacggcggcggtcgcggccgcgatcccgatggcgctgccggtgacgacgacgcgggatggctccccggtgctgtccggcgaggagcaggtcatatcctccagctcgtcccccgagcccccgctcgtgctgccgcaggcgccgtccggctccggctccggcggcgtcgcgtccggcgacgtgggggacgagaacgagcggctgcggcgggagaacgcgcagctcgcgcgggagctcagccagatgaggaagctctgcaacaacatcctcctcctcatgtccaagtacgcctccacccagcagctcgacgccgccaacgcctcctccgccgccgggaacaacaacaacaacaactgctccggcgaatccgccgaggcggccacgccgctcccgctccccgccgtcctcgacctcatgccttcctgccccggcgccgcctccgccgccgcgcccgtatcagacaacgaggagggaatgatgagcgcgaagctcttcggcgtctccatcggccggaagcgaatgcggcacgacggcggcggcgacgacgaccacgcggcgacggtgaaggcggagccgatggacgggcggccgcacggcaaggacgaacaatcggcggagacgcaggcctggcccatttaccggcccaggcccgtttaccagcccatccgggcctgcaacggatacgagtacgaccgagccggcagtgaccaagacggtcacgttcagttgcgtacttgcgtcaacaacctcctggtcaccggcgccggcaccctcgacgctggacgagagtacgagaccaactccctacccaggccacgacgcgcaaagaacagcaacgacgtgccagggatgcccaactcgttgggccaagcacccagcccggtcgcctgacatcacctacccttatgtctatgttatgttctatcattttgctgaaacaatactgaaacgtcaccctatatgtgggaggatactaatcttccacctatgaaacacggtttacccgaggggtttacctgcttgtatctaggtttggcaggcgtaagaattgatcaatggtaacttgtcaaatctgtatgatagctactttgtgttgtagctactgatagctttttttttttgttcttgcctgctctatctgattgcaactaacttctggtagtactggcagtctgccacactgtattgattccaaaattaagtaactttgactgtttcagattctggc

SEQ ID NO: 21701 - DNA, 1339 bp, Oryza sativa
  Clone ID: TF_OsC106512_1
atggcgtcctcctcctcctcctcctccctctgccgactactcatccccaggccgaccacccgccgcttctccggaggaggaggggaggggggaatggcggcggcggcgccggtgaagcgggaggtgaagcccgaggcgggggaggggtggggcgggggtgatctgggggtggtgccgccgccgccgcggccgatggaggggctcggggaggcggggccggcgccgttcgtggcgaagacgtacgagatggtggcggacgcggccaccgacgcggtggtgtcgtgggggcccggcggctcgggggcctccttcgtggtgtgggacccgcacgcgctcgccgccggcgtgctcccgcgcttcttcaagcacgccaacttctcctccttcgttcgccagctcaacacctacgggttccgaaaggtcactccagatcggtgggagtttgcaaatgaagccttcttagctggtcagaagcatttgctgaaaaacatcaagaggaggcgtgtttccaagcctctcgtggattcacaactaagaaataaagcaagtgttgtttttggacagcctgaggctcctggtgaggttgtgagcttgaagagagaccgtgcagccctcagagctgaggtcatcatgcttaagcagcagtacaacgcctgtaaatctcagctcattgccatggaggagatggtccgcaacatcgagagaaggcaacagcagaccatcggcttctttgccaaggtactcaccaacccggctttcgtgcagcaggttctactcaactatgtgaataagaatggcctaagaggcgccgcgaaaagacaacggctgatggaaaacgaagaacagcatgctgattcgccattgaacaaaggtatggaagctgcatctgtgatggaagctgatgtttctccagggagcactggctgtggcacagttgggaaagtggagaccactccaatgtgcaatttccagaatattgagaatatgtgtgatgatgtctgggaagagctggacgccttacctgaaactggaatggagcaggaagaaaaggctgggattggctccttcgatgtcgaggagttcgtcggaaggccttgtggttgggttgatgactgcccataccttgtggagccgatgcagttcgtggaacactagaggcatgagaagaatacaatctgtccttagaatagtggaacgtgtttataacgtctgaatatctgtatatcaattacccacttcgatagaagtctgtactatgaatagcataagctcctggaacagagcttaaatataggaaacgaacactctcaggtaatgcaagccaggagtttgtaggatt

SEQ ID NO: 21702 - DNA, 745 bp, Oryza sativa
  unsure (1)..(745): unsure at all n locations
  Clone ID: TF_LIB4506-021-R1-K1-D9
ccacgcgtccggggggcgggtcgctgccgccgttcctgagcaagacgtacgagatggtggacgacccgtcgacggacgcggtggtggggtggacgcccgccggcaccagcttcgtcgtcgccaaccagcccgagttctgccgggatctgctccccaagtacttcaagcacaacaacttctccagcttcgtgcgacagctcaacacctatggctttaggaaagtagatccagaacaatgggaatttgcaaatgaggatttcataaaaggacagcggcaccggttgaaaaatatacatagacgcaaacctatattcagccattcatcacacagtcagggtgctggaccattaacagataatgaaaggaaagactatgaggaagaaatcgagaggctcaaatccgataatgcagcactgtcctcagagcttcaaaataatacgttgaagaaacttaatatggagaaacgaatgcaggctttggaagagaagctatttgttgtggaagatcagcagaggagtctgatatcatacgtcagagagattgtaaaggcaccaggatttctttctagctttgtacagcaacaagatcatcacagnaagaagaggagactgccaataccaatctccttccatgaggatgcaaatactcaggagaaccagatcatgccttgtgacttgaccaactcaccagctcagacattttacagagaatcatttgacaagatggaatcatcctttgaactcat

SEQ ID NO: 21703 - DNA, 1104 bp, Oryza sativa
  unsure (1)..(1104): unsure at all n locations
  Clone ID: TF_OsC211574_1
gggcacgagggcgcagttcgcttcaccgttcccggagttccacatcggcaacctgcagccgaatctgatgctctacgccggcatccgcctcccgcccgccgatcgcgccgcccccgctcctcgcccgccgagaatcatcatcagcaccgacctgacgattggcagcccgggtaaacccgacgacgccgcgtgctctccctcatccggcggcgagaagatcgacgacaccaagccgcgggggtttctcctctttggacaggcaattctaaccgaggagcagatcaagaacggcaactccgatggtcgtccggcctcgccgaactgggacgccgagaaggcgcctaacacctcggaaggctccgactccggcgtcacccagggcagccccaccaagaacaccacgccgtcgtggagcctaccgtattttggaggcaacaacatcagccgcgcatccgagtacgagctgaatcccgggcagtgcaaggtgttcgtcgagtcggaaaccgtcggccggagcctcgatctctcggcgctgagctcgttcgaggagctgtacgcctgcctgtctgatatgttcagcattggcagcgatgaactgaggagccatctggtgtaccgcagccccgccggcgaagtcaagcacgccggcgacgagccattctgcgcgttcgtgaaatcggcgcgtaagcttaggatactgacagatgctggcagtgacaacctgggagattagaagtaagtaataaatcagcccgaataacttagggcgctactcctagtcttttagaagncaaaaataagccgagagctgcatgcacgtacagctgcatgagctgcggtttctccttgctccagtccagtctagagatttttattcagggtaaagctgatgcagtcttcagttaattaggtgttttttagtcctttttacagctttctcgctaggggtttcaggtaacaactactagcgcaaagtgcagacagaatgtagtctttgcaccttggtcatcaaatcaaatgtactggtacttcttttattctcattcggcggatattgagccttaatttgtttcacgaaaaaaaaaaaaaaaaaaaaaaaaaaaa

SEQ ID NO: 21704 - DNA, 552 bp, Oryza sativa; identical to SEQ ID NO: 12161
  Clone ID: TF_OsC109_3

SEQ ID NO: 21705 - DNA, 443 bp, Oryza sativa
  Clone ID: TF_uC-osflcyp128d03a1
accataaagttgctgcaggcatacacacataatacattagttaacacagagttggtcgccagcaagaatattgtaacatgcatgatctagctggatggaacttccagtcacgaaagtaaatcatctcagttttttcacagcgccaataagttagaacaagatgtgaaaaaaactgagcaaaagaaaaaaaatcgatgtagtagctaatttccaatgttacacatcagggcgcaggcagtgggttggccaccagttcggtcgttccgcaggaacatcatgaccgtccagtcagtgaagagcaagaaggaagaggaagctgacaagcagcagcagcagcccgctgccaatgccagcggcagcaacagctctgcctttgtgaaggtcagcatggacggggcaccctacctgcgcagggggacctgaagatgtcaacagctacagga

SEQ ID NO: 21706 - DNA, 726 bp, Oryza sativa
  Clone ID: TF_OsC6551_1
tagtggatcccccgggctgcatacaaacactacagtttgggagaagagaatccatgaagagctcttcagttgcaccaaggctgaaacaggagagacaagatgactgtaagtttcaggaaggtgatgtgaacagccttgagcttcggcttggcatatcttccgacaatgaccagatcagtggtggtggtgctgctagtccatggcttggtgtgttagtgcacccttggagcctggctgcaaggcaagggaaggcagccttggagcaagctcaccagaggcctaatgaatgtgctgtccaaagagaaaaccgcgcggcttcatcagctcagctggtgggatggccaccggtgcgcgcattccgcaagaacctgtccaccccaaaacctgcagatgcagatgacctgatgaacaaggtgaagctctgctctgatgagggccatggctccagatgtgcagcccaagagaggaggtcatcatcaaccatgtttgtgaaggtgaacctggagggctatgctgtcggaaggaagatcgacctgaaggcgcaccgcagctatgactctctgtcccaggctctgcagagcatgttccatggcttcttgtcagatggcattgcaactaagagacaatgagctgcagcagatggaggagggcagcaagaagaggtatgtgctcgtgtatgaggataatgagggagaccgcatgctcgtcggcgacgtcccatgggag

SEQ ID NO: 21707 - DNA, 507 bp, Oryza sativa
  Clone ID: TF_LIB4370-026-R1-N1-D11
caacaagtacacgcagctgatcgttgttgatgatgatgaagaaggatacaggagaacagtaggatacctgtgcagattgagctttcttgttgaaatctctactgcagagttggggacattactagttgaacggaaattactagggctgctactactgctactagttgatacaaaatcataagctcattcaagctgtacatactacggcgatgctcccggttgtcctctttgctctctagctccctaagttgtcgctcccggcgtcggttagtatggtaagcctcctcgccaacttaatgaactcgctgaatggctcgtcgccggcgtgcctcacttcgccggtggcgccacggtagagcacacggctcctcagctccgcgctgtcgatgcagaacatctcggacagccggccgtagagctgctcgaacgaggccagcgacgagaggtcgaggttgcggccgaccgtgtcggactcgatgaaacacctgtgcacgtgcccagggctcc

SEQ ID NO: 21708 - DNA, 480 bp, Oryza sativa
  Clone ID: TF_jC-osroLIB3475019d07a1
aaaaaaatgtgataagattcactttggtaggccataacacccatatctgaactccccgtacaggatatgctcagtattcagtaccatcctgtgcatatgtggcggtgtattatacagatgcatgcacgtgctgatcacagcgaggtgactctacggtgtacactatactaacactactgtgcgctggccacagatgtagtttgacacgaaatgcaaggtgattgatgacaacagctacgagatttcattcgtcatgcttatgaaattgctgaaacactacacatttatgatgagagaaacgtgaacaaaataatcccgttcacgtacaattttattcgaagtagtaaagactagtactagtagcttaatttgcagtcagttacaccagtatcttgagccgtttcaccgacttggcaaaggcctcccatggcacgtctccgacctgcatccagtctccttccccatcctcgtaggtgacag

SEQ ID NO: 21709 - DNA, 290 bp, Oryza sativa
  Clone ID: TF_LIB3479-005-Q6-K1-H6
cttccggcatgaacacagatggctacgcactccatctgaaggctatcacggaggcatacctgaggccacagcaggaccagggattgctgtacctcaaggtcagcatggatggcagcgccgtacctgaggaacattgacctcaagacttacacgaactacaaggacctgtctactgggcttgacaagatgttcagaggcttaagtactggcacggatggcttatctgactaccgtaaggatggcgaatatgtatctgacttatgacgacatcgatgcagattgcatgctcg

SEQ ID NO: 21710 - DNA, 1100 bp, Oryza sativa
  unsure (1)..(1100): unsure at all n locations
  Clone ID: TF_OsC185566_1
atgcctcggcgaactgccgacgacgacgacgacggcgccggcgcaatccacggcgtcttccggctgccgaccgccggcgacggcggcgaagcggcggagtctgatcagcacagatcttcgcctcgggctcaccctctcctccgtcgtccacatcgacggcaacaacccttctaccccaaggcaagatttcgatctctgatcattctgcacacctactgctttaatttcagagaaattttaagatacttgagaaggagttccctcacgacggcgacagtgacagctgatcgaggcggcggcggcggcggccatggacggcgacggtcactgttcgtgaaggtgtacatggagggcgtccccatcggcaggaagctggacctgctgccgctggacggctacaaaggtctcgtcgcacggctcgcctccatgttcagagcatccatcacctatcatcattgccatcgacagttcgccgtcgtcgggatgaagacgaacaaggttcatcatgttctgacatacgaagaccaggagggagactggatgatggctggagacgtgccatgggagtatggcaagctagctcagctctgaccaccctaatttgtatatttatttagactgattatagtgattaaattggcatgagttttccnaaaccacgaaaccctgatatatttgtcttttttcttctgttgattgaattctcaaattatatcttttgaactaattatgggattcncccttaatgctngtgtgntgttttttggatgaggcaggctggttccctgaccaagcgtgaagagattgaggattcgcaagagcggatgacaagtactgctatagctgttgaataattgggttaaccacggatggtcaattaattcttccacgagttcttggatttcattcattcttactttgctcattttggtggaccaatttagatttgagatgattgttttcgggagcgaaaatttacctagtaaaagcatagtgatattgagccagaggatattgtcacaaatatattgtacacactagtaaaagaaaagaaacatatactatcgaaatacccttttacttctcaaaaaaaaaaaaaa

SEQ ID NO: 21711 - DNA, 1295 bp, Oryza sativa
  Clone ID: TF_OsC20595_1
ggtgttcgtccgtgtcctcttctccactccacacacgcacacgcacaagccaagcagcaagcagcggcgccgatgagaggaggagtagctgggcccaccgccggcgagccgccggggacggaggcggaggcggaggaggtggaggagagctcagctggggacgacgaggagctggagctcgggctcagccttggctccaagaaacagcagcagcagcagcatgcgccgtgccgaatcctgacggccagggacctgcagccggcggcggcgctgtcaccggactcctccgtgtcgtcgtcatcccccgcggcggcggcggcggcgggggggaagagggctgagggccccaccgccaccacctcgcctgggacggttgcttccggccatccacacagctttggagtggtgggatggccaccgatccgacagttcaggatgaacagcctgttcaatcaggctaaagaaaacacatctgaaaccgacaccaagaagaccgccaccaatgaatctgatgtgcagaaggacaaggaggagggcgaaaagaaaggacgggttgctggatgggtgaaggtgaacatggatggagaggtcattggaaggaaggtggatctcaatgcgcaccgctcatacaagacccttgcattagcccttgaactcatgttcacgaagccgtccattggcctttgcgcttctcataatacaaactcgctgaaactactagacaactctgccgaataccagctcacctacgaggacagggatggtgactggatgctcgttggagatgttccttgggaaatgtttgtcagctctgtgaagaggttgaggatcatgaggacatcagatgcgaatggtcttggtcagcgataccagggaattcacagaaccattgcttcaacaagaggcagatcctgagagcgtgtgacaaggaaaagagctataccgctggtgaagcttggagcgtgcttgatggttaattacttgtccagttaaaatagcagaaggctagtaagaaagagccacagggctcacccggttctgttatatttttgcctttgtggtgcctgtttttgtttgcactgtcgatctgcaagagcatatggtcgccttgctctgcttgcatgtacaagtatgtctttctagtagtttttatggtgtttgatgatgatccttgtgcctacctgattactactgactcttgcacagcctcacaaatctctatgaattagccctggagtttcattgattaaaaaaaaaaaaaaattcctaatatgtgtgatggactagttctctcc

SEQ ID NO: 21712 - DNA, 932 bp, Oryza sativa
  Clone ID: TF_OsC16890_1
tgatgctgagtgatcccgtccactagctggtgaattggagagacggatggagctcgagctcggcctcaggctcgcgctgccgtcgccgtcgccgtcgccggcgacggcgacggcggctgggagtgagcttgaccttctcaacagcgcgccggggtcctgccgcaagaggggcttcgaggaggcgctcggtgggttcaaaaccgacgacgacaacgacgacggcaatggccgcggcggtgacggcgattccgacggcgaaatgggcaacaagaggaggaagctggtggggtggccaccggtgaagtgcttgcaccggcggcgcgacggtggctgcggtggcggatatgtgaaggtgaagatggaggggttggccatcgggaggaagctggacttgtccatcctcggctcatacgctgagctgctcgacacgctccaccttatgttcccctccactaaccaagaggatgggcacgatcgtcgtcgacgtcacccatacgctgtcacctacgaggatggggaaggagactggatgcaggtcggagacgtgccatgggaggcctttgccaagtcggtgaaacggctcaagatactggtgtaactgactgcaaattaagctactagtactagtctttactacttcgaataaaattgtacgtgaacgggattattttgttcacgtttctctcatcaaaaaaaaaaaaaaaaaaaaaaaaaaaaaaaaaaaaaaaaaaaaaaaaaaaaaaaaaaaaaaaaaaaaaaaaaaaaaaaaaaaaaaaaaaaaaaaaaaaaaaaaaaaaaaaaaaaaaaaaagggggggggccgttttaaaggacccaattttacttccccgggtttgcaaggtaaaaatttttttatggggcccccaaaattaatttccggggccgcggtttaacaccggggggaggggaaaa

SEQ ID NO: 21713 - DNA, 1153 bp, Oryza sativa
  Clone ID: TF_OsC165755_1
atggcgtggaggagagggttcggccgggaggaggaggacgcggcggcggcgggggagagcggcctcgagctctgccttggcctccccgcctacttctcctcctcctcctcctccaagccatcggagggatcaaccgctgctcctgcttttgctctccgatccaatggaaccaatgcctccaagccaagcggggcagcggcggcggcgccggttgtggggtggccgccggtgcggtcgttccggcggaacctcgcctcgtcgtcgtcatcgtcgtccaagcaggcgccgccgccgccgtcgtcgtcgccgcagaacggcgacaaggcgagcaaagacggcggcgcggagaagggcatgttcgtgaagatcaacatggacggcgtcccgatcgggaggaaggtcgacctcgcggcgtacggcggctacgcccagctctccgccgccgtcgacaagctcttccgcggcctcctagccgctcagagcgctgccgctgacggcgaggccgacgcggccgccgccggagagatggtcggcggcggcgagtacacgctcgtctacgaggacgacgagggcgaccggatgctcgtcggcgacgttccctggcagatgttcatcgccaccgcgaagaggctgcgcgtgctcaagagctccgacctgccgccgccgtcgctgatgagggcggcagggagcaggaagagggcagcagctgacagctgaactaatcactgtcaatttcagctgctgctgccgatgatgatgaattgatcatggtgtggtgcttggattgagatcctctgcagtcaaatacacggtcctttgtcattgataggtgggcctagggattatcgggcctatatgttaatgataacgtcacgtgattttaactgcagaggattttgatctgtggtgcttggctttatggccattttgatgtctttgggctgcataattatatgtatacttacgagagatcatgacggtattagtggtcatgattagtagtacgatcgagtagcatggaacagtgttgttaattactagtagctgggtgattaagctaatctatggcacctttggtggtgtaattttggacgcaggcaggcctcgggcaaattagttatgtgttttgttaattaaaaaaaaaaaaaaaaaa

SEQ ID NO: 21714 - DNA, 1148 bp, Oryza sativa
  Clone ID: TF_OsC72583_1
cccacgcgtccggtcagaggtcacacagctcatcgtctcgagctacctagctggaagaagaagaggaagaagaggaggaggagctcgtcggagtttagttggtgagttcgccggagagatcgatcatggagaatctgaaggcgacggagctgaggctcgggctgccggggacggaggaggaggcggcgccgccgccgtcgacgcccagggccggaagcaagcgcgccctcgccggcgagcctgatcaggccaagatcaagcccgccgccgccgccaaggcgcaggtggtgggatggccgccggtgaggtcgtacaggaagagctgcctccagccgacgacgacgacgacgaagagcaagccgccgccggctgccgcggcggcggagacgcagcagaaggaggatgtcgccggcgccggtgggctgttcgtgaaggtgagcatggacggagctccatacctgaggaagatagacctcaaggtgtacaagggctaccgggagcttcgcgaggcactggaggccatgttcctctgcttctccggcggcgccgccgccgacgccgccgtcaacccgtccgacttcgccgtcacctacgaggacaaggacggcgacctcatgctcgtcggcgacgtcccattcgagatgttcattagtacgtgcaagaggttgaggatcatgaaggggtctgaagcaagaggcctaggagcaacaaggggttaaaaactgaacaacaacaagaagaaatcatcatcatgtgtgcatgagcaattcttttgttctttttgggttctccaagacatgcaatcatctcatctcctcattgcaaccttcaagaaagagagagagagaaagaaaaggaaagcaaaaaaaaaaaaagatgcagtgaaaaaaatatgtgaagcttaattggagtcatcagattgcaaagcatgcatgcatgtgtggatgtgtggctttaatttgtttttttcctcttaattaggtgttagaaaacacagaaggaatggaggttcgagttgagcctccatgtgtgtttgtacaaagcaaacatcttttttcttttacatgaatggttgattacttttgtaactggagggaagaagaatgcatgtatgcatgggctgtgtgtaaaaaaaaaaaaaaaaaaaa

SEQ ID NO: 21715 - DNA, 3513 bp, Oryza sativa
  Clone ID: TF_OsC109_1
ttccatccgttcctccgatcagttccaacttccaacctccgatcccaacgagaaaaccaatactgacacctctgcctcgcaacgcggcgcgcggccgtgcagcgatcgatcgaccggccggagtccggcatgcaaatgggagctgcctggcgcgggcggcggcggcggtgatgggcgcggcgagctctaggctggagaaggcgctgggcgagcagttccccgagggcgagcgctacttcggcctcgagaacttcggcaacacctgctactgcaacagcgtcctgcaggcactttacttttgtgttcctttccgtgagcaattactggaatactatgcaaattacaaaagcaccggagattccgaggacaatttgttgacttgtctagctgatcttttttcacagataactctagcgaagaaaaaaactggtgttcttgcaccaaaacgttttgttcaaagagtgaggaaacagaatgaattgttcagaagttatatgcaccaggatgcccatgagttctggaatttcttagtgaatgatattattgatattcttgaagaagattgtagaactgcaaatagttctcctgagactactcctgaagaggtctcaaatggggcagccaatgctttagcaaatggagccagagaaaggccattagttacattggtgcacaggacttttcagggtattttgaccaatgaaaccaaatgcctaatgtgtgatactatcacagcaaaagatgagacgttttttgatttgagcattgacgtggaacagaatagttcgctcacaagctgcctgaagagcttcttttccactgagattttaaatggcgaggataagttcttttgtgacaaatgcagcagtttgcaagaagcacacaagagaatgaagataaagaaggcgccacacgtattggtgatccacctgaagcgcttcaagtacgttgagcagcttagccggcataagcctctcccaccaccaccaccaccaccaccactacacactttgctcatctcatctccctccttccctcctataggaatccaaacccgccgcatcccggttcatgtcctgccgctccccatgtcgccgcccctcgagctcgactacataggcctctcgcctccgccgccgccgccctcctcctcctccgccgccgccgcccgcgcggacgacgtcgacctgaagggcaccgagctccgcctcggcctccctggctccgagtcgccggaccgccgccctgcggctattgccgctgccgctgccactgccaccacccttgagctgctgcccgccaagggtgccaagcgcgtgttccccgacgaggccgcgctgacgccgcccactgccgccgccgggaagggcaaggcggcgagggagggggaggaggtgggggctgaggaggaggacaagaaggtcgccgcgccgccgcagccggctgcgaaggctcaggtggtgggatggccaccaatccgcagctaccgcaagaacacgatggcaaccaaccagataaagagcaacaaggaggatgttgatgctaagcagggtcagggtttcctgtacgtcaaggttagcatggatggtgcaccatatctgaggaaggtggacctcaaaacttacaagaactacaaggacatgtctttgggtctcgagaaaatgttcattggcttcagcaccggtaaggaaggtgctgagaaccagaaagatggtgaatatgtgttaacctacgaagacaaggatggtgactggatgctggttggtgatgttccatgggagatgttcaccgactcttgccggaggctcagaatcatgaaaggctcagatgcaattggacttgccccaagagcaggggaaaagtccaagaacaggaactagaatggttattgcccacagttgaaagcaaaacggagatattaattaactgcagggcagttcctcaaaaccataatttaatagttttacaggatcaccatatgatctgtattacatggtttgctattctgcaagtaaaaaaaaaaactcttttaagactctgttatgttaggtttgcaacatctcctagagatgtacgctctattcggttgcacgtgtctttgtatgtgtagtatttccatccatgtaaatggttggtatgcagtgcgctaccgctattattgagcactcctacctatcctgcaagtgttgtcctgaaacgtatgttcccgtcacgtaagtgtttaaatgtttttaagaggttcctgaagatgtattatttatatgacttcatttggagcacacttatgctagtttgtttttgcaccacacctcaataaaaaaacaaaatttcgttgaaatttttaattcgccacagcttcaaagctccacccgatcagggaacctcccccccggcgcgctgcctccggcgtccgccgcagaaccgttgctcaacttcctccttgactctggcatcaggctctccggcagattcccgccggcgctctccgggctacgaatcctctactatctcagtctgcccctcaacgcgctccacggggagattccacctgctatcgccggaatgcagagccttacagccgtcgacttctccgacaacagtccctccggcgaggtcccggcgaccggccacttcgcctacttctacgccacgtcgttccccggtaaccccggcctctgcggcgccttccgctccccgtgccgctcccacgccgtcgccacgacgtccaccttcggctcccgctcgtcggcctcgaagctgctcctcgtgctcggcttcagcgctccgtctatcttgaacaccggggtggcggtaaaaagctgtcgtatcgagttgttttccctctggagcttaaacttatcaatactgttgacaactcagacttggaatattccctttttgctgtgctagttcatgttggaagtggaccaaatcatggccactatatcagcttagtgaagagccacaaccactggttgttcttcgacgacgagaatgttgagatgactgatgagtccatggtacagacattctttggctcagcacaagagttcagtggtaacactgataacggctacatactcttctatgaaagccttgctgaaaaaagttgatgtctctctcacatttttcgatagttatacagttatcattttattaccacactgcctgcacctgataatatagaagattcagtaattagaataagttgaatgaaagaccattcaactttagatattatatggtggaatctgcggtaggcaataaaagaaaatgacgagttttgtggaaggtgctatagcggcataaatccacaggtttcttgttttctgtttatttttctgttctttggtttatgcgtacaggttgtaccaatcctgggataatgtttatttaaagtttaccatgtataaaaatatgcttgtactggaagccgtatggcaatgagtaattttttttttgtttagtcggggtagtgctactggagctcatcgctgggcggaagccggtggg

SEQ ID NO: 21716 - DNA, 648 bp, Oryza sativa
  unsure (1)..(648): unsure at all n locations
  Clone ID: TF_OsC28546_1
gggcgcccttggttttggggtgggggcacaagaaatcactattatgatctgaggattgccctgcagttcagtacaatcatggcatcgtactgtacacacttttggcacctttgtcaagaaatctataacttatagaattacaccaatctgttatatctgaaaaagagtaggtcatttacaaaatatgcagtttgtccactgcacctgcaagatgctattttcccattatcataatcatctgtacaagccaaaaacaggtcatcccccagaaaggtgatggactatggtttgcacaattgatatgtctggaccctaatatcaacgatttgctacttcacagggtcagctccaatcatgtcatggggaagttctgacctcctcataaccctcaacctcttaacagtcgaaacaaataccttccatggtatgtccccagctaacattctgtctccatcattgtcttcatatactaaagtgtatacaccagttccatccaacaaccctgaaaatattttgtcttctgccccttgctctccactttcagcaaagaatagatctttttgagcttcaagaaaaccacggaacaactcttcaacagcagatgacagcttctgnnnagctgtcgtatattttgaaaggtctactttc

SEQ ID NO: 21717 - DNA, 801 bp, Oryza sativa; identical to SEQ ID NO: 12174
  Clone ID: TF_OsC109_10

SEQ ID NO: 21718 - DNA, 1119 bp, Oryza sativa
  Clone ID: TF_OsC157662_1
cagccaacgcatcgtcttccttcttcgtcgtcgatagatcggctctcgagctcacaaccacatcgatcgtctccggcaagccgacgtacgtacgactagctagctagagaggaagcgagaaatggaagccgccgtggggtacgccgccgacagcctcatcaaggccaccgagctcaggctgggcctgcctgggacagccgacgacctgccctccacgcccaggggcaagaagcgcgccgccgcggcggaggacaacaacgccaacgccgccgccgccgacgacgacgagcacgacgccgtcgaggccgcgccgccggtagccaaggctcaagtggtcgggtggccgccggtgaggtcgtacaggaagagctgcttccagcaacagtcagcggcggcgagcaagagcaaggccgccgtgagcagctgcaacaacaaagacgagcccatcaccaagaacgcggcgccggcgccggcagcctcctcggcggcggcggccaacggcgggtcgctggtgaaggtgagcatggacggggcgccgtacctgaggaagatcgacctgaggatgtacaagggctacagggagctccgcgaggccctggaggccatgttcgtctgcttctccggcgccgccgacggtgccaacccgtcggagttcgccatcacctaccaggacaaggacggcgacctcatgctcgtcggcgacgtccctttcgacatgttcaccagcacatgcaagaagttgaggatcatgaagagatctgaagccacagggctaggatcaccaaggcaaatgaagatctaatctaagagcgacaagagatcgatcgatgcattccatcaacttttcatttctttttattttttttcctcccaagccaaaaaggagatgagcttgggggcatcaaagcaaacacatggatgtgcttctgctttgtttccatctttaaaaactagtaggttttaattttatgattttagcagcacaaaggagatgtggagatttgggttcaactctccatgtgtatgtacaaacgaaacagttattatatattgattgttggttactactaaaaaaaaaaaaaaaaaaaaaaaaaaaaaaaaggggggggagcctcgtgc

SEQ ID NO: 21719 - DNA, 1289 bp, Oryza sativa
  Clone ID: TF_OsC125_1
cccacgcttccgtccacgcgtccgcacaactcttcccaatgtcgcctcccctcgagccgcacgactacatcggcctctccgctgcggcggcgtccccgacgccgagctcgtcgtcctgctcgtcctcgccgaacccaggcggcgaggcccgcggcccacgcctcacgctccgcctcggcctcccggggtcggagtcccccgagcgggaggtcgtcgccgcggggctcaccctcgggcctctgcccccgaccaccaccaaggcggcctccaagcgcgccttccccgactcctccccgcggcacggcgccagctccggctccgtcgccgccgccgcagcttgccaggacaaggcggcccccgccgccgctccgccggctgcaaaggcgcaggtggtgggatggccgcccgtgcggaactaccgaaagaacacgctggcggcgagcgcctccaagggcaaaggggaggacaagggcacggctgaagggggccctctctatgtcaaggtgagcatggatggagccccctacctcaggaaggtcgacctcaagatgtattctagctatgaggacctctccatggctctcgagaagatgttcagctgcttcatcactggtcaaagcggtttgcgtaaatcatcaaacagagataggcttactaatggttcaaaggctgatgccctccaagaccaagagtatgtccttacatatgaagataaggatgctgactggatgcttgttggtgatcttccttgggatttgtttaccactatctgccggaaattgaaaatcatgagaggatctgatgctgctggaatagctccaagatcaatagagcagtcagggcagagcagataagattaaccttcgtccggacgagaaaggcaactgatctagcagctttggaattgttcatcgcaagtatcccaaatatctcaatgtctgtgtagtttaatgtgttcatcagacctgtgcattgtatgtctgtaatttgttcctttcagatcgtgcaattgtgcgttgccccctcttttctttgcattgaaggtcaagtcgggctcttgtccgcttatttctctaaatcctagtcagttcaaaaattatccatcatgacacatgaactgatggtggataatatggcaagaagcttttctaatcattcaagcttgaacctcttgtgtgttctactactatattacatgaaagaaaatgtctaatgtctatatgttaatctccaaaaaaaaaaaaaaaaaaaaaaaaaaaaagggggggcctcgtgccgaattcctgcag

SEQ ID NO: 21720 - DNA, 1604 bp, Oryza sativa
  Clone ID: TF_OsC20552_1
tggatccccgggctgcaggaatcggcgcgcggcacgagggcagcaccttatattcttcctacatattcattctccccacaacaacaactaacactactcactcttcattgctttttttttctctctctagctagctagcttgcttctacttcttcttcatcttgatcttgaaactagtcttatcaatctgaggaattaatccatcattatgatgaatcttatatcatttgaaacgcctcctcttgggaggaggagtcaagatggaggcagcagcagcagcagcatcactgctgctacaaccactatcaacaaggcaaaggaagcagcaagccatctagacctcagcctcggcatctccttgtcacccggcggcggcggcggcgacgctggcaccaaggccagcagctgctgctacggcggcggcggcgacggcggcggctgcatgggcagtggcatgctcactgcaggagttcttggcgttgggcatggggggagtagccatgacaatactacgacgagcagtggcggggtcgctgcaggagttcttggcgttgggcatggggggagtagccatgacaatactacggcgagcagcggcggcggcggcagctggacggcggcgttcatgccgagcccgacgggattcatgcacccgtggagcctcgccgcccggcagcagaaggccgccgccgagcaggagcggagcggcgtcgcgaggctgccgccggcgacgacgacgtacatgccaagagctgccgcgaccgtgatttcactgccggcggcagttggctggccaccggtgcacacatcccggcgtaacctcgttgccaccataaataatgtcctgaaacccgacactactgccgccgtcaagccggacagaccgacacaagcaacggcgatgttcgccgccgacgaaaccacggcgcccccgccaaggagcgcggcggcggcgaccgaggccagcaggacattgaacatgtttgccaaggtgcacatggatgggtacaaggtgggcaggaagatcaacctcagggcacaccgcaactacgactccctccgtcgggtcctcaccaagatgactcataatttcttctgccccgcagattattcaagcacaaataagggagaagaagattgtgctaaaagtgacgagttcatatttctatatgaagattttgagggcgaccgaatgcttgttggcgatgtcccatgggagttgttccttgcatcagcaaaaaggttgtacattgccaaaaacccagcacccagaaacaaagaacatgctgaaatcgccaaaaggaaagaaactgaagatgcaatagataactgaaggcacctgaaaagcaagttgatctctgcatatactacaatatgcacttctcatgatctgacatatatagctctcgacttgtgctgttcatcttgtattataataagctatcttcgaagagtaggtttataatgtacggatgcatgttaaaatgcttcttgatcactgtgcatacaattttgcgggcattaggtaagtactctgaaaaatgtactagacacggattcagtatgtctacacaaagtggataagactcgtctaataattaact

SEQ ID NO: 21721 - DNA, 1122 bp, Oryza sativa
  Clone ID: TF_OsC17802_1
ccgacgagctagctctctctctcgatcgatggccatggcggcggagagcatcgacgcggagctgcgcctcgggctgcccggcagcggcggcggtgacggcgtggcggcgaagaagcggcggtcggcgtcgtcgacggtgaagagcgaggcctccggcacggcctgctgcggcggcgccggcgcccgggacgtcgaagacggcgcctcgccggcgtccaaagtgcaggtggtggggtggccgccggtggggtcgtacaggaggagcacgttccagtcttcgtcgtcgtcgacggcggcggcggcgaaggggaagggcggcggcgagacggatcaagggaggaagaataagggaggagggctgtacgtgaaggtgagcatggacggggcgccatacctccgcaaggtcgacctccggatgtacggcggctacagggagctcagggacgctctcgacgcgctcttcggctgcttctccgccgacgcctccgcctccgccgcccacttcgccgtcgcctatgaggacaaggacggcgacctcatgctcgccggcgacgtgccctgggacatgttcatctcttcttgcaagaagctgcggataatgcgaggatctgaggcgagatgatatatatcgaaatcgaaaggcgtcgagctgaagaaaaaattttcgccgatgcatgcatggagtagacatctcacagaaaaaaggcttcatgcatgagagagatgagatctatccgtggacatcgtcatgcatggcgatcggacggctggccaagaaggacacttacacgtggatgcatcttgtttttgttctacgtagatgtgtagatgagatatccaaggatctgaattctaaaaaagttcaggattcagttggatcggagttggtgaggaggaggatatgatcgatcgagcagagctgcagtactcctatgtacagaataatctagctgagattttggttgttggaaatggcaactgctagttctgcagatttgtgtacacatgccttttttttaaagcttttttttttctagcttctgttgtgtcactgaagaaatctgagagctgaagaaagagaaacttggaagtttggtcattttaatttaaaaaaaaaaaaaa

SEQ ID NO: 21722 - DNA, 1195 bp, Oryza sativa
  Clone ID: TF_OsC13832_1
ccggccgggacttcgtcctcatcccatcttctcctccaaattcctcttccacatttcctcctcctcctcttctttctctcaagaaaatcagtagctagccatggcgtcttcttcttctctcaggagcaccagctgcctcgcctccgccgcggagaccgacgccgacaacctctgcctccgcctcggcccgccgggaagcagcatcaccaccaccaccaccaccggcggcgccgacccggcggcgaagaggtccctcggggcgaagcggtcgctggagagcacggacagcatggcctccggcaccggaacttccgccgccggcgacgagcacgacgacgacaccgccgcaccggccaaggcacaggtggtaggatggccaccagtgagggcataccggaggaacaccttccatcaggccgccgccgccgccgccgcaaccaagaagggtggtgatgagaaacagaagcagcagcagcagggaggagggctgtatgtgaaggtgagcatggatggggcaccatacctgaggaaggttgatctcaagatgtgcaagggctacagggagctgagggaggcactggatctcctcttcaccaagtgcttctctgcaaccgcctctgacggatgcagcgatggccagttcgccattgcctacgaggacaaggacggtgacctcatgcttgttggagatgtgccctgggaaatgttcatctcttcctgcaagaagttgaggatcatgaagggctctgaagccaggtgatggtctgatggatgatcaaaggagacaaatcacaggctaggacacaccacatgagaagatggatgatgaatcagagatcatgaatcacatggcatgagatgaatgggatcaagaagggagcagaggactagaagagccctgatggcttgtgctcttcgttgctgtacagagagagtttaggcactgccttgtttcagtgtttctgaatccaagagggacaagatgtatgaactgtgtatatagtcttttaattaggctcatttcttttttcagtttgagttttgtactgtatgagcgaaggctggaaaatatgaaaaaagggagaaatttgacttaagcttggtcatttctccacaccaaagaaaaaaagaaactctgtgttcatatcataaatacagtaccaagccagtattttctcaaaaaaaaaaaaaaaaa

SEQ ID NO: 21723 - DNA, 806 bp, Oryza sativa
  Clone ID: TF_OsC34707_2
atggaggagtgcaagggcggtggcatgtcgccgtcctcctccatggatagcagcacccacccggcgctgtccacgacgtcgtcggcggcgacggcgaggcgggacctcagcaccgatctccggctagggcttagcctctcgacgtcgtcgtcgtcctccctcctgcaggccgccgccgccgccgccgctgctgatgatagcatcccttctactccaaggaacagccaagtgcacgccgattggccgccgatcaagccgttcctcaggagcgccttgcagaaggcgtcggccgctggcggcggcggcgctcgccgacggcgaacgctgttcgtgaaggtgtacatggagggcgtcccgatcggccggaagctcgacctgctcttgctggatgggtatgacagcctcctcatcaagctctgccacatgttcaagacgcccatcacctatgctgatgttatggagtgccatcaacaagttcctggccagaaggctgcccatgtcctcacctatgaagaccaggacggggactggatgatggttggggacgtcccatgggaactcttcctgagcagcgtaaagaagctcaggattgcaaggatggataaatgctaaaacagttgcatttgaatttctctttgtttcttcttttttttttcccattggagggagggcccttattatatgtaggttagttgaaaaagatttttgctgaagctgagattatacttactagcagtgtacattatagtaaagaagtgtagcattatcagctacctaccgtatagcagaactgattattatttttc

SEQ ID NO: 21724 - DNA, 1439 bp, Oryza sativa
  unsure (1)..(1439): unsure at all n locations
  Clone ID: TF_OsC123_1
ccgcccggggctcacacacacacacactctcttctcttgtctcgctgtggctcgctggacacaacacacacccacacccactcccccactctctctccggttcatgtcctgctgctccccatgtcgcccccactcgagctcgactacataggcctctcgccgccggtgcccgccgccgccgatgccgccgccgacaacgacctgaagggcaccgagctccgcctcggcctgcccggctcccactcgccggaccgctccccgcccgccgccacgctcgaccttctccccgctgccaagggcgccaagcgcgggttctccgacgaggcgcgtccgctgccggcgtccgccgccgccgccgccgccgccgggaagggcaagaaggcggcggccggcgaggaggatgaggatgcggaggaggaggacaagaaggtcgccgccgcgccgcaggcgcctgctgccaaggctcaggtggttggatggccaccaattcgcagctaccgcaagaacacgatggctactaaccagctgaagagcagcaaggaggatgctgaagcgaagcagggccaggggttcctgtacgtcaaggtcagcatggatggtgccccctacctcaggaaggtggacctcaagacctacaagaactacaaggacctgtcaactgcgcttgagaagatgttcattggcttcacaactggcaaggatggcttatctgagagccgcaaggatggtgaatatgtgctgacttatgaagacaaggatggagactggatgcttgttggcgatgttccatgggagatgtttgccaactcttgtcgcagactcaggatcatgaaaggttcagatgcaattggacttgctccaagggcagttgataagtccaaaaaccgcaactagaatggtttctgccccacagtcaaaagcaagatggagatcaaatgactgtagggaattttctgaaaaccaagaagtctaacagttttaagatggagtctgccttatggtctgtactacatggtttgctattgtgaaagttaaaaaaaaaggtgtcttgttatgttagcttcgccaaatctcctagggacataaactctatttgattgtgcccaagtctttgtacgtgtgttaatgctattcgtgtaaatggtttggacaccatgtgctactgctatgattgagcacccctacctactttgcaaaatgttgtcaatgaactgtttgttcgctacataaatgttcaatgaagcttgcaaatgtattgtccaccaaaaaaaaaaaaaaaaaaaaaaaaaagactagcctgcagcccgggggttccactgcttgcatttctctttgtaattgcatttccttttgatgtggatgctcttacaattacatcgtctaagatgcctgtgactaggaaccaatatatgnctgatctgtacaagtaacttttgccg

SEQ ID NO: 21725 - DNA, 1678 bp, Oryza sativa
  Clone ID: TF_OsC436_2
gttgaacacaatcaatgttcattatcccgaccaaaatgccaatcataatatgtaccctggcacatggtctcttatgcctccaaacactggttttggtgtgaatcagcagaactacctaatgacgcctgacatcacactccctcaaaggtctcttaatgccaagtttggtgggaatggagcattcacttcgcttcgggcccatggcattgatcagcgctcctctggttggcttgggcatattgagccaagttctcacattgatgatgcctcatcgagtcttatcaagccacagcctttggttattgatcacaatgttcagaacgctaaagggggttcatgcatgctatttgggatttctcttgacagccctgcaaaacctgaactattgatatccccaccaagtgttgcatttgatgggaagctccaacaggatgcacttgaagaggatgaatgctctgatccttccaagactgtgaagccacttgatggagctcagcacgattctgctagagagaaacatcagtcatgtccagatggtaccaaaaacattcagagtaaacagcaaaatggttcctcccgaagttgcaagaaggtccacaagcaaggaatcgcactcgggaggtcaatagatcttacaaagttcacttgctatgatgagttgattgctgaactggaccagatgtttgacttcaatggtgagctgaacagttcaagcaagaactggatggtcgtttacactgataatgagggtgacatgatgttggttggtgatgatccttggaatgaattctgcaacatggttcataaaatcttcatctacacgagggaggaggtccagaagatgaatccgggtgccctaaactcaaggtcagaggatagccggtctacttccgtggaacgagggctagttggcgaagggctccaaggtggtctatccaccccatcactgaattctgagaactgctaattcgttcggtcactgaggtcttttgtggtttgcaagaacagaagacgacatatccatggtaggaaggaatcttttcgtggtgtagtagtagtagctggtgctttatatgtatcgggtaagccccgcagtaccccatttgtagatggtgcttgtcctggtatcagttgcccgctcttcgttttcgacaagttttgggtgtgctttgttgaggttttaagttattgtatgatatgccccgtagtagtgaaaggtgctgaggccaagctgccgcgcccggtgcgcttgcttgcttgcgctcttcctccctcctaagccttgtaaatagctttgcttccccccctttcttcagtcagttctaatatgttgcgaactgcggtaatcggtgtacccctcaagaaggcaaggcaatttgaccctaaaatgttgccattttaacatccaaaaaaaaaaaaaaaaaaaaaaaaaaaaaaaaaaaaaaaaaaaaaaaaaaaaaaaaaaaaaaaaaaaaaaaaaaaaaaaaaaaaaaaaaaaaaaaaaaaaaaaaaaaaaaaaaaaaaaaaaaaaaaaaaaaaaaaaaaaaaaggggggggccctttttagggacccaagtttctccccccgggggggggaggtaaaaatttttttaagggggacccaaaaaaaaaaacacggggcccggttttaacaccggggggcgggaaaaaccccggg

SEQ ID NO: 21726 - DNA, 1069 bp, Oryza sativa
  Clone ID: TF_17154532
cggcacgagccaccacctcctaatcaccacaaaggcttaaaaatctccagtctccatagagagaaagagagagaagagaaggcagcttgatttggggcgaggagacgcgatagccgcgataggctaagcagctggcagcggcggctgctgcgatggccggcgccgacgtggacgtcgggacggagctccggctggggctgcccggaggtggcggcggcgccgccgaggcggcggccaaggccgcgaagaggggcttcgaggagaccattgacctgaagctgaagctgcccaccgccggcatggaggaggccgccgccggcaaggcggaggcgccggccgccgagaaggccaagaggccggcggaggccgccgccgccgacgccgagaagccacctgctcccaaggcgcaggcagtgggttggccaccagttcggtcgttccgcaggaacatcatgaccgtccagtcagtgaagagcaagaaggaagaggaagctgacaagcagcagcagcagcccgctgccaatgccagcggcagcaacagctctgccttcgtgaaggtcagcatggacggggcaccctacctgcgcaaggtggacctgaagatgtacaacagctacaaggacctctcccttgctctgcagaagatgttcggcaccttcaccgcaactgggaacaatatgaatgaggtgaatggctctgatgctggtacaacttatgaagacaaggatggtgactggatgcttgttggagatgtcccgtggcagatgtttgtcgagtcatgcaaacgcttgaggatcatgaagggttccgaagccattggtcttgcaccaagagcaaaggacaagtacaagaacaagagctgaaaatgttgcagtattaagatgctgagcatggtgccataaaaatggtgttcttgcagtgtgttatggtttccttagaaatataaggttttacttgtttagctggattaaaggaaggaagagttgtcatgtttaatttgtttatggaccagaagcaataatccatttgtgtgtagctggattggtgttaaaaaaaaaaaaaaaaaaag

SEQ ID NO: 21727 - DNA, 387 bp, Oryza sativa
  Clone ID: TF_uC-osflcyp010g02b1
gtcgttcgcgccgcaggcgcctgctgccaaggctcaggtggttggatggccaccaattcgcagctaccgcaagaacacgatggctactaaccagctgaagagcagcaaggaggatgctgaagcgaagcagggccaggggttcctgtacgtcaaggtcagcatggatggtgccccctacctcaggaaggtggacctcaagacctacaagaactacaaggacctgtcaactgcgcttgagaagatgttcattggcttcacaactggtgagatgtctcgggttaccctgcttgcatttctctttgtaattgcatttccttttgatgtggatgctcttacaattacatcgtctaggatgcctgtgactaggaaccaatatatgcttgatct

SEQ ID NO: 21728 - DNA, 320 bp, Oryza sativa
  Clone ID: TF_uC-osflcyp159g02b1
ggtttgtttatttcagattacgtaggaaatatactttcattatactaatagttataccgccttttctcgataattaatagacacattgcttagtaatattttttttgtaaaaatctagaaagtgagaacaagcgcgaatttttgcaatagaaattttagtacaaggagagattctcttctgcttgttttatttggccttacaggttagtgtggatgtattggcatatcaggcaaggatggcttatctgagagccgcaaggatgggggaatttgtgctgacttatgaagacaagggtggagactggatgcttgttggcgat

SEQ ID NO: 21729 - DNA, 943 bp, Oryza sativa
  unsure (1)..(943): unsure at all n locations
  Clone ID: TF_OsC217831_1
ccaaagctccccacctncccttttcggtctctgcctgccctgcttcttgcccaccaccacctgtgtcctcttcctctcctctccttgcattgcagccttctccttgcttcactgcctccctcacctcctatatatccttcccccttgcctcctncanccacccacacttcacacttcttgtttgatcaatcacagagacagagagagagagatggcttggaatggcaggtttggagaggatggagaggaagagaggagccttgagctcagccttgccctccctggatacttctccagctcaggtttgcaggggaacacgagcactgctgctgatggagccaagggaaacgatgggttcaaggcaagcaaaaagatgctaaaatttgcccctaaattctctgcgattcgcagcaggccggcggctccggtggtcgggtggccgccggtgcggtcgttccggcggaacctcgcctcgtcgtcgtcgtcgtcgaagccgccgcgtggaggccgagacgccgccgccgccgccacgggaggcaaggtggcccggttcgtcaaggtgaacatggacggcgtcccgatcggccggaaggtcgacctggcggcgcacggcggctacggcgagctctccgccgccgtcgaccgtctcttccgcggcctcctcgccgctcaaagggacccaaccatggccaccgccgccgccgccgccgctgccggcgagagctgcacaggagaggaggaggcgatcgccgggctcctcgacggcggcagcggcgagtacacgctcgtctacgaggacgacgagggcgaccagatgctcgtcggcgacgtgccatggaacatgttcatcgccgcggcgaggaggctgcgcgtgctcaggagctccgacctgaacgcctccacgatacgagcagggagcaggaagagggcagctgccgagtga

SEQ ID NO: 21730 - DNA, 1721 bp, Oryza sativa
  Clone ID: TF_OsC45780_1
atcccccggcgcctggggtgcccgcgcctggtgggggccagccccgggtttacaattcttttaattaacacataacaccttgcagtaataattatttgtttgatggatacaccatgaagataattaaacaaccttttcatggacaaaatacattgaggtccctttgagcagggtgcctttacattttgtgccattaaggtaaaaaaaaaacagagagaaagggaagaacagggagagcaaaaaagacataattatgggacaggtactactggtacatgttcttggcttctttcttatgtataagacaagatgacacacttaggaacttaatgactgcaacagaacagaaactgaccacaacaccaaaatgactttcactgatcaggaaaggtacagacttggagatgaggacagcaagcgagtatgatacagggatgaggcaaagctgcaattaagaaaagctatagatagattgttgcatctgatgatgatccatccgtttttgatggcgacatgttcttctttctcagcttctgttcttgcatttctccattgccctcggtgcaaggccaatagcttctgatcctttcattatcctaaggcgcttgcatgattcaacaaacatctcccatgggacgtcgccgacgagcatccagtcgccgtccttgtcctcgtaggttggcacatattcagagccgttgagcagatcagcaatcttgctctcgttcatgccgttcaccccatgagacccacagtttccaatggtgaaggagctgaacatcttctcgagtgccttggagagctcaaggtagctcttgtacatcttgaggtccaccttgcgcaggtatggcgcgccgtccatgctcaccttcacgaaggcggcggcggcggcgccggcgccggacttgtcgccgccgccgtcggcggcgtccttgcccttgtcggcctgcacggccaggatgttcttccggtatgaccggaccggcggccacccaaccacctgtgccttgggagcccttggcttctcggggtcggcggcggcggtgacgacgctgctctggctcggcgaccgcttcatcccgccggcggcggcggcggccggcggcgaggcgtcgtcgttgtcagctccgacgatgtcgaccttcttctcccggtcgtcagccgccgcctcctccttgtcgtcgtcgtcgtccaccgccgcggccgccggctccagcttcagcttgaggtcgatggtctcggcgaagcccctcttcccggaggagctcctcgccgccgccgccgcggcgtctccatcaccgccgccgccgggcaggccgagccggagctcggtcgcctcgaaggccaggtccgccgccattgccgccgccacctcacctcaatatagctagctaactaaatgtcttcttcttcttcttcttcaaagctaagtggatcaatggagatgatgatgaatcaatggacctagctaattagatagctcaaagaatttcttggtttcttcttggctatctactagtggctaatagtaccaaaagctagctctcttcttgttggtttgagcttgatggtgatgatgagagggtggctagaaatgtgatgtaaaggagtgaaatggaaatgccaatggcaatagataaagaggagaagggagaggtgatgttggggggcccaagaaatgataatatcccccggccgattcctcagcccggggatccact

SEQ ID NO: 21731 - DNA, 2436 bp, Oryza sativa
  Clone ID: TF_OsC81650_1
atggcgcggcatggcatgcatgctgcgttcgcgcgtgagacggcgtgcgcgatcagatcagggggagcgccagagcccgcgcacagtgcaggcgggtcgtcgcagccgcgcagcgcgaggaggccgatgcgcgcgggggccggatcgagggcgacgggggccggcgccatgaatccctacgacatgccaggacggcaggtccattttgaggaagcagcgaagcacagtgtatatggcactactgggcactgcaagggtgatatggtgatctcgtcgagaagctcttacaataggtcgccggccatacctctttctctagcgattggcggagccgcggaggtggagctccactccaatccaatccaagggttcagcgaagatcaggagttcagacggggtaatgtcctcatcaacagtggtcccctgtggtcggggcgtggaaggaggtggaaccattccttacgccacaaccaacagcagcgccaatggccacacggatggaaacctgatcttaactccgtgtttttccgcgttctctttcgttctcgcttagacctcagcttacgcttcgggctcacccagtcagtcatcaaagtgtgcgtgcttctccagaacagtgagagagagaggggcaaagggaggcaggataaaaagccgagctgtaggggactaaagaagaaagaaaagcatagaaaagaacggcaagcaagcagctcgaggcacccgcgctagtacataaagccaccgaggtgcgatttcgcgagctctagcccctaccactcggccatttcccatctgcctcctggagctttagctctaactctagttctagctctagctccggctacgtttgcaactgttgtttatctcctggtggatagcatttagactcttgaagactttgagctagttaaccttatggaagaagggtccaacaaaagagaaggacttcctcctcaactcctagatctcatcccagatgagaaggaatggaagctgagagaagcattaggtctagggagatcaagaaacgcaggcttcgacggtgaagaagacaagaagctagacctaaagcttggtcttcctggttttatagaagatgatgaggcagaaaccttaagagattacaggctacagcaagagagcccatctctctcccttagtttctttccaaagcactccaagaccaccagcagcactactacgacaactggagcaaagaggggattcatagacacagttgaggacaaaacagaaggttataacgaccagaagcagcaggcaagggcaggatgtgggaaggaacttgcagtggaggaaatgatagcagccgtgagtgagaggaagaaaggatgctgccccccaccaccaccaccacatggtgctcctgctacacctgcgcgcaacagaccacagacccagggaagaggagctgcagcaccagtggttggttggcctccaattcgatccttcaggagaaaccttgctagtagtagttcatccaaacattcccctgaaccacaaaatgataatgccaatgcaaaggtgacgctcacctgcaagaaaaaccctcttgtaaaaatcaacatggatgggatccctattggaaggaaaatagaccttgcagcctataacagctatgatgggctatcgtcagctgtcaaacaactcttccatgggtttcttcaagctcaaaaggaccaaactaatgcgcaaattgcacagcaaggtgcagatgacaaaatattttatcaattgttggatgggtctggtgaatatactctagtttatgaagacagtgaaggagacaggatgctggttggggacgtgccatggaaagtatttgtctcaactgctaaaaggctgagggttctaaggagttcagagctttcccataccctgattggagctactgctagggtctagccgtctaggagagtcaccaattgctgaaatgctgggatcttattaaccattcggaatgaatgtgtgcactcaagccagtccattctccattttaggactacccctattttgcctatatagatgatctactgagatgagttggcatacagcaaatgcaaggaaatggcaatctgttttgtaaattaggttaccttgctatgacatgttgcttaattcaattcgaagcgattttggttttatcggggaaaaaagcatatgtagacttgcaggtcacccatgtaaagtgccttgttctgcgtgataaatttgtattaatcgctgctgcaacccgacacgcagatctaatgtcaccagcgtgtctcagaggacagcaactaggctaacctgatagcatcaagtcatcactccacgtggaatatgctactagtaggaatttttttttttgacaaaaaaaacagaattatccacaaaaaaaaaaaaaaaaaaaactcgagactagttccctcgtgc

SEQ ID NO: 21732 - DNA, 1544 bp, Oryza sativa
  Clone ID: TF_OsC86592_1
ttttttttttttttttttttttcaacaaaaaaaaaaagtgttctttttaagacgaagccacaatttacatacttagtacgggatattacagagataggcagagatgccagccaaaaggatagggatagtcatcagagattcagagctacgagtttcaggcaaagatgcatagggaagatccacccaactacactgcagaaaggctatctttcccaggttgggatagtcatcagagttttgagcttcaggctgaaaaacaagattggctgccacacagatcggcgcgtttttttttttttttttttttttttttttttttttgttgtggatacattatcaagtgcaactccagataatatatatatgagagaattgatgaaagtatcacacaggaagcattaagcagcctgacttgatctttcaaagacaaaatcgaccatctacagattgacacaagacaacctcgtaggcaaaatggctgttttacaatacgccacagatttcactacacacgtaaataaactaatagcggagatacttcaggtaaaacactgcacccctcagcggaaacttgctacagcaaacttggtccacacatttgctgtccagatgatgaaagctcgggcaactatttgttctgacctgtctgttccagtgatctcggagccattccagcagcatctgaacctctcatgatccgcagtttccgacaactagtagtaaacaagtcccaaggaagatcaccaacaagcatccagtcagcatccttgtcttcataggtaagaacatactcttggtccttaagggcatcagccctagaaccatcagtcagcctgtctctttttgatgttttatgtgaactgctcctaccagtgataaagcagctgaacatcttctcaagagcaagtgaaagatcttcatagcttgaataggtcttgaggtcaaccttcctaaggtatggggctccatccatgctaaccttaacatagcaacatcctacctcacttttgccttggtcttccccctttgtctttgtggcactggcggccaatgtattcttccggtagcttcgcacaggtggccatccaacaacttgtgccttggcagctcgcggagctccagcagcagcttcccccaaccccttctcctcctcctcctcctccctcacgcccctctcatcatcaccggcggtggcagcagcacgacggccctcggatcggtcgagggagtcgacgaacccgcgcttggcgccgcccctgggaggaggagcagggccgagcgtgagcgcggcgtcgacgacgacagcctccgcctcagcgcgggcgggcgactccgaccccgggaggccgaggcggagcgcgaggtgcgccccgacgacctcggcgacgggggtcgacgcgcagcaggaggaggaggacgaggccggggacgccgcgagcccgatgtagtctcgcgcttcgagcggcggcggcatcggaatcgagagatgcacacgcagagaggagaggacaggagaggagagggggagaagaggcgaaagcgaa

SEQ ID NO: 21733 - DNA, 300 bp, Oryza sativa
  unsure (1)..(300): unsure at all n locations
  Clone ID: TF_LIB3431-001-P1-K1-G12
ggtggccgtcgaccgcgcgccgtactctgcgcaaggtggacctcgaggcgtacccgggctactaccagatgttagcctccctacaggacaagatcttgtgccacttcaccatccccaagctcgggaacgaggagacgaagctccttnacacggcgagcggcgacgagtacatgccgacgtacgaggacaatgacagcaacttgatgctacccggagacgtcccctggaaaatgaaaggggagacccgcccacgtcttcgcctcaagaaaagctctgaagcagacaatttagcaccaagat

SEQ ID NO: 21734 - DNA, 305 bp, Oryza sativa
  unsure (1)..(305): unsure at all n locations
  Clone ID: TF_LIB4370-006-R1-N1-H5
gttgtattgcagaatgttcacagacagctgtaggaggctgaggattatgaaggggtcagatgcagtgggccttggtaagtacagatcccatgtggtacaatattgaagtattgcatgtgtccatgcctttttatctggaagcatagaagagaatttactgtatgttgctctgcataagtgcataattacaccttatatatgctttacacataaaaatcanaagtgccagtttgcatggactaggtttggtccgagcccttaactatgggactaanatatctggntatcctattctttctatgtat

SEQ ID NO: 21735 - DNA, 1307 bp, Oryza sativa
  Clone ID: TF_OsC4615_1
ctctgtccactgccctctcgccgcccacctcgccgtcgccgccgccgcgagggccaacgccggcgaagtccgcgagccgaagcatcacacagctgcgccagcgatgtcggtggagacggagcggagctccacggagtcgtccgccgcgtcggggctcgacttcgaggacaccgccctcaccctccgcctcccgggctccctcgccgccgccgccgcacctgaccccgaccgcaagcgctcctccccctcctcctccgacgccgccgacgccgcagacaactcctcccccctcgccgccgccgccgatgctccccctgctcccaaggcgagggtggtggtggggtggccgccggtgcgctcgttcagggaagacccggctggcgggcaagtgtcgggatggttcccgtgggacggcgtgccgtaacctgcgcaaggtggacctcgatggcctacttccggctacgaccagctcctccgcgcgctccaggacaagttcttctcccacttcaccatactcctacccctcgtctccttacgcaggaagttcgccggacgacgagaggaagctggtggacgcggtgaacgggacggagtacgtgccgacgtacgaggacaaggacggcgactggatgctcgtcggcgacgtcccctggaagatgtttgtggaaacttgccagcgccttcgtctcatgaaaagctcagaggctgtcaacttagcaccaagagccgctcaatgaggcattcccggtgcccatgaccgtgtggttggattgaaagaaagtggaagctttgccccgccgatgttcgcccatgtgtgatatgaacatgtacagttgtctcctactacttttggttccttgatgttgctgagttgagaaaaaggttgtagtttcgttactcgtctgtagtctctccatgctgaggtttttccatgttctgtgagagaaatgtgtacagtcatcgacttcgacttttggttccatcgtgctattgagtttcagaaaagaaatggtttttagcttgtagctttgttaccagtcagtagtctctccatatagatgagcgaagcggtgatgctttaaaatacacccatagattgttttctcgataaataaaattggtctcactcactgagcccctgttcttcgacatgctttctaccactagtttgttcgataatgtgatgtgcatgtgaggcctgtgatggtgccagaatcatataacttgtcatgttaataactattttgttgtaagattatgtttactgcatggtgttataagctatttaaagtctcaaaaaaaaaaaa

SEQ ID NO: 21736 - DNA, 1104 bp, Oryza sativa
  Clone ID: TF_OsC2423_2
gtccctccctgcagagatggcaagttgtttacaccgatgatgaggatgacatgatgcttgtcggggatgatccttgggatgaattttgtagcatggtgaaacggatttatatttactcctacgaggaggccaagctgctggcttcaaagtctaagctgtcagtcataggtgacaccatcaaattgagcagtatgaactcatcacatgaatccgtcgacctggacaatcatgcctcagttactaacagggactgctaaccattgactttgccctaattctgatatgatcatttgaggaaattccaatgtttcttcattactgcttactgtgctgaagacgcaacgcccttttgtcttgaattgtggcggtatttgaactgcaagtgccaggaagttcccaagactttttggttgccaccatgacatgaggggaaatttcgcttttgtgtacctttcatcctgtagtttactcaccttttttcatccaaagagctgttctcttcaacggtctgtgcttccaaatccactggatcaatgctggcggttttgggggatggaaggagggatactcgacaaagagggcaagtggtgtttgtcgagagccagtggtcgatgcaatcgatgtggaaggtatggccacaaggaggtattctctggagccgctcatccggttgatagtctgctaagcagacagagcattgtgtttccctgatcaagaagctctccttgaagaccacaacaggcaacatttcccgcatctccttctttatgccgcactccaatctggggttatctccccgtatcaagttattagtcctcatgcgcaaggactgccagtttgctctgcgccgtcgcaagtagaacaagtagaagaagagaagcaagacgaacgtgaagaaaaccggcacggagaagatgaaggcttggtatagcttaagctcaggcgatgcggccgagcagtaatcgggcgggtctggggaggtacaagacatcaccaaacaagaacctccctcccttccaccaagaaccaacgaatggtcgaccgaattatcgaaaaccctaaacactcacaagatatcttatctataacactgatgagctatag

SEQ ID NO: 21737 - DNA, 1428 bp, Oryza sativa
  Clone ID: TF_OsC2849_2
ttttttttttttttttttgccagagaataaactgcataaatgtagagcatttagctgaacatttacatgatggtcatgtcaaattgcactcacttcacacaagtgtcttaaacagaaggaagcaagttggttaagtaggaacaggaaaaccccaaaagatcagcacagcaagacattgagagaaagagacgatgatacaagctcagaagatcatattcttcttcacagcaggtcactgaatgtgtcaaagcagctccaaaaaagaaggtcaacactcagcagctgttcttttccgtccagaggttattagagatgaagagaggtcagatgtcttcagtactctcagtctcttaactgaagaaacaaacatcccccatggcacatctccaacaagcaccttgtcgccttcataatcctcataaaccaaagtgtactccccagttccatctagcaagccagatattgccacatcttcctgctggcagtcctttgctccagcagtgagggggtctctttgggctgcaagaaggcctcggaatagcttgtcaaccgctaaagaaagcttctcatagctatcaaaagcattcagatcgatctttctaccaatagggacaccatccatgtttatctttatgaatggagctctcttgatctcttctgcttttgcagccttctttccattctgcagttcaagagatgctttgctggatgtagccagatttcttctgaatgttcgaaccggaggccaaccaacaacaggagtactaggagatcttgtctggaagcagccattattgttggatgcaagtgcattattccctgtagctggtggtggatgtgcctcttcttcctctggggaccccttgtttttgtttgccttgccttgcgagtgggagacgagtgtggagtagcccagggagagcatggagctcttgtcaccatcatcatcatcagcagcagcagctgctgcaatggagtgcttcgtcgtcgtccccttgtccctgcacgccgctcgccatcctcctccggggagcccaaggctgagctccagcgtcttctcctcctcctcctgttcatcgccatggcgatggtgatcgcttggctcccccatccagcttccgccgagacggcctctgctgatcttcttcatgctctccgacgcctcccccatcacccgctctctagatgtacagctcgcccaaatccaagaacaaatcaagaaagcagaaactagctagctgagctgctgctgctgctggttgctgtcttggctgcaatgcaagagggagaggtgtggaacagagagctagaaaaggtgtgggaatggtagtagtagctgcagctgcaatgcgagcaacggcacacggcaatgtgatgctccgatgcgagtagcgtctagctgagcctgagctgagctgagatgccgcc

SEQ ID NO: 21738 - DNA, 618 bp, Oryza sativa; identical to SEQ ID NO: 12192
  Clone ID: TF_OsC334733_1

SEQ ID NO: 21739 - DNA, 801 bp, Oryza sativa; identical to SEQ ID NO: 12193
  Clone ID: TF_OsC59803_1

SEQ ID NO: 21740 - DNA, 704 bp, Oryza sativa
  Clone ID: TF_LIB3431-025-P1-K1-F7
cggacgcgtgggcggacgcgtgggcggacgcgtgggcggacgcgtgggcggacgcgtgggctcaatttggtatatctttatcagatctccaccttaacaaactgcagtcgagtctatcgccccacggccttcaccagcttgatcacggcatgcagccgaggatcgccgctggtctaattatcggtcatccggctgctcgggatgatatctcatgcttgttgaccattggtagcccccagaacaacaagaaatcagatggcaagaaggcgccagcccagctgatgcttttcggaaaacccatactcacagagcagcagatatccttgggtgatgctgcttcggtggatgttaagaagagctcttctgatggtaatgctgaaaatacggtgaataagagtaactccgatgtttcaagcccgagaagtaatcagaatggcaccacagataatttgtcatgtggaggagttccattgtgccaagacaacaaggtacttgatgttgggctggaaacagggcactgcaaggtattcatgcagtcggaggatgtcgggcgcacacttgatctctctgttgttggttcatatgaggaattataccggcggcttgctgacatgttcggcatcgagaaagctgagctgatgagtcatgttttctaccgtgatgcggctggggcactcaagccactggagatgaaccttcagcga

SEQ ID NO: 21741 - DNA, 932 bp, Oryza sativa
  Clone ID: TF_OsC28546_2
ctggggttggttttttcctatgctgctgctgctgtgttattgatgagccaccagcattctgtagctgttttcttgctctcttaatttgcaacagaaatcactattatgatctgaggattgccctgcagttcagtacaatcatggcatcgtactggacacgcttggggcacctttttctttaaatctataacttatagaattacaccaatctgttatatctgaaaaagagtaggtcatttacaaaatatgcagtttgtccactgcacctgcaagatgctattttcccattatcataatcatctgtacaagccaaaaacaggtcatcccccagaaaggtgatggactatggtttgcacaattgatatgtctggaccctaatatcaacgatttgctacttcacagggtcagctccaatctgtggaaggacataagaggaaaacaaattgagggcagaccttaacttgaggaagtgaatccatttgacccaagtctatagaattattttatataactaatataagtgcaatactatagcatggtgttatataacacaaaagtgcatccatttgatccaagtttaaccagagatacagcactgctatttatgaggaaaatggcgcctgttgaagttgccctatgcttaccatagtcatggggaagttctgacctcctcataaccctcaacctcttaacagtcgaaacaaataccttccatggtatgtccccagctaacattctgtctccatcattgtcttcatatactaaagtgtatacaccagttccatccaacaaccctgaaaatattttgtcttctgccccttgctctccactttcagcacaagatagatctttttgagcttcaagaaaaccacggaacaactcttcaacagcagatgacagcttctggtagctgtcgtatttttgaaggtcta

SEQ ID NO: 21742 - DNA, 6439 bp, Oryza sativa
  Clone ID: TF_OsC608_1
ctctcctctttttttctcttccctctctctatatatatactcatctccaagctgttcttggctcctctctcttcttccaacacctcctaatcaccacaaaggcttaaaaatctccagtctccatagagagaaagagagagaagagaaggcagcttgatttggggcgaggagacgcgatagccgcgataggctaagcagctggcagcggcggctgctgcgatggccggcgccgacgtggacgtcgggacggagctccggctggggctgcccggaggtggcggcggcgccgccgaggcggcggccaaggccgcgaagaggggcttcgaggagaccattgacctgaagctgaagctgcccaccgccggcatggaggaggccgccgccggcaaggcggaggcgccggccgccgagaaggccaagaggccggcggaggccgccgccgccgacgccgagaagccacctgctcccaaggcgcaggcagtgggttggccaccagttcggtcgttccgcaggaacatcatgaccgtccagtcagtgaagagcaagaaggaagaggaagctgacaagcagcagcagcagcccgctgccaatgccagcggcagcaacagctctgccttcgtgaaggtcagcatggacggggcaccctacctgcgcaaggtggacctgaagatgtacaacagctacaaggacctctcccttgctctgcagaagatgttcggcaccttcaccgcaactgggaacaatatgaatgaggtgaatggctctgatgctgttacaacttatgaagacaaggatggtgactggatgcttgttggagatgtcccgtggcagatgtttgtcgagtcatgcaaacgcttgaggatcatgaagggttccgaagccattggtcttgcaccaagagcaaaggacaagtacaagaacaagagctgaaaatgttgcagtattaagatgctgagcatggtgccataagaatggtgttcttgcagtgtgttatggtttccttagaaatataaggttttacttgtttagctggattaaaagaaggaagagttgtcatgtttaatttgtttatggaccagaagcaataatctatttgtgtgtagctggattggtgttatgtgatgtcccctaccgtgtgtcccaagatctacttgatgattttattccaatgttgttaatttaagtttgtgtgattgtgaagtaaagggtatcaatgagactattattattatggtaaaaaaaaaaataaaaagttaaataaacaaaaacaaaaatatatgcatagcaaaaaaaactcagcaagggcttcctgagtaaaatatttttgggtagatccatgcccttctgggcttgtacccacatttagcgacttcctattactggattttctagaatcaatcaagccatcaacttctctttcctcaattgaagtaacttctaacttccttttggagcttttattagcattagcatatccgactaattttgaccatccccatggcttccaaaactgtgtcttcattggaaatcctttgcgctgagtcaagttaacaagctgttgtcttacagagttgtttcccaaaagaacatcttgcccttgtaagaaccatttgatacccatcacgaatgactcttgtagctttccaagaaggtgaataagttctgagtatagaggagcagcatcaggtctgacaagtagcctagacaaaataacttcagtaagccccttttccctttcagagagggtaaaattctcagcattaggggatagggatcgaagtgcttttacatatggcacattctttggtttctcaataagagattgctcatccaaaagcagcctcaactcaacccattgccaatggaactttgcaggctgtaggacattcagaatttctataagcctctctggaaactttacatcattcttggtactagcttctgcacaaccaggctctaaagcatatgtaccatcgtctctcattgttactggtatttcacaatcaagaagagcattcaggaaaacccgggcacgaagaggtgaaagagctttcaaacattcatcagggcttcgaagttcaacgattgcagcaaactctgaatcaccaacatccgcagccagaagatcatagaaaagatgcatgttacggaagcagacatctcgaaaaggctgatgtcttgtgatatcactaattgcacccagtagagactgataaagctgaatgtcttcatgattcgatgtactggtgtcatataaatatggtcgccaaaggaccatagcaaatattgaataagctggaggaagaactatacccaatggaagcgtccgttgcaaccttgaaaaggcaaggacataagaatcacctagaatctctgcgatcactccattataaactgtcttacagttccctattagaatcttaaaccaatgtaccaaaacttcagtggaactgtcaattttgaaatttccaatggagtgggtcacaccatttgtgctagctttggaaattcttaagaactgcagaatgtccaaaccttcttttaatcttaggaccaccatcatccgctctagactgacaaccccataaataatagctccaacaactagtgcagaaacagcagcagaaacttttacagccttaacattaaaacattttgacggattacttggaacttcatttgcatgatttccactttcatcatgggtctcagaagactgttgactgcggtgagccttaggaggagcaaaagatgctgcaacagctgaagaagcttcaacagcaagagatatttcaaatattctactaaatcgatcacctaaagtttctcttagcaaggccagagagtttatgtggatatccaaaatgtgttgaatcaagtttaatgaattaattgaggtaacacctggattgttaccacctgaaatatccaagtgtttagctattgcatgcccagcattgtcaacaattgcagaaacagcagaagcaactaaagaatgatctccatctggatttgctcctccattttgtctgatacagtctgatgaaattccagaaataattgaatcaccagtgattgactttccactatccagttcagcaagcagccttttatcagatgtggacctaaaatttctttcccacctagcaacactagtcacatctctgtatttccttaagaaatatcgagcataagcaaaagctactgaagtagactgcctttcacctgacttatgaacagttctattcattgaaacactcaaaacctcgggcaaaagatccattgcaataaggatgttctcatacctgagcaaggatgagaacagaaaagcttcggctacttggaaaacttggttttctttatgttttgggtgcataacacctcttccaacttgaccagatgtggtccttccaatataaatctttgatagaagccatataagcaaccttacagaggagagtaaatcacaacatgtatccattatgtacagcactgacagaagttcatcttctccaaacctccatccagatgcaattttaccactatgctgcacagtggaggcacttatggagttattagccttagaatgtttcacttcatctccttcaattagttgttttatggacttcagcagccagattgaaatggatcttctttcaagcaatctaagtctcttaagtgatttgccaacttcagccagagtcaacatactcatatgatcagcgtctttaagaatgtcagagttagtgccaggtttatggtggggacaactcagattgttatcacacacgtgactagtagatgccccctggctaccatcgattctagcagctgcaagttgtgctatattttgtgtcttttgcactactgttgccttacctccacttgtttgttcaattgactgatgtattgtttcaacagtaaacaattcctgcttctgctctttccttacccaccaaaaatcttcctcatctgattgaaccaatggggacccttggaaaggaaacacgttcttatccaacttctgtctcttggtcctactactatccttacagccagtttttgcatgcccaacatcttcttctgagtctaccaaatctgtttgtcctttcttggttttttttgtttcttctcttcctgatatcataagttttacctcttctacttgaactgccactctgccatgattatcatctgttgaatccattagaagatcaggctgtttctgaaggcaggaactcaaagggaccctgccttcaacatttgcatcagtagccagaccacttgaaagctcagaaagcacaagtcgacgctcactagaatatgttgacacaatttcataaaggacttgatcttcagcaatcttagcttcctcaaggatattaaataagcaaaaccctggcaggtgcttcagaattttgtaatgcctcgttttcttttccagatcaaacaagctatcattccaaatggtgattccactaacaattagttgtctcacatatgtctgaggataaaatataccactgcgaataagttcagtcatgaaaacatccacacttttaaatcccgaagcatcactaatctcatgttgatccaaccagcatacaataatgtcatgcagtggacctgggctgctgaagatatcctttttgttattctcatcaatgctacctgtactgtctctaaatccagaagcagtctccattgctgtcaccttgatagaagaatgattcagagtagcacttttaaggtgatccttcattgcaagctgactgctgctcttggaagaagataaattatttatctcattcattttatccttcaacagggaaactgccatatagacctgagagaaatctttgcttcctgaaaattttacattttggcattgtgatgtacggcaatcacggaaagtacatgttgcccactcacaaatgaaaaacacagagcagacaagggataactcaacagctcccatccacatcagagaagatcgcaagcaagggctgacttctttaatccatgtttcttccatcagggtatctgatagataattgaatactgatgtatatgctgctgtcaagtttccagttacaagtgctttgtccaaagcttgcactacgttggctgccccacgaacttgaagattaggattagcaactaaagaaagatcagatgcacgtctttgaactgaacaaatggcataaccacaagagaggtgtcgagatgcattctgtctcctagagctagcaattttaccaccacctgctattttcagaagagcacctttaccgtatacatcaggagccacaactgatggaagtggaaagcaatccaaagaaacaaatgtatcgggaacagcaagtatcaagtactgcagtaactcaactaaagcagaggtaatggatgacctttttgggttattcttaacacttaagctgccaggagaagcatcactgagacgttgaatcagtatttccaccagcatgtggatatatgtctgtgagagggttatggtatcaaccaaagaaagtacaataggcaagagtaattctaaaacctcagttgagtctctctcctggagctgattaaatacccattcgataagtaacgacggaacaagtaattgttccatgagatgacattgaacaatacgaatcatatacgaccatttaaagtgtagcgaaggctcctcaacatctgcactagcaggtgatgccccggtttttaacttaattgggctgtctccagcaacaaggcatggcaatgactgttcttgagaagatggaagtccaaaaaagccatttttagaacacaattcgtccaaaagcagctgcaagtattcaataacatcctttgtccagtgctgagatcgcaaactatcaggagcagcagatgaaacattattggatgatgtttgaacctgattaaggtaagtaaccttcacaagccatgatgctcttaacagtgggacattatatcggataagataattaaagagtaacttcctccgaaaaccacgaggaacttgctctgctaatgaccatagacgcctgtttggttgcacaagggcctcgatccattttctgcgtgtgtcttcattgctatgcatttgctctggatacatcccaggttttgtcagcaacgagccagaaagagggaccccataaacttggccagccttcctcttctgagcacgagattcattgatcgctctgaaccgcttctttagtgcctccttgcattttgtagcaatatctggtttgctcaagtatggaatctgactgagtacaatctctctggcttcctcaattccttcaacggtatccttgtacccagattgcacatattctttggttaaggtctcttctgcacaactcaatgtctggggatagaagtcaggtgcaccaagcccgccactaacaaataatcttcccat

SEQ ID NO: 21743 - DNA, 569 bp, Oryza sativa
  Clone ID: TF_LIB3599-052-Q6-K1-E12
cggacgcgtgggctgataaataaaaagggcttgctgtttagctaagcagctatgagatggccaccaatccgcagctacaggaagaacaccatggcgatgagccagcctgctctgaaaggcaaagacgacggcgaggcgaagcaggctccggcatccggttgcctctatgtcaaggtgagcatggatggtgctccttacctcaggaaggtggacctcaagatgtacaagaactacaaggagctctctttggctctggagaagatgttcagctgctttaccgtcggtcatggtgaatcaaatgggaagtcagggagagatggattatctgattgccgcctgatggatcttaaaaatggaacagaacttgtgctcacttatgaggacaaggatgaagattggatgcttgttggtgatgttccgtggcgaatgttcacagacagctgtaggaggctgaggattatgaaggggtcagatgcagtgggccttgctccaagagccactgacaagagcaaaaatcggaactgagcaaaagatgaacccaatatgaatatccgacccctacaatcaca

SEQ ID NO: 21744 - DNA, 1065 bp, Oryza sativa
  Clone ID: TF_OsC6383_1
tcagaagtgccagtttgcatggactaggtttggtccgagcccttaactatgggactaagatatctggttatcctattctttttatgtatctgacagagaatctctgtgtatcaggaaaaaatgtgtcctctgttaaccatgggcaatatggcatcttattctttgtgcttatttcatactgagaatgttataatttatttaccatcagccccagtgtcaaggtgagcatggatggtgctccttacctcaggaaggtggacctcaagatgtacaagaactacaaggagctctctttggctctggagaagatgttcagctgctttaccgtcggtcatggtgaatcaaatgggaagtcagggagagatggattatctgattgccgcctgatggatcttaaaaatggaacagaacttgtgctcacttatgaggacaaggatgaagattggatgcttgttggtgatgttccgtggcgaatgttcacagacagctgtaggaggctgaggattatgaaggggtcagatgcagtgggccttgctccaagagccactgacaagagcaaaaatcggaactgagcaaaagatgaacccaatatgaatatccgacccctacaatcacatcacttttacttgtaaggtcccattctctaaaccacaagggtaatggtctaagttgcgagaaggggattacttatacctatgtgtcaccctctttttttttgtttttatttgtaccaattatgttagattttaagcgtaagttgtgtaagttcctgtaagttgtctacttaaccttgcttgtagtttcttctgtaaattgttgtgctgtatgatgcaaactatttttggtattttacttggtgcttgcaagttgcaattgtccgtgcaaaaaaaacttccaataaaaaaaaaaaaaccttctgatgatctatgaactttgcccctctctggtgctcgaagggccagattactgttccttcagggcagttaggagctgatcattctcatcactgattgagtcatcagctttctgttatgcatacaattccatcatattgtggtgataatt

SEQ ID NO: 21745 - DNA, 1151 bp, Oryza sativa
  Clone ID: TF_OsC6383_2
cccatccccctgatcccccgggctcgtcgcctgcgtgctcccgtggtcgcacttctcgcatcgcaaagctcggcagcaaaagcaaagcaaagccaagccaagcttgaagctccccgcactgagccaagaagcctccacctcaatccgaaagagatctcgtgcgcgcacggcgatgcggtgaatcgggcatggcgccgccacaggagcgggactacatcgggctgtcgccggcggcggcggcggcgctggcaacggagctgcgccttgggctgccggggactgcggaggaggctgagtcggagggcggcggaggaggagggacggatgcggctccgctgacgctcgagctgctgcccaagggcggggccaagcgcgggttcgcggacgccatcgttgggggtcccgccggccagcggcgggaggcggccgggggcaaggcggcggcggcggcggcggaggccgaggaggaggaggagaagaagaaggcgcaggcgccggcggcgaaggcacaggtggtaggatggccaccaatccgcagctacaggaagaacaccatggcgatgagccagcctgctctgaaaggcaaagacgacggcgaggcgaagcaggctccggcatccggttgcctctatgtcaaggtgagcatggatggtgctccttacctcaggaaggtggacctcaagatgtacaagaactacaaggagctctctttggctctggagaagatgttcagctgctttaccgtcggtcatggtgaatcaaatgggaagtcagggagagatggattatctgattgccgcctgatggatcttaaaaatggaacagaacttgtgctcacttatgaggacaaggatgaagattggatgcttgttggtgatgttccgtggcgaatgttcacagacagctgtaggaggctgaggattatgaaggggtcagatgcagtgggccttgctccaagagccactgacaagagcaaaaatcggaactgagcaaaagatgaacccaatatgaatatccgacccctacaatcacatcacttttacttgggaggtcccattctctaaaccacaagggtaatggtctaagttgcgagaaaggggattacttataccctatgtggaccctcttttttttttggttttatttgggcc

SEQ ID NO: 21746 - DNA, 1150 bp, Oryza sativa
  Clone ID: TF_OsC4615_2
ccggccgggataatctcctccgccgccgcacctcgcagagagagagacgccgccgccgtcgccgccgccggcgaccggagagaaagagagagaagagcaacgcccacggcttcgccgccgctgccggcgaccatgtcggtggatacggagcggagctcgacggagtcatcggcggcgtccgggctcgacttcgaggacaccgccctcaccctccgcctcccgggctcctcctcctcctcctcctcctcctcctcgtcatcctcctcctcctcgtcgccgtcggagcccgaccgcaagcgcgcctccgccaccgacgacgaccccgacaaccgcctcggctccaccgccaccgagtcccccccttcccccaagtacgcgctctctctctctctctctctctgacttgattttggcccatttgaggttgcagcctgacatggcgcgtcgcggcgggcgcagggcgcgggtggtcgggtggccgccggtgcgcgcgttccggaagaacgcgctcgcggcgttggcggcggcgtcctccagcaaggccaagttcgtgaaggtggccgtcgacggcgcgccgtacctgcgcaaggtggacctcgaggcgtaccggggctacgaccagctgctcgccgccctccaggacaagttcttctcccacttcaccatccgcaagctcgggaacgaggagatgaagctcgtcgacgcggtgagcggcaacgagtacgtgccgacgtacgaggacaaggacggcgactggatgctcgtcggagacgtcccctggaaaatgtttgtggagacctgccaacgtcttcgtctcatgaaaagctctgaagcagtcaatttagcaccaagatctgcttgatgagtcgcaaatctctgctcctgtctttgagaagcatgagaggaagccatctttgcttgctgaggtttttccatgtctgtgagagaaatgtgtacagtcatcgacttcgacttttggttccatcgtgctattgagtttcagaaaagaaatggtttttagcttgtagctttgttaccagtcagtagtctctccatatagatgagcgaagcggtgatgctttaaaatacacccatagattgttttctcgataaataaaattggtctcactcactgagcccctgttcttcg

SEQ ID NO: 21747 - DNA, 1876 bp, Oryza sativa
  Clone ID: TF_OsC141148_1
ccaccaatatcgactgtagtaaagtgctatgaagaaattcctactgcaaatccaaagttgtactgctataggaaagctctaattttgggtactgttacaggtaagtacaattttaaaatcagtgtatgagtatatgacgctggaataggcaaaacaaagttctgcatagcgattgacaaatgatctctctacctagcatcttcagtgtgttgctggcaacctctaggtccaaagtgttgggaacacttcaagacccttttccgacacaatgcacaataatggcctcggcatcccgggcaagatatatgattgttggtgcccagctctacagcaacagtctgtacatgtatgacttttcattccgacggccacagtttggacagggataagttaacagcacccattcaggttctaagagttcagcatcttcgtcagggtcgccaccaaaattttcatcatcctgctgctgtgggttttcatcttgttccctctcaaacatatcacagtttccattccagaaatgatcatatcctccaattgctttgttacaacgatagcagaagaatctcccacagttcccacatgtcatcttgttgcaaccttcaatttttgagatagccatcttacaacgagggcattgcttagaatcacgaagtgcttcctggatatttatcaactcgtctatttccctcttttctttcaacaattgttcctctggtatggaatacaatttctgtcgttccggggaaacaacttggggtctggggcctactcgcatagatgacatccttgtcaggcccttcaaaatgcgtattttttcttcaggagtaatacatgtatcccccacatggcggcggcgtttgcacaaagtgcagaaggtaaaaaaacaacccgggcattgagcatcattgtcaacttccaagcaagcagcagaacacctggggcagtaaactagatcaggcattgcatctaacagtttctgtagagcaaatgattcccattgtgcatatccatcatctcgtagaaggcttttcaatacggatggcggaagtggattgcggcaatttgtatcaggacatgccagctgcattaaattcccttctttcacatggattttgcagtgagactccatacagagaaggctttccaaaaatatcttatgagatctcttctcactgtaactctgcataagaggaatagtagactcaactaaaattcttctcgcgatagctcgttcatctccaatttttaatgttttatctggatctaacactatttcatcattcaaagcaatggaagaccacgaagagctattcagccaatccacccatctgtatatgacttcttgccctggaagctctgtccaaacctcatcaagcgcagcacacaggtatgagacctttggttcatccaaccatttagctgcaagatgatagagttctccgccattgtggttttcactatcatcagttccaaccatagctccacttcgacgaagattcaagaacacacggatactatcaggaagtgtataatgcacaaaaatctgaataaatcgaagattgtccttattctccaagatcaccatatcatcaccaaaaatagcttgcagtgctattacctcgtcttcctgtagttggttattggcttgcagctgctcctccggtaggtcgtcctccccacgagccctcgcggccatcgactcaagcagcgcagccgcctcttcctgcgccgcccagtaggtgatgtcaacctccgccgacggcaagggcttgtcatccccaacatccctcacagccacccccgccgccgcggcggccgccgaggacgaggcttctctcgacatagggtttgaggatgagccaccagccgccat

SEQ ID NO: 21748 - DNA, 1810 bp, Oryza sativa
  unsure (1)..(1810): unsure at all n locations
  Clone ID: TF_OsC53097_1
ttgggatttcagcaatggaggagaggttagccgacgtggagggcagtttcgcctgcaattcgagaggggaggatgacttcaggagctgctgtggggatgaggatgagtgggaggacaccgaggagtcattcacggccggcgtcgccaagggagagcttgatgagagctcggtgaggctgttcttcaagggcgtgtcgagccccgaggcggaggggaagaagctgtccgggattggggtggtgatggagaggtcacctggggtgcctatgcttcaggtgcagaagaaactggacttctatgtggatgagctagtggccgatcacttggcgctgatggatggcctgttggtggcgttgcagaatgggatacggaagatctttgctttcaccaattcggagaagctgtactttcagagaatcgcagaagctgaaattctagaagaccagctcttggtagctttaggacacagaattcttgaactggtggaaaagctggaagactttgatataatattgcttcctagctttgagcttgagaggccactgcagttggccaaagaagccataggcatcatgtatctatctccatacgaggttggcacctgttcaatttgctgtgaggaaaaacgaggcgctcagatgatcaaagtgggttgtgctcatacattttgctatagctgcttgacttcatatactcaagagaagctgcaaaccaacaaggttcctataagatgcccacagttaaggtgtaaatatcatatttctgctagtgagtgtaagtcattccttccagttagctgctacgattctctggagagagcttttgcagaagctggcacctcagacatggaaagattttattgtccctttccaaactgttcagttctactagatcttagtcagcacttctctagggcaagtacatcaagtcagtcagacctcaattgtgttgagtgcccagaatgccatagagatatctgtatcaactgtggagtgccatggcatgtcatgatgggctgtgatgagtaccagagcttgcctgttgatgaaagagatgcaggagacctgtctttgcatcggctagcacaaaacaataggtggaggcgttgtcagagatgccgacgaatgattgaactcacacaaggctgcttccatatgaattgctggtgcgggcacgagttctgctactcctgtggcgccgagtacaccaatggtatacagacatgccaatgtgttttctgggacgaagagagcatcgaggctgcctcggcagcgcattccacccaagcatccgagatatgggcatgggacacgttcgactgcatgccaaccgccatcgaagggtactcggagcaggagagagctcagctggctctcattcagaggttcctctcagggggtttcaacctgggtgagcctccaagccagtcgccgccccgctgcgccgattcatatatcattgacaccatgaaggaccttcaccagctgccatggctcgagcggttcgtttcggtgatcagtgacagctacaatgaagattacatccagtgaaaacaacatagatagcattaagaaaaaaaagaatggcacatactgatgaatttcatttggaataatatgtttccatgcccctcttgaaaatcaatacaggaaaagtgagatggttctataccttcatgagcttttcctcttgtactcccttttttcctggtttggtgcataagcaaaaggagttgccatcactgattttatttattttttgttaattccctaagcgtgtaaaaaaaaaaaaaaaaaaaaanngannnnaa

SEQ ID NO: 21749 - DNA, 943 bp, Oryza sativa
  Clone ID: TF_OsC58839_1
cgcttccgccgccgagcaccactcgtcgccggccatggagacctccgccgccgcgggtggcgcacacttgatctacgtatcctccgacgacgaggaggacgaaacacgcgtcctccttgccgaatcctacagcgccgaggagatccagatccagcaggccatcctcctctcgctcgacccctccagcgacgcggacgccgcccattcctccgcctcctcctcccgcccctccggcgccgcctccacctccgacgaaccctcctcccttcccgaccgcaagggcaagcgcaagctatcatcggaagaagatggccctatcgaatccacgaggaagaagcggcggaagcgcggccgattcaagtgcagcgtctgcatggagaagctacaggtctcggagcagttcaccgtgagcttctgtgcccacgcgttctgcaacagctgcattggccgctacgtcgccgccaagatctccgagaacgtagccgtgatcgggtgccctgaccccgggtgcgaggagggtttcgtcgagatggacacttgcagggatatcatcccgccggagttgtttgatcggtggagcgtctcgctgtgcgagttggcactgggtgagaagaagtactactgtccgttcaaggattgctcggcgttgctgatcaatgacaacgacggcgcggagaagaagatcagggagacggagtgcccccactgccaccggatgttttgtgcaaggtgtcgtgtgccttggcatgatgggatcaaatgtaaggagttcaggaagctaggcgatgatgagaagggggaggaggatctgatgttcaagaagctggctgggaagaagaaatggcagaggtgcccaaattataaaatgcagttttctgaatggaagattccagaatcaccaaattttggtagagttaggcaatgtaaggttgtgatggtgtaa

SEQ ID NO: 21750 - DNA, 2664 bp, Oryza sativa
  Clone ID: TF_OsC1517_1480
ttactcaattactgaggaatgactcgggcagtgacccatgccacggtgccactccactttcctccctcccacctcctcgccaccatcagagccatccgtcggaaatcttgcggtgacaaggatgttagtggtgtggggccttttctcccatgagctcccagaggttgcgagcacaaggtgatagatttggaggatggatctggccatgatagtgactgtgatggcggcaacgcggttgaagcgacgacaactatgaccaatggtgttgaagacagttccagtagtggatctagcgctggtgatgctagatccagtagcttcgaggctagatctacgtgaccaacgcgtggtagaggaatgctcgcaaggcatagcaatggcgacactgggcaatggtgagaccgcctgcgtggaggtacggggatgggtgtgagcagttgctgtggcaaccccctcgtgccgacaggatgcggtattggtagcagacacggcgataggaggaaggtgggggttgaccacctttgtgtagaggtgttggcgacaactctcctcttctcgtgcttggtagtcggcgacgggatggcgtctgtgtcgttggctactgcgcagatgagagaccaccaccccttttatttgaatggcttttattggaggataagatgcagttctccttttagaaaatctgcacagtgctttaatcagaacgacgccgagattgtcgaggcactggcatttctccttcccctccagcaccgctcctatctggagcccacaaaggtagcagaagaccatgcggcacctgcaactcatgaccctgcagccggctgtcctctcaaccagcatcctgcatttggggcacgccttccaccgccgctcgtcggcgagcttcttcaccatggcggcctcgggccccttggagcagtcccggtggtcggcgtcgtccgccgtgctccactccccgccgcacgtcgcgcacagcaggtgctggcacgccgggcacgccgccatggccggctccgcctcgccgctggtctccagcaggatcccgcaccggcggttggggcagtacgcccgccggtcgtgcggcacggcgccctcggcgagccggagcccccagtcggtgaacgcggcgaagtcgatggccttcttgcacccctccgggtggagcacgccggcgccgccgtcgccgccgtcggcgcactccgggtccgggcacgccaccggcacggccccctccctcaccttgccgtcgatgtaggtggtcatgcactcgaggcagtacttgtggtcgcaggggaggccgcggaagaggtcgagcatcggcaaggtgtcgaagcagatgccgcagtcgaacgtcgggaggtcgccgtcggcgagggggagcaccctcggccgcctcgtcgacgggccggcctcgtcggggtcgaggtcggatgggcggaggccccacttcttgtagaagtttggcatggagaattcaccttcttcttcttcttcttctccggcgatggcggcggcggtggcgcggggtggtggttgcgccacgacgggcgattttgtgaggtattgcaccgggagaggcccatggagctctgggtcctcttgcagctcggcgatcacggcgtcgcggatgacggagtcgtaccagtcgttgtcgtggccgtcttccatgccggcgaagacggccggcgtgtccctgtcggcgagtagggcctgcctcttcgaggaaaccgagtcgttctcgttcgcgacgttgcggtgaacctcttcttcttcttccatgccgccggcggcgcctcctttgccggcggagatggccggggttctgtgttgcccacacttgccggcagagacggcaggggcggcgtggctcccttctcccgtggtggcggtgacggccgccggggtgtcggcggcggcggcggcggcggtgagctggcggtcggcggcggcaatgcgagtccatatccggccgaactgcgcgacgtttgggcgagggtttgcttgcaatgctgccatgaggttttctgccctagcccaacggccattgccggcgccacgggcatggccggtgccgggagcggcacgagccgccatacgggcggcaggacgtctcccgccgtggcggggagcggcggcgccgccagcgatgaggccgccggggcggagtgagagttcagtagacggcgccatggcagcaggtaggccctgtggtaaggtggcggtagagctcgtgccgatgtcggcggtggcggcgccgcccggcggccgcgggaggaaggccgtcgctgatcttgccggtgccggctgctgtctcgtcgccacggtgcggcgcccaccggatcgtaacggaggcggcacgtacagttggacggtccgcgccgccgccgccgccgccggcgcgtcatcatcatcatcgatgacgatgggttgggccctgctcccggcggcgccggcggcgagggaagacgtcgatcctacgcgatccatcggcggcgcgaagctgctccagtcgtcgtcgcccagctccatcagctgcgacacgtacaggtcacgcgcgaacgcctcgtcgacggcgacatcggcggcggcggcggcggcggcgtggtggctgctcgatgctcctcctccagtcgcagcagggtggggttttcctccttccat

SEQ ID NO: 21751 - DNA, 984 bp, Oryza sativa
  Clone ID: TF_OsC42004_2
gccgcgaaacgaggcaatggcgtcggggtcttccagttccaacgacgccgccgccgacctcaccgtcctcgtcgacgacttctacttctccgtcctctcccacggccgcaacgacgacgacgactccgccgatggagacgacggcgagctcttcccgatatccgacgagaagtacgcctccgagctgcagctccaggaggtgatcatgtcgtcctccgtggcggccaccacggcgcgctcctcgtcggcgccggttatcttcataggtgagtgctcctcctcccacgccgcgtcgtcgtcgtctcggttgacctcgatccccgccgccgccgcgacgacgctcgtcttctgcaagatctgcatggacgccgtgccgccgtccgccgcgcaccgcgcgagccgcgggtgcgaccacgccttctgcgcggcgtgcctcgcgggctacgtcggcgccaagatccaggagaggatcgccgacgtccggtgccccgaggagcggtgccgcggcgcgctcgacccggagctctgccaggggatcctcccgcgggaggtgttcgaccggtggggcgcggcgctgtgcgaggccatggtgctcgccgccccgagggcgtactgcccgttcaaggactgctcggcgatgatgctggacgacgccggcgaggccgtcaccgagtcggagtgcccgagctgccggcgcctcttctgcgcgcagtgcgccgtgccgtggcacgccggcgtcgactgcgcggcgtacaagaagctcggcaagggggacaggggcaaggaggacctgctggtggtggagatggccaaggggaagaagtggaagaggtgccccaagtgcaagtacttcgtggagaagtcccaaggttgcctgcacatcacctgcaggtgcggctttgaattctgctatggatgtgggagacagtggcagctgatacatgacggctgctgctccctaatgacacaacaagctggagaagt

SEQ ID NO: 21752 - DNA, 892 bp, Oryza sativa
  unsure (1)..(892): unsure at all n locations
  Clone ID: TF_OsC1713_3842
cttgtgtgtagatagtaccatagcatatgtccattcagcactcgcctgtgccaagcttcaggtatgaactttagttgggtctctggtataccaacaacatcacttaactttgtaagatcttcattttcaactttttgcagatctgcttgtgctttctgccttgatgtttgattggacgcccagcgctcataataatgcatgtatctctcaagcgaatttttagctctctctctccttgcttcagcctcatcatacatgcctcccatctttgctgattgataacgattgcaagcataaaagccaccagtcccatctccatgatctgaccatgcacctaggcataaccagcaaaactcaaatttacaaggaggagtgcatgtcatatgcatgcatccctgattcttctctataggtcgtttgcatttcggacagggcttagaataagctaatatccaattcatgttttcagattctgcgctgttctttagtatccactttgagactgtgtcacagctaactggccgatgagcttcctctgcacaattccagcaaaaactgaatttgcatttgcatgagacatcatagttaccatcaccaagaaactcaactgcacaggtacaatcaggagctggacaccattttatcttgttgttaactccaatatatgaccataatacaaatcgtgcatactttactttatcctcatctttcgtcagactattaatcatatcttcaagaacgattgcatcacaagatggttcagggcactgcaacaccaaacancctggaccatcatttactgcagcactaatatacccttcccaacattcatgacaatagaaatgggaacaaccagcacagctcattgcatttgcagcacatcctcaaaaca

SEQ ID NO: 21753 - DNA, 520 bp, Oryza sativa
  Clone ID: TF_uC-osflm202106d08b1
gctaatgatgatgataaagtgagatatgcacgatttatcttacgtgcatatgttgaagatagcaagaagactaaatggtgtccagctcctgactgtacatgtgcagtggaatttgtcagcgatgggaactatgatgtctcatgcaattgcaaattcagtttttgttggaactgcacggaggaagctcatcgaccagtgaactgtgagactgtttctaggtggatattaaagaatagcgcagaatctgaaaatatgaactggatactggctaattctaagccgtgcccaaaatgcaaacgaccaatagagaaaaaccagggatgcatgcatatgacttgcactccaccttgcaaatttgagttctgctggttatgtctgggttcatgggctgaacatggggagagaactggtggattttacgcttgtaatcgctatgaatcagcaaagaggagggagtttatgatgagactgaagcaggagggaaagagccaaaaattcacttgagagatacatgcattac

SEQ ID NO: 21754 - DNA, 2248 bp, Oryza sativa
  Clone ID: TF_OsC2708_1
ttttttttttttttgtggatgtaaatttccttgagaattggccaattcattattacaaggttacaacatcattacaacaactcagttcattggtggcgcacatctgctagtacgcgctacttccatagaacaacacaagagttacagatatcgatatagagttatatacaggatgaactagatgatgatgagcgaggcttcaaggataccgtcagttgattaaaaaaattgggaatgacctgaggttttttagccatagcacatgatgagttgagaaaatctaatttgcataggcaacagttctctgctaatacctcctcacgccagctccactgttcattgaaaacttcaactttgcatatgttctttaccaccaggtttgaaccagaggtttctcaaccaatggagtcgagatctaaaaccatagctatgtaatgctatcgatgctggttgttacaagcctggcagtttctggcagatttttactgccaagactcttcgaagttgcgctcttgctgcatgtaccatggctagtggaaggacctacatcatttaatccagtctccaaagcccggacaaggttctcgaaataattgcgagtcacactagttaatccagccaactttgtacggaagtcattgaaatcttttgagggagattctgcttcaaggtatacttgaagttctttctctgcacattgatgcagccgctccaaacctgattccgcctcaccttgcagatattcaaagaactgtcttttggcatgttcatgctctgggaggtaaaaaccataagcataagtccacttcaataccctcctacattcgacaatctgtaaccaagcctctatgatgaacttgagctgtgactctggttggctttgtatatcacttaacttttcaagcttgtcgttttgcaaactcagcagatctcctaatgccttttgcctcgacgactgattggctgcccaccgttcataatagtgtgtatatctctcaagcgagttctttgccatttctcttctcctttcagattcatcatacgctccttcctgccttgctgcctcataacggttacaggcataaaatccaccagtccgttctccatgctccgaccatggaccaagacacagccagcaaaactcaaatttgcatggaggtgtgcatgtaatgtgcatgcatccctggtttttttcaatgggccgcttgcacttaggacaaggctttgaattagctagaatccagttcatattttcagactccgcactgttcttgaggatccactttgaaacagtggcacagtctaccggacgatgagcttcctcagtgcagttccaacaaaagccgtatgaacagttgcagttcacatcatagctaccactgcccatgacaaattctacagcatattcacatccaggagcaggacaccattttgtcttcctattatcttcaatgtaagatctgcgaagatatcgcccatacttttccctatcctcgtcatcagccagtgaattgatcatatcttgaccaacagcagctgtgcaggacggatcaggacatctgtcaatgtgcactatgtaagtggtgatcccacacaaaacagaatccggggttgataaagagaaatatctcaaggttagattgtcaaacctctccaacatgcattctctgtcatttggcatttcgatgagcttttccggaaaaccaacaaccttacgaacatgttcttcatcagcaaaccattcatcatgcaccttactgacactccagttataattacgaagaagaacacatgcttctgactttgaaattgaaagaacagttgaaaccctatttatatcatcctcttggcgctgttgtatatcggcttcacttaatatactgtaattttgctcatcctcatgagatcgcgaccctttgcgaataatggcggttgtttcagtatggtaaggatatggatatatccacaattcatttacagttatgccatagcctatttcctgtagactatctttatcccatgaatttatatccccgctccccaccctcccaaacaatacacccatagaattcccattgtttttctgctgccggtgcgagaggagctccgcggaatcgtcggagtcgtggtcggcgaagtcgtagtcggcgtccccgtcgtcgctcccgccgagcccggcctccccgccgctgtagaagtcgtcgtcggcggagtcgttcgcgtcgagcatgtcgtcctcggagtccat

SEQ ID NO: 21755 - DNA, 5272 bp, Oryza sativa
  Clone ID: TF_OsC54778_1
atgcgccgatccaacgatggccgccccttccgcccgccggactggggcccgccgccgcaccgctaccaccaccaccaccagaaccagtaccagtaccagcagcggtatcgccccgcgcagccggggccgcggcagttcgccgtgatcctcctccgcggggggagcaacctctcggcgccgccggccacggaggtcgaggcactcgtcgccggcctgccctcccctcccccggacagcctgagcgtctcctcgtcgggccgccaggccgcgcgcctcgcgttccgctccccgcaggccgccgccgccgccgcgcgcgagctctggtcgctccgcctcgagggcctccacctcctcaccccggacgtctccgatcccgccctcgccgcgcacgccgcccccctcatcgcctccctcttcgccgcccacgccgcccgcctcgtcgactccgacctcgtctccctcacggccgcccgctcctccgagctcgcggcctccatccaggcggtgaagcgccgcctggcggggcacaatcgcatccgcgacttcgagcagctccaggcccagaagagaactctcaaggctgagaaggagttggtagatgctaaaatcgatgagtacaaagccgcgatgagatcgatacggcgtgcattgttgcgtgggacggaggatgacgaggaggcagaggaggaagggttggaggtgtttgggattgggggaggtggtgagatgaatttcgctaggctgcacatgataatgctgcgggaatgtagaaggcttaaggaggggctacccatctatgcttaccgcaggaacattctagatcacattttcgctaaccaggtgatgattttgattggggaaactggttctgggaagagcacacaattggttcagtatcttgctgactcaggtcttgctgctaatggttcaattgtctgtactcaaccccgaaaaattgctgctatatcattggcacatagagtagttgaagaaagcaatggttgctacggggacaactttgtgttgaattcaacctttttagatcatcaagatttcagttcaaagattatatataccacagacaactgccttttgcatcactgtatgaatgatatgggactagatggcatttcatatattattgttgatgaagcgcatgaacgaagcttgaacaccgatcttctcttagctttgattaagaagaaactgcttgataggctggatttgagacttatcataatgtctgctactgccgatgctaatagactcgctgaatatttttatggatgccaaacattttatgttaaagggcgaagttttcctgttgaaattaaatatgtccctgatatatcagaagaggcttccttcaataccgtgccaaaccatctgcgcggttcttgtgctactgcttcatatgtttacgatgttgtgaaaatggtaagcatcattcacaagaatgaagaagagggtgctatccttgctttcttgacttctcaactcgaagttgaatgggcatgtgaaaacttcagcgatgcagatgctgtggtacttccgatgcatggaaagctttcccatgtagagcaaagtctagttttcaagagctatcctgggaagagaaaaataatcttctgcacaaatattgctgaaacatcattgaccataaaagaagtgaagtatgttgttgattctggactggctaaggagagcagatttgtgcctagcagtggtctcaatgtactgaaagttaattggatctcccaaagttctgctaatcagcgtgctggccgagcaggtcgaactggagcggggaggtgttacaggctttactctgaatctgacttcagtatgatggaagtgcatcaagaacctgaaatccgcaaagttcatcttggcactgctgttctgagaatacttgcgctgggtattagggatgcacagaattttgaatttgttgatgccccaaacccagaagctattaatatggctgtaaagaatcttgaacaactgggtgctgtaaaatataaatgtgatggttttgagctgactgatactggtcgctacctagttaaattgggaatcgagccgaggcttgggaaaatcatgcttgattgctttggttttggtttgaggaaggaaggtgtagttctagctgctgttatggcaaattctagcagcatattttgtagagtgggcacagatgaggagaaatacaaagctgaccgtctaaaggtcccattctgtcatcaggatggagatctgttcactttactagctgtatataaagagtgggaggatgagcatgaaaacaggaatacgtggtgctggcagaatagcatcaatgccaagaccatgaggaggtgccaggaaacaatatcagaccttgagaattgtttaagacacgagctgaacatcattgtcccaagttactggtgttggaaccctgaggagtccaccgtgcatgataagttgctaaaaagaattattctcacatctctttctggtaatattgctatgttttctggacatgaaaggtttggttaccaggtgatttcaacggatcaggctgtgaaactacatccctcttgctcattgctcatttatgatagcaagcctgagtgggtggtgttcacagaaatcttgtcagtaccaaatcaatatttggtatgtgtaactgctattgatcctgatgctttgtgttcgattcaccccatgcctttgattcagcaactggagaagcttaaattgcaggtgaaggtaataagtggacttggatataacttgctgagaaaattttgtggaaaatctggccaaaatcagcagaagataatctcacttctccaagaagaattcagggatgaccgtgtgactgttgaagttgacttcagaaataaagaggttgtgctatttgccaaagaacaagacatagaaaaggtgtttggcatcgttaatgatgcattggagtgtgaagctcggatgttgaggaatgaatgccttgagaaaagtttgttttctggaaaacctggtgattgttctcttgccctatttggttctggtgctgaaataaagcatttggaacttgagaagaggtatctgaccgtagaggttttgcatcaaaatgctcatgagttgaatgacaaggagcttatttgcttggtggatactcttatctctggtgttgctaatttttataaactttatggaaatcttcaggtggcctcagatgaaacgaagtgggggaagtttacattcctcaatcctgaatatgctgaagatgctgtttcaaaattgaatgggatggaatttcatggttctccattgaaagtggttccagtatgctcttccagtaatcgaggattaccatttccagcagtgagagctaaagtatcttggccacttaagcaaagtcggggactcgcgctggtaacatgtgccagtggggaagctgaatttgttgtaaaggactgctttgctctgggagttggtggaaggtatatcaactgtgaggttagtacaagacatgagaattgcatttttgtcagaggaattccaatgcatgtaacagagccagaattgtatgatgcctttcgtagcacgacaacaaggaaaatcgttgatgtgcatttgctcaggggaacacccatagctgccccttctgcttccttgtgtgcagaagcactaaatagagaaatttcttccttcatgccaaagaaaatttttcctgcccaaaatttccgtgttgaggtgttaactccagaggagaatgattcggtgatgagagccactattacttttgatggaagtcttcatcgagaggctgcaagagcattggaacatcttcaaggaagtgttcttccatgctgtcttccttggcagacaatacaatgccagcatgtgtttcatagtactgtgtcctgtcaagtacgcgtgtataatgttatcagccaagcagttgcttctcttcttgagagcttccgaagccaaaaaggcgtgtcttacaatttggaaaagaatgaatatggtatattccgtgtcaagcttactgcaaacgccacaaaaacaatagcagacttgagaaggcctcttgagattttaatgaaaggcaaaacaataaaccatcctgatctgacactaagtacagttcagttgctcatgtcccgtgatggtgtagcagatttgaaatctgttgagcaagagactggcacttacattctgtatgacagacaaagtctaaatattaaagtctttggactccaagatcaggttgctgcagcagaggagaaattgatccatgcccttctacaactccgtgataagaaacctttggatattcgtcttcgtggccgtaacctacctccaaacttgatgaaggaaatgttaaaaaagttcggggctgatctggaaggattgaagagagaggtgcctgcagtagagcttcgattaaatttacgacaacatacactttacgttcgaggcagtaaagaagacaagcaaagggtggaagaaatgatctctgagctggtaaattctacaaagtacaatggcctgcttcaacttccattagagaatgcatgccctatttgcctgtgtgaggtagaagatccctttaagcttgaatcttgtgggcatgtgttttgtctgacttgcttggtggatcagtgtgaatctgctttgaaatcacatgatggtttccctctgtgttgcctcaaaaatgggtgcaagaagcagctccttgttgttgatttgagatctctcctatcgagcgagaaactggaagagctatttagagcctccttgagagcatttgttgcttctaatgcaggaaaatatcgtttctgtcctactcctgattgcccatccatttaccaagtggctgctgcagatgctgaaagcaaaccttttgtctgtggggcttgctttgtggagatctgcaacaagtgtcatcttgaatatcatcctttcatatcctgtgaggcatacaaagaatacaaggaagaccctgatgcaactctgcttgaatggcgcaaggggaaggagaatgtgaaggtatgcccttctttccactttacaatcgagaaagctgatggttgcaaccatgtcgagtgtaaatgtggcagtcacatttgttgggcatgcttggagaacttcaggagcagtgatgattgttatagccatctcaggtctgtgcacctatcctattaacatatcatgtaaatttgtataaattggtacaaataattatgtgtataatataggcagctgatccattaccact

SEQ ID NO: 21756 - DNA, 1875 bp, Oryza sativa; identical to SEQ ID NO: 12208
  Clone ID: TF_OsC59837_1

SEQ ID NO: 21757 - DNA, 627 bp, Oryza sativa; identical to SEQ ID NO: 12215
  Clone ID: TF_OsC930_2

SEQ ID NO: 21758 - DNA, 776 bp, Oryza sativa
  unsure (1)..(776): unsure at all n locations
  Clone ID: TF_OsC142633_1
cagcnagagggntaaaatatcgatcagtagatcactttttttttttttttttttatcagaagctgatttcctacaaaaaaaatataaggcagccgttcactccatcggaaacccttcaaaatgggcagtatacaaaccacggaacaccctcaaggataatccgtaagctaaagttaccggctccacagcttgaatgaaaataatcgaaaaacaggtataagcaggcaatataggcacaaatagcaaatcgaaaagggcgcgtgaatacgaaatttttttcaattgagctttcttcatggcatttgaaggggcaagatctttctgaaattggaatccaggaaacgcaaactctacaaaatcagctcgaattgagaatacgctgtatacgctcagaaaagtaccatttaatgattgaggacagcaacgtactgaatcgataggaaattctcatccagcaagaaatcatggatctgtacagaaagatgactaattgcataggatatacccttaattatctgatgacagcttatctctctcctcagctctatgagacaggggcagaaaatgaagcgaatcgagattcaacaactccatacaactttgcggttatcgaggaagccaacactcctgctcgtcttgaactcaatcccccaagccaacaaaatgatgctgagcaaaccacacctcctaaactagggctccaattgcatccatgattacctgacttgtgcactctgcagatactttgtagtcctcgtgccgattcctgcagcccg

SEQ ID NO: 21759 - DNA, 613 bp, Oryza sativa
  Clone ID: TF_jC-osflLIB3477P008a12b1
ctcctcctcctcttcttcttcttccactagctagttggtcttcctccttcagctagcttgtagcaactaaggttaggtcggatcgagatcgggatcggccgccggcgagcggggagcggcaaggatggcgcgggggaaggtgcagctgaagcggatagagaacaagatcaacaggcaggtgacgttctccaagaggaggaatggattgctgaagaaggcgcacgagatctccgtcctctgcgacgccgaggacgccgccatcggcttctcccccaagggcaagctctacgagtacgccagtgactccagagatggacaaaatccttgaacgttatgagcgctattcatatgctgaaaaggctcttatttcatctgaatccgagagtgagataactcttccccaggtgacaacatgcactgcatccagaagtactcatggtatttgatgtcagtactgtttgatgagtaaaactttgggaaattggtgccatgaatacaggaaacttaaggcagagattgagaccatacaaatatgtcacaaacacctcatgggagaggatctagaatccctgaatctcacaagactgcaacagctagagcagcagctggagag

SEQ ID NO: 21760 - DNA, 483 bp, Oryza sativa
  Clone ID: TF_OsC15113_3
tcatggcgaacggtgtggaggtgcaacgccggtgaccacaagccggctagggctccaagtttggacaacccgagctcggggggctgtggatctagctgtcccgagtttgggtactccagatccagtggcctccggcgccaacagcgccagatccaggctcatggtgagtggatggcgtctcctctctcctccaatcggctgtgtgcgctgccgtccgccgtcaaggcctatcggctgtacggcgagcatgtgcttctcctcatcctttctggatctgatatgtttcgatgtatttttcagctgcttctccagttgctgcagctctttgagattcagagattcaagatcctctcccatgagatggcagtgacggtcctccgtcaaaggtgactggtcctcactagtgaccactaatctgttaccaagcccaaaccttgtgcaggagcacgccgtcgccgccgccgttgcgaggatccgctccat

SEQ ID NO: 21761 - DNA, 1023 bp, Oryza sativa
  Clone ID: TF_OsC15113_1
ccccaacccccgcgccaccgcttctgccggcggtgcccactcccggaggagataaggccgacttctctctctctctccatttctttcgatttctccacttctctctctctccctttctctctgtgtgcagcggcggcctggcagggacagaggggagcgtgcggcggcccagcggcggcggcgccctcccctccaccagatctaacaggagcaggaggagaggcacggtcatggcgaacggtgtggaggtgcaacgccggtgaccacaagccggctagggctccaagtttggacaacccgagctcggggggctgtggatctagctgtcccgagtttgggtactccagatccagtggcctccggcgccaacagcgccagatccaggctcatggtgagtggatggcgtctcctctctcctccaatcggctgtgtgcgctgccgtccgccgtcaaggcctatcggctgtacggcgagcatgtgcttctcctcatcctgtgcagtcaccacctaccggctacattagctagacatctttggagctgcttctccagttgctgcagctctttgagattcagagattcaagatcctctcccatgagatggctgcaggaattacagaaaatcaattttgctgcaagatcctcttctcccataaggtaaataggtgctccatagactatggagttgctgacatagcagataattgaatgactctgcttttctaagtgcaagccattgtgttctttgagttttatattaattctcgaacttgatgatgttggcctggtagcatgtctctatatttgaaaactcaaaagagctcttttctgatatggcatcattactttctaatttttgaatttgtaatttctttttctatgagcaattttggcagtacgaatgtaagagacatggtcctaattcttgtttgtctggagaatgggaattggttgaaaaaaagaagctacaaatgtttaacaaaaaaaaaaaaaaaaaaaaaaaaaaaaaaaaaaaaaaaaaaaa

SEQ ID NO: 21762 - DNA, 1294 bp, Oryza sativa
  unsure (1)..(1294): unsure at all n locations
  Clone ID: TF_OsC482_1
cgcctccttcgcttcgcttccattggtggtggtctccattgctcccttcctccctgcctttttcttccataagtagtagtagtagcgggagtggcgcgccgccgcagccatagatctgcggcgccgcgtatctcgcggctggtttggctggtgcggttagcggctagggttttggttgtttcgtctgatcgatcctccccgattttgcggcggcggtggtgaattggtgtgtgatctgatatgngctggcggcggcggtggcggggaaggggggagggggaggggagggcggcgacggggaagagggagaggatagcaatacggaggatcgacaacctggcggcgaggcaggtgaccttctcgaagcggaggagggggctgttcaagaaggccgaggagctctccatcctctgcgacgccgaggtcgggctcgtcgtcttctccgccaccggcaagctcttccaattcgccagcaccagcatggaacagattattgaccggtacaactcgcattccaagacacttcagagagcagaaccttctcaactcgacttacaaggggaggacaccagtacttgtgccagactaaaggaggagcttgcagaaactagccttaggctgaggcagatgagaggagaggagctgcacaggctgaatgtggaacagctgcaggagctagagaagagcctcgagtccggtctaggctctgttctcaagaccaagagcaagaaaattctggatgagatcgatggactggaacgaaagaggatgcaattgatagaggagaatttaaggctgaaggagcaagtgtccaggatgtcaagaatggaggagatgcagcctgggcctgattcagaaatcgtgtacgaggaagggcagtcgtctgaatctgtcaccaatgcttcttacccgcgacctccacccgacaacgactacagctctgatacatctctcaggctcgggttgtcactcttcagctccaagtgatggctggaaactaaaactgagaggaaacagctggatggcatgcctgcatcgccaaatgatcagtgcatgcactgcaagactgcaacaaataacacagttttagattgccagatgatgatgtgtgtgtgctgagagtcactggctattatcgtacacataataacaatagaacgaaaaagttcttctgttccttggatgtgaccggaaactactcccatacatgttgtcaatggctctgtaatcgagtgtctgcaattccagctgaaagcaaccgattccagggaaaaaaaaaaaaaaaaaaaaaaaa

SEQ ID NO: 21763 - DNA, 783 bp, Oryza sativa; identical to SEQ ID NO: 12232
  Clone ID: TF_OsC386220_1

SEQ ID NO: 21764 - DNA, 928 bp, Oryza sativa
  Clone ID: TF_OsC1443_2
atggggaggggcaagatcgagatcaagcggatcgagaacgcgaccaacaggcaggtgacctactcgaagcgccgcacggggatcatgaagaaggccagggagctcaccgtgctctgcgacgcccaggtcgccatcatcatgttctcctccaccggcaacatcaaggggatctttgaccgctaccagcaagccatcggcaccagcctttggatcgagcagcaaaggatgggagaagatctggacgggctggagttcgacgagctgcgcggtcttgagcaaaatgtcgatgccgccctcaaggagtatcatgtgatcaccacacagactgaaacctacaagaaaaaggtgaagcactcctacgaggcgtacgagactctgcagcaggagctggggttgcgcgaggagccggcgttcgggttcgtggacaacaccggcggcgggtgggacggcggcgccggcgccggcgcggcggcggacatgttcgccttccgcgtggtgcccagccagcccaacctgcacggcatggcctacggcggcaaccacgacctgcgcctcggttgatatataattgcgaccgccgcccccgccgccggcggcctgcttgtttccggccggccggcccccggacaccggatcatcgctcgatttagataacaagccggcgaataaattccagtgctcgtgttacttaccggcatgggcatgcattactatcgatcaacccaagaacttcatttcatttaccaaaccccttgatgtgtgcaatgatccagcggttaaaccgtgtgttgtctcttgacattttggaccagttactaataatgttgtattatgtatgcgtggtgtccaactgtgcttggaaaatttcccccttatttgccaaaaaaaaaaaaaaaaaaaaaaaaaaacaaaaaaaaaaaaaaaacca

SEQ ID NO: 21765 - DNA, 1254 bp, Oryza sativa
  Clone ID: TF_OsC892_1
ccagctttcccctctcttccgcttcgcgagattggttgattcatctcgcgattgatcgagctcgagcggcggtgaggtgaggtggaggaggaggaggaggaggagatcgggatggggagagggagggtgcacccgcgcaggatcgagaacaagatcaacaggcaggtgacgttcgcgaagcggaggaatgggctgctcaagaaggcgtacgagctctccgtgctctgcgacgccgaggtcgccctcatcatcttctccaaccgcggcaagctctacgagttctgcagcggccaaagcatgaccagaactttggaaagataccaaaaattcagttatggtgggccagatactgcaatacagaacaaggaaaatgagttagtgcaaagcagccgcaatgagtacctcaaactgaaggcacgggtggaaaatttacagaggacccaaaggaatcttcttggtgaagatcttgggacacttggcataaaagagctagagcagcttgagaaacaacttgattcatccttgaggcacattagatccacaaggacacagcatatgcttgatcagctcactgatctccagaggagggaacaaatgttgtgtgaagcaaataagtgcctcagaagaaaactggaggagagcaaccagttgcatggacaagtgtgggagcacggcgccaccctactcggctacgagcggcagtcgcctcatgccgtccagcaggtgccaccgcacggtggcaacggattcttccattccctggaagctgccgccgagcccaccttgcagatcgggtttactccagagcagatgaacaactcatgcgtgactgccttcatgccgacatggctaccctgaactcctgaaggccgatgcgacaaccaataaaaacggatgtgacgacacagatcaagtcgcaccattagattgatcttctcctacaagagtgagactagtaattccgtgtttgtgtgctagcgtgttgaaacttttctgatgtgatgcacgcacttttaattattattaagcgttcaaggactagtatgtggtataaaaggccgtacgtgacagcctatggttatatgctgcacaaaaactacgtatggtacagtgcagtgcctgtacatttcataatttgcggtaaagtttattgactatatatccagtgtgtcaaatataataaaatgtcgaggtttaattaccccataaaaccaaaaaatgcaccccacctaatgccgaattcctgcagcccgg

SEQ ID NO: 21766 - DNA, 1226 bp, Oryza sativa
  Clone ID: TF_OsC1057_1
tacccgcgggaatcgttcgatcgatcgggcgagatggggaggggaagagttgagctgaagcgcatcgagaacaagatcaacaggcaggtcaccttctccaagcgccgcaacggcctcctcaagaaggcctacgagctgtccgttctctgcgacgccgaggtcgcgctcatcatcttctccagccgcggcaagctctacgagttcggcagcgccggcataacaaagactttagaaaggtaccaacattgttgctacaatgctcaagattccaacaatgcactttctgaaactcagagttggtaccatgaaatgtcaaagttgaaagcaaaatttgaagctttgcagcgcactcaaaggcacttgcttggggaggatcttggaccactcagcgtcaaagaattgcagcagctggagaaacagcttgaatgtgcactatcacaggcgagacagagaaagacgcaactgatgatggaacaggtggaggaacttcgcagaaaggagcgtcagctgggtgaaattaataggcaactcaagcacaagctcgaggttgaaggttccaccagcaactacagagccatgcagcaagcctcctgggctcagggcgccgtggtggagaatggcgccgcatacgtgcagccgccgccacactccgcggccatggactctgaacccaccttgcaaattgggtatcctcatcaatttgtgcctgctgaagcaaacactattcagaggagcactgcccctgcaggtgcagagaacaacttcatgctgggatgggttctttgagctaagcagccatcgatcagctgtcagaagttggagctaataataaaagggatgtggagtgggctacatgtatctcggatctctctgcgagccacctaatggtcttgcgtggccctttaatctgtatgtttttgtgtgtaagctactgctagctgtttgcaccttctgcgtccgtggttgtgtttccgtgctacctttttatgttttgatttggatcttgtttgaaaataatcttaccagctttgggtaaactgtttattacgtactctatatagcatatgtgaccaacgacaacggtttcattttagatgatgtgtatggatgatttctttccaaaatcacatctttagtataagagcaattttaccatccaaaaaaaaaaaaaaaaaaaaaaaacctgcagcccggggatccactagtttagagcgccgccaccgcgg

SEQ ID NO: 21767 - DNA, 773 bp, Oryza sativa
  Clone ID: TF_OsC44879_2
gcaatctctagagaatcagctggaaataagtctacgtagtgtccgtacaaagaaggaccacgtcttgattgatgaaattcatgaactgaatcggaaggtctctatagcattttagtttttgtaatcctccatgaaggatgtttattattattattattactttagtatactgactctacttggttgcagggaagtctagttcaccaagaaaacatggaattatacaagaagatcagtttaattcgtcaagaaaatgctgagttatataagaagatctacgagactgaaggaccaagtgaagtcaatcgggattcaccaactccttacaattttgcagtaattgaaaaaacaaatgttcctgtgcaacttggactcagcacactaccacaacatagtgacgccgaacaatcaactgctcctaagctagggttacagttgaatccatgaccagaaaaacattgttttgctacacccttgtatagctgaaaggatactatttgctgtcaagagttgatactcagatcaagaaaaaaaaaactattcatgccatagtgattgagaaatggacttgtatactggaaataaatgccacagtggaattgagttgtggaatccaggcaatgagtgttttatagattcaatttttccatgtatttttcatatattaaccagagcgggcttgtgtaaaaaatataaccaggcaaggaaaattagctgtattgtgcatatggagcaaatttcaggcgttactaccattaaaatcatgacatgct

SEQ ID NO: 21768 - DNA, 1168 bp, Oryza sativa
  Clone ID: TF_OsC494_1
ctttagctcatcccatcatcggtcatattggtggcagcttcatgttgctgagctataggcgaatggttgacaagagtactagttagcttaataatatagctttgcaaaagttgaggtaaggggttgtgagaagaagcagcttgatttgctactggctttgtgctgctgtgtggttgttctggtgtggatcgatcagagatggggaggggaagggttgagctgaagcgcatcgagaacaagatcaaccggcaggtcaccttctccaagcgccgcaacggcctcctcaagaaggcgtacgagctctccgtgctctgcgacgcggaggtggcgctcatcatcttctccagccgcggcaagctgtacgaattcggtagcgccggaataaacaagacattggaaaagtacaatagttgctgttacaacgctcaaggttcaaatagtgctcttgctggtggtgaacatcagagctggtaccaagagatgtcaaggctcaagactaagcttgaatgtctccaacgctctcagaggcacatgcttggtgaagatcttggaccattgagcataaaggaactgcagcagctggagaagcaacttgagtactcactgtcacaggctcgacaacgaaagacacaaatcatgatggagcaggtcgacgatcttcgccggaaggaacgccagcttggagagctcaataagcaactgaaaaacaagctagaagctgaagccgatagcagcaactgcagatcagccatccaggattcctgggtccatggcaccgtcgtcagtggcggcagagtgctgaatgctcaaccaccaccagatattgactgtgagcctactctgcaaattgggtactatcaatttgtccgtcctgaggcggccaatccaagaagcaatggaggaggaggggatcagaacaacaactttgtgatgggatggcccctctgaagtccaagcttgctaataaaaacgctggcgtgctataatatatagttcggcaaatgttgaaacacatgtgttctcagtatgtatatttctcccctatccggtggtactcttagcacgtacctatgagtgtatgtttgtacgttatctatactctatgctaggcaaccctatactattatggtaagacgtctatcttttcaatcaaaaaaaaaaaaaaaaa

SEQ ID NO: 21769 - DNA, 704 bp, Oryza sativa
  Clone ID: TF_LIB4371-038-R1-K1-B8
gtactatttagcttaataatatagctttgcaaaagttgaggtaatggatcgatcagagatggggaggggaagggttgagctgaagcgcatcgagaacaagatcaaccggcaggtcaccttctccaagcgccgcaacggcctcctcaagaaggcgtacgagctctccgtgctctgcgacgcggaggtggcgctcatcatcttctttcttcgtggcaagctgtacgaattcggtagcgccggaataaacaagacattggaaaagtacaatagttgctgttacaacgctcaaggttcaaatagtgctcttgctggtggtgaacatcagagctggtaccaagagatgtcaaggctcaagactaagcttgaatgtctccaacgctctcagaggcacatgcttggtgaagatcttggaccattgagcataaaggaactgcagcagctggagaagcaacttgagtactcactgtcacaggctcgacaacgaaagacacaaatcatgatggagcaggtcgacgatcttcgccggaaggaacgccagcttggagagctcaataagcaactgaaaaacaagctagaagctgaagccgatagcagcaactgcagatcagccatccaggattcctgggtccatggcaccgtcgtcagtggcggcagagtgctgaatgctcaaccaccaccagatattgactgtgagcctactctgc

SEQ ID NO: 21770 - DNA, 948 bp, Oryza sativa
  Clone ID: TF_OsC44879_1
atggggagggggaagattgtgatccgccggatcgacaactcgacgagccggcaggtgacgttctcgaagcggaggaacgggatcttcaagaaggccaaggagctggccatcctctgcgacgccgaggtcggcctcatgatcttctccagcaccggccgcctctacgagtactccagcaccagcatgaagtcagttatagatcggtatggcaagtccaaggatgagcagcaagccgtcgcaaatcccaactcggagcttaagttttggcaaagggaggcagcaagcttgagacaacaactgcacaacttgcaagaaaatcatcggcagttgatgggcgaagatctatctgggctgaatgttaaggaattgcaatctctagagaatcagctggaaataagtctacgtagtgtccgtacaaagaaggaccacgtcttgattgatgaaattcatgaactgaatcggaagggaagtctagttcaccaagaaaacatggaattatacaagaagatcagtttaattcgtcaagaaaatgctgagttatataagaagatctacgagactgaaggaccaagtgaagtcaatcgggattcaccaactccttacaattttgcagtaattgaaaaaacaaatgttcctgtgcaacttggactcagcacactaccacaacatagtgacgccgaacaatcaactgctcctaagctagggtaacacttagctctatacagctgaatccatgaccagaacaacattgctttgctacacccttgtatgctgaagggatactatctgctgtcaagagttgatactcagatcaagaaaaaaagaacttttcatgccatagcgattgagaaatggacttgtatactggaaataaatgccacagtgaattgagctgcggaatccacgccatgagtgccttatgattcaatttttgcatgtatttttcat

SEQ ID NO: 21771 - DNA, 807 bp, Oryza sativa; identical to SEQ ID NO: 12233
  Clone ID: TF_OsC1730_2

SEQ ID NO: 21772 - DNA, 3265 bp, Oryza sativa
  Clone ID: TF_OsC1204_1
tccccaccttaaagaccggaagaacggcaactccccaaccctcttgtttcttcgagagcgaggtgaagatttgtttcttggtttgtgttcttggagtggaggaggaggaggagttggatatggggcgcggcaagatcgagatcaagaggatcgagaactcgacgaaccggcaggtgacgttctcgaagcgccgctccgggatactcaagaaggcccgcgagatcggcgtgctctgcgaccgcgaggtcggggtcgtcatcttctccagcgccggcaagctctccgactactgcacgcccaagaccacgctgtcaaggatcttggagaagtaccagaccaactccgggaagatactctgggatgagaagcacaagagcctcagcgcagagatcgatcgtgtcaagaaggagaacgacaacatgcagatcgagctcaggcatatgaaaggggaggatctgaactccctgcagcccaaggagctgatcgcgatcgaggaggcgctcaacaacggccaggccaatctgcgggacaagatgatggaccactggaggatgcataaaaggaatgagaagatgctggaggacgagcacaagatgttggcttttagggtgcaccagcaggaggtcgagctgagcggcggcataagggagctggagctcggctaccaccacgacgacagggacttcgcggcctcgatgccgttcaccttcagggtgcagcccagccaccccaacctccagcaggagaagtaggctgctgagcactgccaatttggctgaacctcctgcttgctagctttgcatttcctcatgcgctgctagatgtatctgtggtttctctcatgcctgtctgaatgaactcacactgatgagagggtgtcagttgttttgtgctcctcccagcattagcactcagaattcagaaatgactcaatgtcagttgcttttgtgcttctcccagcattagcactcagaattcagaaatgactcaatgtcagttgcttttgtgcttctccctgcttgtttaattagccactgttcttgtttcctcgtggggaacagtcagtttgtattatctagttatcttggcaaggatcagtaaaattcacaagtagcagccaactctgataataattccatctgtttcatcgcttggaatgaattgtatgggaaaaaaaaatcaatgcaaatcaagagataacgaaacatatgattctggagttcaattgaccagaatttgcaagagcactacatccatatcggctattgttcttatctagtaggctgtatgattcttgaattcgccaagaaaaagatcacctcctcctacatcacctgagcatgtcgccattgtcaatgaacgggccactgaacgccggcgaggcgctgaagttgctcccggcctcgctgaacatggcgctgtgcccgtacggcagcggccggtccggcagctccgggatgtccatgtccccctccagcatcttcaccgcctcggtgatggtcggccggagcgccaccatgacgtgcgcgcacaggatcccgacgagcacgaacctctccatggcgccgccccgggggctgtccgcagtcgacagcgcgccgtcgagcacctccctcgcctgcccggccttgacgtgcgcccacgcccagtcggtgatcagcacggggcccgacggcgccgacatgtccaggacgcgccgcgcgctcagcacctcgagcaccagcacgccgaagctgtacacgtcgctcttctccgtcagctgcccgtacagcgcgtactccggcgccaggtagccgtgcgtgccggcgacgcgcgtcgtgaggtgggactgcccctcccggctccgcctcgccagcccgaagtccgccacccgcgcgcgcatgtcgccgtcgagcaggatgttggtcgccttgatgtccctgtggtagatcgccggcttcacgccgtagtgcaggtactccagccccttcgccacgtccatgattatgctccgccgctgcgcccatgtcagcgccggccgcttgccgtcccggaagatgaagtcctcgagcgcgccgttgggcatgaagtcgtagacgaggaacttctgcttcccttcctcggcgtcgtcgtcgacgatgcagcagccgcggagcggcaccaggttgcggtggcggaggtggctgatgatctccacctcgttggtgaactcctcgtcgccgccctccacgtccgggtcgagcatcttcttcaccgcgaccacggacccgtccgcgagcacgccgcagtagacggcgccgaacccgccgcggccgacgaggttgcggtcggcgaaggcgtccgtcgccttggagagctcggcaatgtcgtacaggatggagcccgtgttcggccgcggatgcgaccgccgcttcgccgatccctccttggagatctcgtggatcttcttcttcttcttcttcttgtcatgcctcctccagaccaagaacgcgaggagcgaggcgagcaggaggaatgcgacggggatggcggtggcgtagatgaccgtgtcgtgggatttgggcggcgcggcgggagggttggagagggcgaggccgagggtgcaggcggcggtaggtgggttggtggggccggcgacgttggagatgccggcggcgtacgtgacggtgaggtagaagcagttgcgcgtcgtcgcggcgccgtcggtggtggcgttggcggagatgttggcggcggctttgaggcgggaggtggcggcgatgcccgcgtcgaggcagcggaggcagtgcggcgtcgaggagaggtcgccgcacgcggagtccagcgcggccacggagtcgttcccgacgaccgccctgtactccgcggcggtggtgacgccggcgcagaaggacggcgaggagacgaactgctccggcgaagggaagcaggtctgcacgagggacgctcccgggagggagagcggcgccgccgacagcttcgccccgtagtccttgaggcaggccgcggactcccccaccgacgggatgcggaagtggcccgtggcgcggacctgctccgcgaggccgatggcgagcacggacagcagcgtattgcagcacctcgtcatgttccccgccccgccggcgcacaggtcggcgtcccacgggaacgtcgtcacgtagctcagatcgagcgggcacgtcgcgttcccacccccgcccgccccatccaccccctccatcgagcgggcgagcagcagcagcagcgccatggcgaccgccctgagcagcgccaggctcggcat

SEQ ID NO: 21773 - DNA, 1754 bp, Oryza sativa
  Clone ID: TF_OsC99_1
cccgggctgcaggaacgggctgcaggaatgcggcaccaggctctcctcctcctcttcttcttcttccactagctagttcgtcttcctccttcagctagcttgtagcagctaaggttaggtcggatcgagatcgggatcggccgccggcgagcggcgagcggcgaggatggggcgggggaaggtgcagctgaagcggatagagaacaagatcaacaggcaggtgacgttctccaagaggaggaatggattgctgaagaaggcgcacgagatctccgtcctctgcgacgccgaggtcgccgccatcgtcttctcccccaagggcaagctctacgagtacgccactgactccaggatggacaaaatccttgaacgttatgagcgctattcatatgctgaaaaggctcttatttcagctgaatccgagagtgagggaaattggtgccatgaatacaggaaacttaaggcaaagattgagaccatacaaaaatgtcacaaacacctcatgggagaggatctagaatccctgaatctcaaagaactccaacagctagagcagcagctggagagttcattgaagcacataatatcaagaaagagccaccttatgcttgagtccatttccgagctgcagaaaaaggagaggtcactgcaggaggagaacaaggctctgcagaaggaactggtggagaggcagaagaatgtgaggggccagcagcaagtagggcagtgggaccaaacccaggtccaggcccaggcccaagcccaaccccaagcccagacaagctcctcctcctcctccatgctgagggatcagcaggcacttcttccaccacaaaatatctgctacccgccggtgatgatgggcgagagaaatgatgcggcggcggcggcggcggtggcggcgcagggccaggtgcaactccgcatcggaggtcttccgccatggatgctgagccacctcaatgcttaagatgatcatcgtcgtcgtcgtcggccaaacagctgccgtatgcaccgtgaatcatgggagcaaccttgaatgaattgaagtcattggtatcgatcctagcgataatatatatgattctcctaaaatgaaattgatctcaaaaaaacaaacctagcgattaagctattcttatatatgtgtttgcctgctgccccctaccctacaggctacatatgatttgcaagaaattaattatgagcaaggatcaggatgtgtctttgtgtaatcatcagcacgtacctagtgcttcctactgatatatatgcatgcaattgtgtgcatataaatatatttgcatgccatgctcccgtgatggttaattaaaaaaaaaaaaaaaaaaaaaaagtttatgattgtgtttatacgctaattaactgcagatgcaaactaatcaatcgaattataacctgacccggtccggtcgcctgctgctctggtttactactagtactattgtcatcttgcggttgcgagacgaggaaagcattttagccctaaattcagcattagtagcaagctgcaatgtgtatattttggcttcgtccagcaccgtcttcctcccaccagtaatttacccatgtaatatatgcgagtagcatgaacaaattttcccgtttccaaccatctccattggtgtcatgtgtgacttaaatagcgaaatttcagcattgtgcatagtgtgattactgtaagataaataaactttgtagacaataagtctccgttatcttgctgattggagctg

SEQ ID NO: 21774 - DNA, 1569 bp, Oryza sativa
  unsure (1)..(1569): unsure at all n locations
  Clone ID: TF_OsC1755_2
cacaagcttttgtgaaaacttgccccaaattacaagctaatggtgcaatgccatgaggtaggccagccaagaggggaaaggaggaaagttcaggaggaagaaaaacaccaggggcaatatatagatggactctctccacaccggccgggactccatctcatctcatccttccccaaccattctcttctccttgaacacacccctctcttcctcattataatctcttctttgattagagaggaattagcaaacatgcacatatacaaagagcaggaggctgaaccatccactggcctgatgatgccagagccagcacctgttgcttcccccggctccggtggctcaggtggctcaggctcggtgggagctgagaagattgggagcaggggaaagattgagatcaagcgcatcgagaacacgacgaaccgtcaagtgaccttctgcaagcgccgcagcgggctactcaagaaggcgtatgagctctccgtgctctgcgatgccgaggtcgccctcgtcgtcttctccagccgtggccgcctctacgagtactccaacaacagcgtgaaggaaactattgagaggtacaagaaagccaacagtgacacctccaacgccagtacagttgcagagatcaatgcccagcactaccagcaggaagctgctaagctgaagcaacagatcaccaacctgcagaactccaacaggaccctagtaggtgataatatcaccaccatgaaccacagagaacttaagcagctggaaggcagactggacaaaggcctaggaaagattagagcacggaagaacgaattgctgtgtgctgaaattgagtatatgcagagaagggaaacggagctgcagaatgacaacatgtacttaaagagcaaagttgctgagagtgaaagaggactgcaaacagtgaacatgatgggttcagcatctacgagcgagtacgtgcaaaatatgatccattatgatccaagaaacttcctgcaattcaacatcatgcatcagcctcagtattatcctgaacaggaggaccgaaaggcctttatgtcagatgaaagataaatatggatccgtatcatgcaactatctcaatcatgcatgtgccttcttcaaggagactgatcagttagatattacactgtgtcagtagaacttttatgtgtgaactcttgtatgcatgaataattaactttatcccataattcaggcttggcactatcaaggtgatgtacctaagtattggttcaacctgtgaaattaaaatacttcatacccttcctatgtttataanaaaaaaaaaaaaaaaaaaaaaaaaaaaaaaaaaaaacaagaacaacaaaaacaaaaaaaaaaaaaaaaaaaaaaaaaaaaattttggggccccccaggccccattttttgtccctttaaggggggtaaattgggcccttgggaaaattctgggaataagctgttcccgggggaaaatggttaccccccaacattccaccaaaaaatccaacccgaaaaaaaaaggggtaaacccgggggcccctagggaagggccaaccccccttaatt

SEQ ID NO: 21775 - DNA, 1152 bp, Oryza sativa
  Clone ID: TF_OsC753_1
ccactcaccatctccatccttttaatccccttcctccaggtcgcttgctttcttgcagtggtggtggtggtggtggtgagatctagcttggttggttggttgcagctggagatcgatcgggatggggaggggtcgggtggagctgaagaggatcgagaacaagatcaaccggcaggtgacgttcgccaagcgcaggaatggcctgctcaagaaggcgtacgagctctccgtcctctgcgacgccgaggtcgccctcatcatcttctccaaccgcggcaagctctacgagttctgcagcacccagagcatgactaaaacgcttgagaagtatcagaaatgcagttacgcaggacccgaaacagctgtccaaaatagagaaagtgagcaattgaaagctagccgcaatgaatacctcaaactgaaggcaagggttgaaaatttacaacggactcaaagaaatttgctgggtgaagatcttgattcattaggcataaaagagctcgagagcctagagaagcagcttgattcatccctgaagcacgtcagaactacaaggacaaaacatctggttgaccaactgacggagcttcagagaaaggaacaaatggtttctgaagcaaatagatgccttaggagaaaactggaggaaagcaaccatgttcgcgggcagcaagtgtgggagcagggctgcaacttaattggctatgaacgtcagcctgaagtgcagcagcctcttcacggcggcaatgggttcttccatccacttgatgctgctggtgaacccacccttcagattgggtaccctgcagagcatcatgaggcgatgaacagtgcgtgcatgaacacctacatgcccccatggctaccatgatgatgacggggacaatgaattacgaaataacaaggatatgtggcatatatgtggtgccgcatacatgcatgtatcatggctagctacttaattggagtgatggatttgaactagtttcgtatgtagcctgtttgtgtgtaacttgtgtgagatactaccttaaaaactatcggtgtctgttgaacatattctgcgatcaactttaagcgtattattatcattttcattccaaaaaaaaaaaaaaaaaaaaaaaaatcgagactagttctctctctctctcc

SEQ ID NO: 21776 - DNA, 1192 bp, Oryza sativa
  Clone ID: TF_OsC930_1
caagagatagggagaaggggaagaggaagaaggaggaggtgtagggagaaaccggagcaacctcgaagctagtccaaactagtgggaggttgtctttccggcaagccggagcccggagctatcgatcatcaagctttctaccccgaccgacgaggaagaagacgactgatcaattgatcaaaccgatctctccatagctaggtagacaggaggagaggaggaagaagagggggagaggagacttatcttgatcgatggcgcgaggcaaggtgcagctccgtcgcatcgagaacccggttcaccgtcaggtcaccttctgcaagcgccgtgccggcctgctgaagaaggccagggagctctccatcctctgcgaggccgacatcggcatcatcatcttctccgcccacggcaagctctacgacctcgccaccaccggaaccatggaggagctgatcgagaggtacaagagtgctagtggcgaacaggccaacgcctgcggcgaccagagaatggacccaaaacaggaggcaatggtgctcaaacaagaaatcaatctactgcagaagggcctgaggtacatctatgggaacagggcaaatgaacacatgactgttgaagagctgaatgccctagagaggtacttagagatatggatgtacaacattcgctccgcaaagatgcagataatgatccaagagatccaagcactaaagagcaaggaaggcatgttgaaagctgctaacgaaattctccaagaaaagatagtagaacagaatggtctgatcgacgtaggcatgatggtagcagatcaacagaatgggcattttagtacagtcccactgttagaagagatcactaacccactgactatactgagtggctattctacttgtaggggctcggagaatgggctattccttctaacctaataatggcctgggggatacttgtgttcattactaagggggaatatgggtaataatgcttggggtgctggttgctttgcttttctgatgtaccttatttagacaagttcccgcaggaagtgtcttttagtattgtatttgtcttgggctgtggtgctttgtttttccctaaagaactcttgaggagctctgttgttgaaccatttcaagtaattgagactattgtttcctggaacgtttaaaaaaaaaaaaaaaaaaaaaaaaaa

SEQ ID NO: 21777 - DNA, 1237 bp, Oryza sativa
  Clone ID: TF_OsC1644_1
ttcccccgggctgcaggaattcggcacgaggccacaccaccataaaactagcttgcaaaggggatagagtagtagagagagagagagaggagaggaggaggaagaagatggggagggggaaggtggagctgaagcggatcgagaacaagatcagccggcaggtgacgttcgccaagcgcaggaacggcctgctcaagaaggcctacgagctctccctcctctgcgacgccgaggtcgccctcatcatcttctccggccgcggccgcctcttcgagttctccagctcatcatgcatgtacaaaaccttggagaggtaccgcagctgcaactacaactcacaggatgcagcagctccagaaaacgaaattaattaccaagaatacctgaagctgaaaacaagagttgaatttcttcaaaccacacagagaaatattcttggtgaggatttgggcccactaagcatgaaggagctggagcagcttgagaaccagatagaagtatccctcaaacaaatcaggtcaagaaagaaccaagcactgcttgatcagctgtttgatctgaagagcaaggagcaacagctgcaagatctcaacaaagacttgaggaaaaagttacaggaaaccagtgcagagaatgtgctccatatgtcctggcaagatggtggtgggcacagcggttctagcactgttcttgctgatcagcctcatcaccatcagggtcttctccaccctcacccagatcagggtgaccattccctgcagattgggtatcatcaccctcatgctcaccatcaccaggcctacatggaccatctgagcaatgaagcagcagacatggttgctcatcaccccaatgaacacatcccatccggctggatatgatgtgtgtgttcagttcaggcttcaggcttcagagaagccaatgcaaacagtgtcctgtaatccagtaattacagggcatatgtaatgtaatgtaatgtaatccctgatctatattttgctaagtacgtgcgtgctctcttacgaccttctcccccaaacagttaatcaggggaataataatttcgtttgatgcacgtactgtatgtctgtatctgtcactgtatcgtaggaccgtccatgtataacaatttccgttttggatgtggtaacaagttaattggcacttaaaaaaaaaaaaaaaaaaaaaaaaaaaaaaaaaaaataaaaactcgagactagttctctcaaaaaaaaaa

SEQ ID NO: 21778 - DNA, 1270 bp, Oryza sativa
  Clone ID: TF_OsC207784_1
cagctgcaggccggccggtgtgcgtgtgtgacagtaggagagagagctagcgagagagagcaaggaatcggaattgatttcatgcactgatcgatccatccatcatgcagatgctgcatggatgagaagagctagcagctaagctttgctgaagaaaattcttcagaggtttgtgttgatttgctggtctgctagagatcgatctagagagagagagaggaagggaagactgaagagagatctcgagcgggagatcgagatggggcgaggcaaggtggtgcttcagcggatcgagaacaagatcagccggcaggtgacgttcgccaagcggcggaacggcctgctcaagaaggcctacgagctctccatcctctgcgacgccgaggtcgccctcgtcctcttctcccacgccggccgcctctaccagttctcctcctcatccaacatgcttaagacgcttgagagataccagaggtacatttatgcttcgcaagatgctgccgcaccaactagcgatgagatgcagaaaattaaccatcagaacaactatcaggaatatgtgaacttgaaggcacatgttgagattctgcaacaatcacaaaggaaccttctaggtgaggatttagctccactggctacaaatgaacttgagcagcttgagagtcaagtagtcagaaccttgaagcaaatcagatcaagaaagactcaggtactacttgatgaactctgcgacctaaagagaaaggaacaaatgctacaagatgcaaacagggtcctgaaaaggaagcttgacgagatcgacgtagaggcagctcccccacagcctccatggaacggaaactgcagcaatggccatggcggcggcggcggcgtgttttccagtgagcctccccaaccagagcacttcttccaggccctcgggcttcatgccgtggacgtgaaccagccgccggcgccgccaccgggcggttatcctcctgagtggatggcctagctagctagctagctaccgtttcagcttcagttaatcagggtcaagtatcagctgagtttggccatatgtatggattctatatgttgcttcagaagttcctctctccttcctcttcaatttgttgctaattaagtgcttgccaaacttttctcagtgtaatgtactactactatgtatagttttgtcttgtatgaacagtttgtgagtactgtcaaaaaaaaaaaaaaaaaaaaaaaaaaaaaaaaaaaactcgagactagttctctctctctctcc

SEQ ID NO: 21779 - DNA, 662 bp, Oryza sativa
  unsure (1)..(662): unsure at all n locations
  Clone ID: TF_OsC1644_2
aaccaagcactgcttgatcagctgtttgatctgaagagcaaggagcaacagctgcaagatctcaacaaagacttgaggaaaaagttacaggaaaccagtgcagagaatgtgctccatatgtcctggcaagatggtggtgggcacagcggttctagcactgttcttgctgatcagcctcatcaccatcagggtcttctccaccctcacccagatcagggtgaccattccctgcagattgggtattcttcttttcttccagttacagttaatttcttgcctgaaaaaattcccaaaatgcagaggtcatgttctttttaaactattcactaaattattaaacagagtatttgctcaagttcgaacaatacactttcttaaaagatggtttgctatgtattacttagaccacttatctcgatttacttgtatattttattttttttcaaatatttaatttataactatataatcgagtatatcgataatcctgacaataattcgcccaataatctagatcaaattgggcctaattntgtctttgttattcagtaatntaaaatttatgtatatatactccatcgttttcatagctntaatttaatttttccttggtgaaggtatcatcaccctcatgctcaccatcaccaggcctacatggacca

SEQ ID NO: 21780 - DNA, 1148 bp, Oryza sativa
  Clone ID: TF_OsC1664_2
cgaggaggagagggaggggagagaagggagagggggtcggggagaaagaagagcgagcgagcagctttggctacggccaaaccctacagcgcctccaccaccactccttgccttttttggccgcagccgctcgtgtggttggttggttcatcggcgatcgaagatggtgcgggggaagacgcagatgaagcggatagagaaccccacgagccgccaggtcaccttctccaagcgccgcaacggcctgctcaagaaggccttcgagctctccgtcctctgcgacgccgaggtcgcgctcatcgtcttctccccgcgcggcaagctctacgaattcgccagcgccagtacgcagaaaacaattgaacgctataggacgtatacaaaggaaaatatcggcaacaagacagtacagcaagatatagagcaagtaaaagctgacgctgatggtttggcaaagaaacttgaagctcttgaaacttacaaaagaaaactgctgggtgaaaagttggatgaatgttctattgaagaactgcatagcctggaggtcaagctggagagaagcctcattagcatcaggggaaggaagacaaagctgcttgaggagcaggttgccaaactgagagagaaggagatgaagctgcgcaaggacaatgaagagttacgcgaaaagtgtaagaatcagcctcccttgtctgctcctttgactgtccgggccgaagatgagaacccggaccgtaacatcaacaccaccaacgacaacatggatgtcgaaactgagctattcatagggctgcctggcagaagtcgctccagcggcggtgctgcagaagatagccaagcgatgccccattcttaagtaacaggccaggaataagctggatctctgcgttgagaaaggagatgatgctaggcatgcaatgacaccaaaccatcctaaaaacagaccacgctgtatattttacttacccgtattgtcgtccatggatgcgaaatgctagacgcatatgcacccacccattcagcaccaccaggcagaaacccttcgatcggcagactccactacccatctaaatctaaatcgagagatctcaagtgcatacttgtactcctgcttgattgtggcttggtatttgatgtgatgttggagc

SEQ ID NO: 21781 - DNA, 1128 bp, Oryza sativa
  Clone ID: TF_OsC1730_1
cccacgcgtccgcggtaaagtgggtttccatcttccccgagctctccaccctccacccgccaccgccaccgttcgccttcgccgccgccgccgccgccgacgacgatggggagagggccggtgcagctgcggcggatcgagaacaagataaacaggcaggtgaccttctccaagcggaggaacgggctgctgaagaaggcgcacgagatctccgtgctctgtgacgccgacgtcgcgctcatcgtcttctccaccaagggcaagctctacgagttctccagccactccagtatggaagggatccttgaacgctaccagcgttactcgtttgatgaaagagccgtactggagccaaatactgaggaccaggaaaactggggtgatgaatatggaattttgaagtccaaactggatgcacttcagaagagccaaaggcaactcttaggtgaacaattggacacactaacaacaaaagaactccagcaattggaacatcaactggaatattctctgaagcatataagatcaaaaaagaatcagcttctgtttgaatcaatttctgagcttcagaagaaggaaaagtcacttaaaaaccagaataatgttctgcaaaagctcatggagacagaaaaggagaaaaacaatgctataataaacactaaccgggaggagcaaaatggagcaacaccaagcacatcatcaccaacaccagtgacggctccagatcccatcccgacaacaaataacagtcaaagccaaccaagaggatcaggggagtcagaagctcaaccgtctccggcacaagcaggcaacagcaagcttccgccatggatgctccggacaagtcacacatgaaggcatctgttgatctcaaacgtcactccactcaatggccaacatcaacatgtttcttccaactaaggcagccactgttgtgcaatccatcttccagcgatattgatatatcggcattcggcatagccaatatatattaatgtaatgtatcttgtcaaagcttcatagggttaatgacgccttgagcttctctgttctatatctgtcttgtaacgatctttgcatatctgctgcatttttttttctctctaaaaaaagagtagtcaatggtcc

SEQ ID NO: 21782 - DNA, 837 bp, Oryza sativa
  Clone ID: TF_OsC336457_1
atggggcaagggaagatcgagatgaagaggatcgaggacgcgacgaggcggcaggtgacgttcagcaagcgcagggctgggtttctcaagaaggcgaacgagctcgccgtgctgtgcgatgcgcaggtcggcgtcgtcgtcttctccgacaagggcaagctcttcgacttctgcagcccgccggtcatcttgatggagctgtttcaccgttatgagatcaccaccagaaacactcggcttcaggagacaaaccgtgatgatgagcaaatggtcatggagatcacaaggctaaggaatgagatcgaccagctcgaagccagtttaaggaggcaaactggagaagacctgtcatctgtgtccacagtggatgagctcagccagctgcagctgcagcttgaatcatctctcagcaaagttcatgcgaggaaggatgagctcatgagccagcagctggaggatatgcgtcgcatggtacactactcccttattgtagtcgcagttgtggtttttgctgatgagtgctgcagaccgtgcatgagcagaacaatttcttgtgccgcatggggtgagctgcagctatggagttccttgccggtgggggagcagcagatgagtgagaactggcacagcgagaactggcagagccctggttccggggaggcgtcggcaatggaggcgctgacgatgctgccgccggcggcggcggcgacgacggcggcggaggcgttcaattgcttcttcccggaggaggagaagggggtggcggcgtcgagcacgttgctgcagctgtggccgcagccgcacgacggcgaccagcctgacctgcggctctggtag

SEQ ID NO: 21783 - DNA, 462 bp, Oryza sativa
  Clone ID: TF_OsC15113_4
atggcgaacggtgtggaggtgcaacgccgtggcctccggcgccaacagcgccagatccaggctcatggtgagtggatggcgtctcctctctcctccaatcggctgtgtgcgctgccgtccgccgtcaaggcctatcggctgtacggcgagcatctgcttctccagttgctgcagctctttgagattcagagattcaagatcctctcccatgagatggctgcaggaattacagaaaatcaattttgctgcaagatcctcttctcccataaggagcacgccgtcgccgccgccgttgcgaggatccgctccatcgaggccaggattaccgcccaccgcgacaccatcacggtgaaggggcaccgccttcgtgccgtccgcgccaacatggtgccaccggttcgggcccggctcgccgtcccgatgggcgccacaggaggaggtggatgctactcgagcggctga

SEQ ID NO: 21784 - DNA, 501 bp, Oryza sativa
  Clone ID: TF_OsC1755_6
atgtcctcggtaaagcgcatccactgttgcagcgtgaaggaaactattgagaggtacaagaaagccaacagtgacacctccaacgccagtacagttgcagagatcaatgcccagcactaccagcaggaagctgctaagctgaagcaacagatcaccaacctgcagaactccaacaggaccctagtaggtgataatatcaccaccatgaaccacagagaacttaagcagctggaaggcagactggacaaaggcctaggaaagattagagcacggaaggaaacggagctgcagaatgacaacatgtacttaaagagcaaagttgctgagagtgaaagaggactgcaaacagtgaacatgatgggttcagcatctacgagcgagtacgtgcaaaatatgatccattatgatccaagaaacttcctgcaattcaacatcatgcatcagcctcagtattatcctgaacaggaggaccgaaaggcctttatgtcagatgaaagataa

SEQ ID NO: 21785 - DNA, 1244 bp, Oryza sativa
  Clone ID: TF_OsC1755_1
gaagaagctagtttcctgcggccgacctcttgcttctcactttttgagagcaagaagacatggggaggggcaggattgagatcaagaggatcgagaacacgacaagccgccaggtgaccttctgcaagcgccgcaacgggcttctcaagaaggcgtatgagctctccgtcctctgcgatgccgaggtggctctcatcgtcttctccagccgtggccgcctctacgagtactccaacaacaacaatgtgaaggctacaattgacaggtacaagaaggcgcatgcttgtggctcaacttctggtgcacctctcatagaggtcaatgctcagcaatactaccagcaggagtctgccaaactgcgccaccagattcagatgctgcaaaacaccaacaagcacctggttggcgataatgtgagcaacctgtcactgaaggagctgaagcaacttgaaagccgcctggagaaaggcatttcaaagatcagagccaggaagaatgaactgctggcttcagagatcaattacatggccaaaagggagattgagcttcagaacgacaacatggacctcagaaccaagattgctgaggaggagcagcagctgcagcaggtgacggtggcccggtcggccgccatggagctgcaggctgcggcggcggcgcagcagcagcagcagaatccgttcgcggtggcggcggcgcagttggacatgaagtgcttcttcccgttgaacctgttcgaggcggcggcgcaggtgcaggccgtggcggcgcagcgccagcagatcatccccaccgagctcaacctcggctaccaccaccacctcgccattcccggcgccaccgccgccgacgcgccgcctcctcacttctgaacctcatgaacttcattttgcaccggcctgctgccatggatatgatgatcagctcatcttctatatcttatgctgttatgcagacagacactgatgtggctatatatatagtatttgtgtgctgctgcattttgttaatcccttataaattgctacttaattatctcatggagaattggagagaccaaatgggcagagctagctagttagctgtgcccaattaagaagctaaatctatcagaagtgtgtactgatgagtgatgagtatttttcttcatttgggatcaaattaaactaagtaaaacatatatatttaccttattaaacctaagtaaaacaatatatattttgacttaaaaaaaaaaaaaaaaa

SEQ ID NO: 21786 - DNA, 636 bp, Oryza sativa; identical to SEQ ID NO: 12222
  Clone ID: TF_OsC392059_1

SEQ ID NO: 21787 - DNA, 1797 bp, Oryza sativa
  Clone ID: TF_OsC1639_2
catttcggggggggtagtttataagggcttgcgcgaggagggggaggagtagcgggtagcggcgggctcgagtcgagtcgagtcgccgtcgtcgtcgggcggcggcggccgagagagatcgggatcgatggtgcgggggaggacggagctgaagcggattgagaacccgacgagccggcaggtgaccttctccaagcgccggaatggcctcctcaagaaggcgttcgagctctccgtcctctgcgacgccgaggtcgccctcatcgtcttctccccccgcggccgcctctacgagttcgccagcgcccccagcctacagaaaaccatcgaccgctataaagcatacacaaaggatcatgtcaacaataagacaattcaacaagatatccagcaagtcaaagatgatactttaggtttggccaagaaacttgaagctcttgatgagtccagacggaaaatattgggagaaaatttagaaggatgctctattgaagaactgcgtggtctagaaatgaaacttgagaagagcctccacaacataagactaaagaagaccgagcttctggagcggcagatagccaagctgaaagagaaggagcggactttgcttaaagacaacgaaaatttacgcggaaagcatcgcaaccttgaggctgcggcgctggtggctaaccacatgacgacgacgacggcgccggcggcgtggccgcgggacgtgcctatgacgagcagcacagccggcgccgccgacgccatggacgtggagactgatctgtacattggattgcccggcactgagcgctcctccaaccggtcggagacaggttgaagaaggccagccacagcaacagctgctatatagcatgcagtagcagcaacgacgccagtgacatcctgttcatctcacaagaataaccagagctctacgcatgcgcacatgaaacccaggcatgcagttctcggtgggtaaattattatctcgcattattagctatatgcgtgtccttgtctttttctttaggcaatggaataaaatttccggtaagtacaaacacaaacggaaacaaagaattaacaaagctgtagcagaccagatcggcaaattgaaatgccaggtaatccagtatatatttcagccgaggtggatgctctggatatctccgatgtgccggcttacatgaatggcgaacaagacgtactcttcactgaggacatgctgcttggagacttcgctgaagaagatgacctcgacctcgacgacatcggtgatgacttctgcgaggatttcccagagatacccagcggctacgacttcggccgtggtgatatgttccggcaggtggatttctgcgtgtgaattaagagcttgctaaagttattcatgttggtgtgatgggcctgtgagtgtgggtgcttgggaggagatttcttgggttttttccccgagcaaaatcaatctgctcgtgcccttgagatttcagttccgcccataagaactccaacgcacatttagcattcggagagtaattttgttaggttaaaagtatggtaagttataggtggtatgttatgtttttctttttcttttctcaatgttatctggtacctaagtttgtcaagaaaatcatagtggacaagtcaagtatttggggctgtcgtctctgttatggaaagaaaaataagttttgattacattacatatcttttgctctcgagatctggtcatgtcgtcgcattgcaactcgtctcgtctgtatgcattttactctgctggtttaatgttgagattgtgtagtt

SEQ ID NO: 21788 - DNA, 1229 bp, Oryza sativa
  unsure (1)..(1229): unsure at all n locations
  Clone ID: TF_OsC1641_1
cacgacctttgtaaaacgacggccattgangcgcgcgtaataccgactcactattagggcgaattggttaccggcccccccctcgaggtcgacccacgcgtccgccggcccagcacagccgatggtacgagagcatggctagctagccgagctacttagctactacatccatgatccatccatccccaacaaacggagcaagactgcaagggagagggagagagagggaagcttgcaggctgcagctaactagctaggcaaggagagagaggagatagatcaagaagagattttgagaccgagagagagctagagagagatcgatggggcgagggaaagtagagctgaagcggatcgagaacaagataagccggcaggtgacgttcgcgaagaggaggaacgggctgctgaagaaggcgtacgagctgtccgtgctctgcgacgccgaggtcgccctcatcatcttctccacccgcggccgcctcttcgagttctccacctcctcctgtatgtacaagacactggagcgataccgcagttgcaactacaaccttaactcatgtgaagcatctgctgcactggaaactgaactaagcaattaccaagagtacttaaagttaaagacaagagttgagttcctacaaacaactcagagaaatcttcttggcgaggacttggttccacttagcttgaaggagctcgagcaacttgagaaccagatcgagatatccctcatgaatatcaggtcatcaaagaatcaacagttgcttgatcaagtatttgagctcaaacgtaaggaacaacaacttcaagatgctaataaagacttaaaaaggaagatacaagaaactagtggagaaaatatgcttcatatatcttgccaagatgtagggcccagtggccatgctagtgaagctaaccaagagtttctccatcatgcaatttgtgacccttccctgcatatagggtatcaagcttacatggatcacctcaaccaatgaatgaattgcttatcacattaatggacatctcctatgttggatgtggtgtttgacgtaatgctctcttttacatgcgggttttaccttaagtgtgtgtgctaaatttagtgcgtttgtttatgctcttttgaactgaacaaaggaatgatcccggtttgattgatgaatgctgcaagaacataatctatatgttagtctgaattcagtatgtaatgaagatgttttgtt

SEQ ID NO: 21789 - DNA, 481 bp, Oryza sativa
  Clone ID: TF_LIB4371-039-R1-N1-B3
gaaagggacatgattttcatggttcaccaaggggaccgagtttaccccagcaaaggacccaaatttgatgggccccggtttcctcaaaactggaacatggcatacaagcaggttgaaaaacaaagggcttccaaattttccccctcaaccctcactggaaatatggcccattcaggaggaatctgcaccgcccggggggggggccggttgtccttcggcccccttgactgatgcccatttgaccaaagggtggaagctccctttctccttgaaaagtgggaaaaaagggggcttgcagtataggatcccttccaaagctgcataattggatggcaaaagggcccacccaccgggaaaacatttaaagcaggacttggggaaggcctgtccttaaactgtcaccttttttaaaggataccctgttttactgcaaggggcacacttctcctgggcccctgaaaacatgcgtgcggttttgcta

SEQ ID NO: 21790 - DNA, 2278 bp, Oryza sativa
  Clone ID: TF_OsC12552_1
ttttttttttttttttttttgggaatcttatcctttcgtcttttttttatacatttccttgggtttctttccttcaaaaataaaaatgaaattattggagtgaatgaaataaatacattcagatacaaaaggtgttacataagtacataactcagcaaaattatcttctgattgcctgttcttttccaaggatgtgttcactgtgaaaaactataaaacctctctataggaagacttacatgtattatttcaaagacaacaagaaagcattggtgcaatttatgtcctattcaatcctcttctttcttttctcaatttactgtaaattaatgctaccatgatgagggtatatgtaactccaataatctccaaatatgcatcaatcctcacaattgaggaatgatcaatatgggaaagaccctgtcattttcatatgattaagggtacttctcaggccatagctttcgacagcccgattggcagctcgaaaaccatctccgtatgcctcagatgaatccgtttcgatctgatgtttgatgaatgctccgagcttcttctcgaattcggtctttgcgcccttctttgatgtggttggagttgaagatgacgacgacgaagatgccactgaggtggctgatatgtcgatactagaaccaaagatgatctctgactcgagccacatgtgggaaagaacttggcatatgccttcttcaacctgaggactaagagaccgaaatcctttcagacgtagataagcatgcatcatttcatgggcgagaattgagccagtttgtaatctcggcaacccatataatatcaggattgcagtcacttcacatcgtctttccagcttatatggtgctgtgatcatatctataattctgtttcccggtccaattattggtcttcttaagatcgttctgacaatttgctcttcagaaagacatagtccccttgtttcaggaagatgatgcccatttttctcagtttctaaagcctcatttagagcctgtctctcaaccaagagtattggaacttgttgctccactttcatgttcagaccttcaaaaaattcctgaatgtccatatacagctgttgacactctggtgtatccattattgaagaattgagacattccaagcagagtttcctcccatcatctaatgtgatgtatttgatgtccatcggctccattctttcacaactgcaacacctaggagtgccatcatcttcatgggaaggacagtacttttgcatccagaatggatgtgctcggtattcgatcagcccattcctgttcgttggaataaagttcttgcagacatcacattttggatggaaaaaatctttgtagcatgatttgtggtatggctgatcttcatgcatagcaaactcatactcagagatgggcttgttacaagcaaaacacctgaagcactgaggatgccatactgaatccatacagctaagaaaacgtccatgaccaattgggtttttgcatccagcacaagttctggatccacttgaggcaaatagaatcggaggcagctctcttgggggctctgatggaacattctcaacaggaatattctgacgtggaggagagtcagcattaaggctctcctggagagctcgtgcaagttgttcatcttcctccaaattataatcgatatcaacagcttttcccttattttgttcttctgataaagacagtgcaatagcacgatctatatcttcattatcactttcatcatacgctcccaacccatgactcgaggttatctgagggtcgaattttctgtagccagaagacaaaaatctcacaaacttttcgccaatcgagaacgtttccagtacttcagaaaaccaaagcttgagcctgcaacaaactaggaattcagttcgccgtcgatcgcctcgcctcccgctcagtccgctttcacctcgaagtgaccctgaaactcccacaagaaactccaattctctgtagtcccgattgaccacgcaccaagaaccgagacaaagggtaactaatcgagctcgggacaggcgaaccaccggccacggacagctccggttcttgatctctccccacccaagaacgcccctatgaacccctacccctatgagcaaatcgttgccaacatgcttgatgttggcggagcaatggtacgagtggcaagttgccaagtaggcggcaagcgaaagccttcccttgcgcttgttgggtcgacaacgacgacacttccaaggaccatgaccactccttaacggcat

SEQ ID NO: 21791 - DNA, 742 bp, Oryza sativa
  unsure (1)..(742): unsure at all n locations
  Clone ID: TF_OsC54167_3
cggacgcgtgggcgatgacccgggtctggattntgtggaatttgctgttgtcagaggtacaaggattttcgtctgccaatacttgaaacatgggttggctgagcaaaatttttaaaggttcagtaaatagagtatcaagagggcactacaatggaaacacccatgaaggccactcagcatggcacactaaagcctatgagcatgacagtgaccatgaagacatagatcgtgctattgcattatctttatcagaagaagatcagcggaaggggaaggctgttgatgaggtagatattgatcatcgtttacatgaagatgaacaacttgcacgggctctacaagagagtctgaatgatgaacctcctcgtcagaatgttccagtaaaagatgttcactcggagagtactccagcaactttcatgcccccatatatattcccttcaactggattaagggtttgtgctggatgtaaaactccaatcggtcaaggacggtttcttagttgcatggattctgtttggcacccccagtgcttcaggtgttttgcttgtgataggccaatatcagaatatgagtttgcagttcatgaaggtaacccataccatcgatcctgctataaggagcttttccatccaaaatgtgatgtctgcaagaactttattccaacaaacaaagatggccacattgaatatcgggcccatcctttctggatgcagaagtattgtcctgccccatgaactga

SEQ ID NO: 21792 - DNA, 1924 bp, Oryza sativa
  Clone ID: TF_OsC54167_1
atgacttttgtttctgttaaaaagtacaggagttcaggcttgaaagtggtggccagatcgtttcctctacaaacctatagtgtaagaatccagaagggaactagtggctctaggcttggaaagtgcaggtacaaggattttcgtctgccaatacttgaaaacatgggttggctgagcaaaatttttaaaggttcagtaaatagagtatcaagagggcactacaatggaaacacccatgaaggccactcagcatggcacactaaagcctatgagcatgacagtgaccatgaagacatagatcgtgctattgcattatctttatcagaagaagatcagcggaaggggaaggctgttgatgaggtagatattgatcatcgtttacatgaagatgaacaacttgcacgggctctacaagagagtctgaatgatgaacctcctcgtcagaatgttccagtaaaagatgttcactcagagagtactccagcaactttcatgcccccatatatattcccttcaactggattaagggtttgtgctggatgtaaaactccaatcggtcaaggacggtttcttagttgcatggattctgtttggcacccccagtgcttcaggtgttttgcttgtgataggccaatatcagaatatgagattccaacaaacaaagatggccacattgaatatcgcgtccatcctttctggatgcagaagtattgtcctgcccatgaaactgatcgtactcctaggtgctgcagttgtgaacgaatggagccaaaggatagtaagtacataacattagatgatggccggaaactctgtttggaatgcctgaatacttcaataatggacacagacgaatgccaaccactatatattgatattcaagaattctatgagggtttgaacatgaaagtggaacaacaaattcccttgctgttggttgagcgacaagctttaaatgaagccatggaggccgagaaaactggacatcaccttgctgaaaccagaggtctctgcctatctgaagagcaaattgtccgaactatactaagaagaccagtaattggaccaggaaacaagattgtagacatgattacaggaccatacaaactggttagacgctgtgaagtgactgcaattcttatcctatatggccttccaagactgttaactggctccattctggctcatgagatgatgcatgcttacctccgacttaagggataccaaactcttgatccaaaggtcgaagaaggcatctgtcaggttctagctcatatttgtagcgcatatgtggcaccgagtcagaaatgtcatctaggatctagtagcatcattgcatccatcgcagcatcatcatcgtcatcgtcgtcatcttcagcaccttcatccaaaaagggctatacgaagcacgggacgttcgagaagaaacttggagagttcttcaagcaccagattgataacagacccttctgatgtatatggagatggttttcgagatggcattaaggccgttgaacgctatggcttgagaaaaactcttgatcatatgaagcttacaggggttttcccgtgttgaagtcacaaatttagagtatgaagaatacattgaggaattttggttcaagttagacatgccaaaagggtatatatgctgttaacattaactgagcaatagaatagacgagaaacaatgattttgttttagtaaatttcagaaagttacaactatcttgtctaaattatcggtttgctgcaatattagttggctatttcagaaaactacagcagtagttgattttatcagaaaactgttacactttgggcctagatgtcaaacacttagtttctgataaaatcattcgctatagctgttgttctctaacaaactgtttgcataaagttctaggcttctagccatagtgat

SEQ ID NO: 21793 - DNA, 1335 bp, Oryza sativa
  Clone ID: TF_OsC1528_2384
ccacgcgtccgctctggcttagaggtggagttagacccaatcctcttatatttcttccctagcttcagcctctcccaaatcaggtttccagaattgcatattaaagcctcccatcaacttcttgcacacaccctccctttggctttcatctgcatctattcagttgcagattgagagccaaagacattatcttgattctatcaggagggttgtgctagcgaattcttgttagcaacaaattgacatattgctcggcacatccccaccgagaataccaagatgacgttctctggtacacaggacaagtgcaatgcttgtgacaagaccgtgcatttcattgatctccttaccgcggacagtattccctaccacaagtcttgcttcagatgcagccactgcaaaggcacactttcgatgtgcagctattcgtccatggatggggttctttactgcaagacccattttgagcagctattcaaggaaacaggcaccttcaagaagaacttcccctcaggtacaaaggcaaacagtgaacaggctaagattcccagcaagctgtcctctgtgttctgtggaacccaggacaagtgtactgcctgcaagaagactgtgtatccattggagaagatgaccatggagggtgagtgttaccacaggacctgcttcaagtgcgcccatggcggctgccttctgacgaacgcctcctacgcctcgcacaacgggatcctctactgccagaaccacttctggcagctgttcaagaagtccggcagctacgacaacctgctgaagcccgcctccgccgccgccgagaacaccgtcgaatccgaggtcgccgtcgcggagcccgcgaaggaagacccggagacggaggaggcagccaaggaagaagaagaagaagcgtcaccggagcaggtcgcggaagctgttgtagaggaccaggagcactcatgagaagaacctgccacagtgccacttgcacgcgcacacaggaatatatatacatgttcccatattactgctaattttttttggtgtcgttgagaaacttgtcgctggttcttctcatcttctcgtctggattcctgcaatcctggagtctgtacctgtgctaagatatcatgaatgagagcagattttgcaaagaaagggagaaatatgctcattctgatattttgacatgtatcatccgtctcagaaaaatcaacttctcactgcgaacattgacataatctatgtccaggttcatagttagaagttgatttttaaggatgatttggcagcaccattttaagaagaaatattttatctggatcatgtgagaattgagatgat

SEQ ID NO: 21794 - DNA, 1024 bp, Oryza sativa
  Clone ID: TF_OsC44261_1
tttttttttttttgttaaaggttcaaaccaggtagacattctgactccaatataacaaggttttacaagcggatacaagccaaataatattattgttctctgaatgcacatgaccttcattgggaaaaaactgtaaagaccgcgcaaagaaagacatggtgctctggagcaaaagcaagaagatcattatttatctctggaaatttctcaaaggactaatattctgaatcttcatcctctacagatccagattgtgatgccttctcatggtcattctcaagttggctgaagttccccttctctttgatcaactgaatatggtggtgcttgcaatagagcttcccttcgtgtgcgatgtaatttgaggggctaatggtgcatcctccatgacagcacttgaagcagcttttgtgatacatggtgttattgacagtaaccctttcaattggatagactgtcttgttgcatcccacgcatttctctctcgtgccagcaaatgcgctcgagactttaatagcattctcattctcaactgttttttctggcttgacaacctttggagttccttcaaagctcttgtctaaacttccagtcctcttgaacagctgatcaaagtgaggcctgcagtagagcactccttcaaacgagttgtagttcgcgagcttgagggtgcccttgcaatggtggcaccggaagcaggccttgtggtagaccctgttgtcggcggtgagcttgtcgaccaggtacaccgtcttgtcgcacgccatgcacttggtcgtcgtcccctgaaaggaagtcgccattgcccagctccctcaccttcttcttccctctctctccctctccctctctgcttgtgctttcagtgtccaagaaaaacgacccctcagcccttgagctccttatggttatatgtgaatggtgtcgtggttggtggtgtcctggcctgcagtcattgatcctgcagggaggaggaggagcaggaggaggccagcgaacgcaagcaggcacaggcaagaacaaa

SEQ ID NO: 21795 - DNA, 1074 bp, Oryza sativa
  Clone ID: TF_OsC11613_1
taacagataaacacacgctcaaaaagcaatcaacaaaatagagtacggtatatcagtacttgcacaacgatttctttgaaagggacatgatattcatggttcaccaatgtgatcgagtctagcacagcagaggacacgaaattgataggtcccggtatcctcagaactggaacatggcatacaagcaggttgtaaaacagagggcttccgaattttcgccctcaagcctcactggagatatggtacattcaggaggaatctgcagcggccggtggtggtgccggctgtgcttcggcgcgcttgactgatgcgcatttgatcagatggttgtagctccctttctccttgaaaagttgggagaaatggtgcttgcagtataggataccttccaaagctgcataattggatggcgaaatggcacagccaccgtgagaacatttgaagcaggacttgtggtaggcctgtccttcaactgtcaccttctctagaggatacgctgttttactgcaagtggcacacttctcctgtgtccctgaaaacatgcgtgcggctttgctaggtgatcttgtcagctcaggagtcaacttctccgatgcgggtttcgcgggtgattggaagctcttgttgtagctcccggtctccttgaacagttgctcgaaatggggcttgcagtatggcactccttcaatcgaggagtagttgccaagggagagggtggacttgcagtgttggcacttgaagcaggagcggtggaagacgacgccgtcggtggagagctggtccatcgggtacaccgtcttggtgcacaccttgcacttctgctgcgtcccgctaaacatcgtagcctcctcctctcctcaccctctctcttcctgctgcggcggcggaggcggcgcggcgagctggaagatctgagcccgatctgatctcctcccgcgctgaaacgagcacccctcgcggcgtccctcccaatggccggccgcggttatataacgcgggtgagcaatgggattttgaggattttttgggcgtctcaagtctccggacgcgtgggtcgacccgggaatccggccc

SEQ ID NO: 21796 - DNA, 5941 bp, Oryza sativa
  Clone ID: TF_OsC2152_1
gcaaaccattgtgatgtctgagagttttttagaaatggatttacaacagagttatatatatactgttgtctgcagttagtacatgccagcaaaagagagtttgaccattgcggcaagtgtcaaagacaaaaacaacattgcttttctgcagtacgagaaaacaaaactataaaaatctagcaaactacatctacatttttcctaatttctacaatcaggtttggaaacagcgttcctactctcaatagaaagtaggggaaatacaaaaggtatatagctctagcaaactgcattttctacagaagggtttcgacaaaggctagagattacgttcgtgaggttccaaccaggggaatccaagtgtatcgaacacatccttctcggtgtcacaattaattatagcatctgatcttcccccacgctttccaccactgcccggtgtagcaagatacaaaccagtgtcgtcaagaatgtagcctttggaatctgctagtattcttaatcgtcgattcagaacatcattgccagtccaagcaagcagcccaaatgcatgtctgttccttgggtataccttcttgaggtcgatgcgatggcgcagctcacgcccaggatatgtgcaaagaccaaaatatgtgtcaactccacaatcagttccctcaatgctgtgtatgctgaaaataagatcctccctcaaaaaattgatgcccttcaagcgctgaacaaattttggtaaaaagcctacatgactttcaccatcaggatgagtgataataatatccatgtcaccacaagaagattttccacgtctgtatgatcccccacatacaattatcaccccaggcaagatatcagtcccaacttcttgcaaaagcttctccatctcactaacctcatgtcggggtattctttgtttgatatcgtcaaagaacttcaggccaatcctctgagcacttgtaagtgaatcgtctttttgaaggtcatccagtgtacgatgtcctttatcatataacttgagagcagttgcaggaccaacaccccaaacttcgccaaataggctgacagttcgaaccttctcatcattctcaaagtgctctagcttggaaagctttcctgtatttactatctcattaatatggtctttcaatgatttcccaatagcagggaggtctttaacttgatcagcgctttctattttgaatggcaatttctcaatcactggaatagccttgtaatagctaaatgatcttcggtcatctcccagggctctatatatattgatcagctttccaaaaatctcagttatgttcctgttcaagtctggaggagcatacgttgaggattctccagaagaggcttcctcagctttgaatgcattttgagaagctatggtttccttagaatctccagaggcactttggctacttgtacacgtgctaggcccctttacaacatccgaatcttcatttggatgtgcaattgcatctcgagattctcgattacccccagcagtttccttccgattctcaggaccgtctgatgatattttgctcctctttgcagactgcaacacacctgaacctgcagcaccaccttccttcttcggcttaaattcctcttcgtagttgatagcaaacttgtgctccggtagcctctccccggatttgaggcactcctccagccactcgaatgacaccacgctcccgcgaaagcggtggagccaggcggcgtcgagctcccggagcagcgccttggcgtcggcggccaggacgtgggtgaccgcgccgccgccgcccttggcggcgagcttctcctggacgcgtccccccatctgcgccagcctctgcttccacacctgcaccgacgacgaaagccaggaaaccctaagcacaggagagagagttggtgggggttgggatggattgctcggtggagccgcgacctcgaggcggcgagactggacggcgtgggggacgacgaaggcggagacgccgcggaacatgccgtcggggtccaacttcgccgccgccgccctcgccggcggcttccgcttcggagccatggagaactcccgccttctcccttcctcgctgacttgcaatggcgcctcctcaacggcagcatcctccggtgatgacttggtcgcgccatcttcttcctctgatggtttgtgagcctctggcttttcaaggtccatgctatcctctgatggcttggcgctgtcatcatcttccactgatggcttatcaagaaccacactgtcctctgatggcttcgcactcgcctcgtcttcctccaacggtttctcaagaccagcattgtcctgtgttggctccacacttcccttgtcttcctctggttccttctcaagagttacagggtcctctgtctgcttggtgccagcatcatctttctccgatggcttctcaaaggtcgtactgtcttctggtagcttggcactcgcctcatcctcctccaatgttttctcaagagcatcattgccttctgatggctttacacttccctcatcttcctctgatgccttctcaagagttatagtgttctctgatggctccacgctggcgctatcgtcctgcggcggctcctcaagagcactgctgtcttcggatggctttatgctggcctcgtcgtcgtgttttggttcctcgacagctatggcactttctgatggcgtttctatggatgcactgctctgaggtggtgcctcctcagaaacgttgccgtctgcagcttcgctaatgcttatgctactctttggagtgttatgaggcagggtttcagtatctggggtgctttctgatggtttatcatgcacatcatcactttcgatttccggtggcttctcatcctcgacagatgcatcattttcaggctccaatggctgctcagttgacttgtcagaagcttcatcagtttgaggttctgatggaacctcgttagttctatcactttgatgcagcactggtgtctcaactccagtttgagattctgataacacctcagctgacctttcagcagctgcatcaatttgaggttctgctggatcctcggtaaccacatcactttcacgcagtgttgccttctcacctgcagttcgagattctgatggctgctcagccaactgatcagaagcagtatctctttcaggttctgatgactccttggcagttgcatcactattatgctcttgtggattctcttcatatgcttcgtgttgaggttccaatggctgctctgaagctgcagccttttgattttctaatggttgctccgttgcaactttagcaggtgcaacatcttgggactctgatgactggtcagcagctggatcggtgttagcttctaatatctggtcagatgtcttctcggcagatacaatgccttgaggtcctactaactgctcagcagttggcctgatttgagcatctgatgagttcacaccagaagtggcatcactttcaggctcggtaggattcccaacattggcatcaacctgaggtggcttctcaagactgagatcactttgttttgttgtgctttcagcattagcttcattttgaagtggcttctcagcagtctcttcactctcgtgtggctgctcagaaggttcattggtttgcggtagcttctctgcagcatcttctttagatggcttttcggttagagtagcagtttgagatagcttctcaacagccatggtactttctggtaatttatctgtcagtatctccctctcggagatttcctgatgagctgcatcacttggagatggttctgacatggcttctacactttgggtcaggggtagctcgtcagtagcaatatcagtctgtgatggcttctcattttcagcagtgttttctgatggcttcttagatggttcagtgatctgagatgatgctacagcaagtatgtcactttctgacaatttttctgtggaagtatcagcttgcgatttatttgcagtaagtggtagttttttggcactttcacttatttgtgatgaattctctgtggtagcaccattgttctttttatcttgaatgatctgtgatttgttatcagcagtcacattggttttctctgcttcttcagcaagtacacggttttgtaacggtttgttgctagatatatccttctctggctctttttctctagacacgcttctttgccatggctttttcacaaccacgctgctttggagcgggttggtgctagccacactaacttgtgatggtgtcacaaccgacgcaccgctttgcgattgcttttcagttggaacattgcgctgccacaatcttttgcccattcccctgctttcaggtgtctttgcatcagttacactgctctggggctgtttctggaatccgatgttacgttgccattgctttttaaccactgctgcagtgctctctgatggctttacatcatctgcactggtctgtgaaggtttctccgtgattccactgtgttcctgtggcacagtgggtgttgtactggtttctgccagcttcacatcgatagcactgctagatgacttctcagtgtctgtattgttctgcagtggcttctccgtgtctatattgttctgcagtggcttctcattgaccactttgtgctcccatggccttttaattgatgtggtgctttctgatggctttgtatcatttgtcaatgatgacttctcagttggtccactgttctgtatctgcgcctcagcagccacagcacgttgccatggttttctgatcaatttgctgttttctgatggcttcacatcatctgcactggttgatgatggcttatctgatggcgaaatgctctgcggtagattctccgtagctaccctccgttgccatggcctttttaccactgtgctggcagtgctgctttctggctgttttgcatcaaccccattacttggcaatgattcctcaatggcagcactgcttggagttgacttttcagtggttgtgttactcagcaatggcttatctgtgggaagattgcgctgccatggttttcttacggctgcactacttcctgatggctgtaagttaactgcactgctctggaatggcttttctacactgctttccaatggcttcttgctgactacatgactatttgactcacccttggtaaccctttccccttcttctgacctctgaactgttgtgctgctttctgattgttttgggacatcaacgctactttgtgattgcttttcagccacaatatcgtcttgtgacggtttctcaggagtgagttcactttctaaaggtttctcagtgagcccatcaccttgacctgggcctcctggattcttggtagcatcttcatgttctggttgcttctcgatatccacttttgcatttggagtactatcctcaaaattgctgaagtttcccttaaccataaataattgagagtgatgggtcttgcaataaagtttgccttcatgtgtgacattgttggatgggctaagagtacagcctccatgggtgcaacggaagcatgatttatgatatgagctcccgttaagattaaccttttcaagagggtacacagtcttgttacaaactacgcacttgtcttgtgtgccaacaaacatgctagagaatctgttcggttgccccttgtttccattcgatttttctgctttagctgattttgatgtcccttcaaaacttttctccaaactgccggttgatttcaatatctggtcatagtgaggtttgcaatataggacaccttcgacagaagaatagttactaaactggagggtggccttgcagtgggtgcagcggaagcacgggcggtggtagacgcggccgtcggcggcgagctcctcgacggggtagaccgtcctcccgcacgagtcgcacttctgcgtcgtgccgccccacgccgccgccgccat

SEQ ID NO: 21797 - DNA, 1079 bp, Oryza sativa
  Clone ID: TF_OsC28685_1
cccgcgtccgggtcccgccacgcccacgttcctctcgtctcgccctgaatcgatctcctccgtcgatcgatcggaagagttgggagttgggaagctatagctacggtgattcctcgagctggaccagaccgaggcctgaaggttttccatcgaccgatcggtgaatcacccggtgctagtatacgtaccccggccgccatgtcgttcaccggcacgcaggacaagtgcaaggcgtgcgacaagaccgtccatttcatcgacctcctcaccgccgacggcgtctcctaccacaagacatgcttcaagtgcagccactgcaaggggaccctctcgatgtgtaactactcttcgatggatggtgtcctgtactgcaagacgcactttgagcagctcttcaaagagacggggagcttctcaaagaaattctcgcaaggtggtaaatcttcagagaagagcgaccagggaagagctcctagcaagctatcttcagcattctctggaactcaagataaatgtgcagcctgccaaaaaactgtgtacccattggagaagctaactctggagggtgagtcttaccacaagagttgcttcaagtgctcgcatgggggctgcatcctgacgacgtcttcctacgcggcgctcaacgggatcctctactgcaagatccatttctcgcagctgttcaaggagaagggcagctacaaccacttgatccagaccgcacaatcgaagcagaaagagtccgaggaggctgcaccggtggcggccacagaggccagcgagaaagaacaggaagtgcccccacaagacgcgacatagagcaaagattagggggaaaacagaaccgatatatatatatatatatatatatatatatagacataagaaaaatcctcaattatcagctagtaatttgatgtattatcctcccttgcttcctctttctttctttttgttccacctcttaaagaccgaaaacttgcttatcatttctttgacaaactgcaactgttgtacttatttctgtatgaggctatggagccatgacattggcacattggcaagaatctgttcattgc

SEQ ID NO: 21798 - DNA, 1790 bp, Oryza sativa
  Clone ID: TF_OsC91189_1
ttttttttttttttttttttatataaatacttcactgcattatcatgggccatactgtgcattacattagtgtttcttagtcaccttattagattgcaacctcagctcctgttaattcgagcaaatgcagttccttaactgatttactctgataggacctctctgaaaactcaaggtcacccaaatccgaaatcttactccattaccataacccatatgatctccatatgtatgtgtgtatgatatctgtatacccgcatccagtatggacatagactgatagacagtgctttcttgtgttacacaggaaagcctccggttagccgtatatggttcagtgattggcgaaggccatacttgttcacagctgcataggcagctctgaaaccatcgccgtatgctgatgatgtgtcattggcgatctgatgcaggaagaattctccaagcttcttctcggtgtgagagatcccacccttcttggacggtggtggtcgacaggaggacgacgaagatgaagcgtaagatgttgaagcctgtccatatcttgaagtggatggaaggatctctgactccagccacaggtaagacatgacctggcatataccttcctcaatctccgcctttaggttccggtaacctttgaggcgcaaccacccatgcatcaattcatgggcaagaatggagcccgttagcagcctggggaggccaaacaatacaagaattgcagtgacttcgcatctcctagttagcttttgcggttgggttttcatatctagtaaccgatttgcaccaattctgggcctcctaagtatactggtcacagtctgctcctctgacagacaaaggcctcgtgtttcaggcatatgatgcggtcctttgctttctccttccatagcttcattaagggcttgacgttcaaccaagagcatgggtatctgctggtctagtttcatgttcatcccttcgtagtagtctctgatggaatggtatagcggttgacattcaccggtgtccatgattgcagaatccaggcattccatgcacaagctgcgtccatcccctaatgacatatactttgtgttccttggctccattttctcacagctacagcaacgaggtgttctatcatgctcatgcaaaggacaatacttctgtccccagaatggatgggctctgtactctatcaaaccagtcctgttcgttgggataaattgaaggcagacgtcacactttgggtgatgaagctccttgtagcacagcttgtggtatggatctgtacctagcaaggtgaactgggaaacagaataaagtaaactgtcacttcctgagaacacctccatctcacggatagggtggcgacaggaagaacagcggaagcactgagggtgccagtacattcccaagcagctcaagtaatggccatgccctatctcatgcttgcaacccccacagaccctgtatcctctcgacctggcctgggtctgagagggtgcacaaggattgtaaggctggtaaggattcatgttcagactgtcctgtattgctctagcgagttcttcatcgttttctcccttgtcatggtttctctcttttgtatttttggcatcgtctgcaagagcaagggcaagtgcatggtccatttcttcattgttatgtctaggtggttcttccttctttggtctaactggttcttcccagagcgtggtctcttctcctgccgtcacccgagggcgccgtcggttggcctcgccgtccttcgtccccttcaggaaagcgcagagccacttcat

SEQ ID NO: 21799 - DNA, 998 bp, Oryza sativa
  Clone ID: TF_OsC12484_1
agcagggtagctaaagaacatgatgttagaaggataaggttgctaggaagtatgatcaattcgtagtagttacagaaattacagatttttcacaggaggctggcagtcagtcgcatgccattgttgtcaacctgccattttcatgagcctcctatgaaacgaaggcgtacacttacagcttgacagactactcgcacacagggaggatcacgagcaaaaaaagaggagggaataaacaaccgttgcaaaattagtaaacagaaactccagagatccgtgtatcaccgtatgtgtttggctcgtttcgtagtcctagttgtcctctctattttcgtctggcggcggcggcgccggttgctcttcgggcaccacttccggcaacacctcctgggactcgctcttcttcttcatgtgattgtagctccctttctccatgaacagctgcccgaagtgtatcttgcagtacaacaccccgttgagcgccgcgtaggaggaggtggtcaggatgcagcctccatgagagcacttgaagcagctcttgtggtatgactcaccttccaaagttagcttttctagtgggtacactgttttctggcaggctgcacacttatcctgagttccagaaaacgctgaacatatcttgcttggggcccttgccagttccttgtctgtagatctgcaacctggcgcgaacttcttggagaagctccccgtctccttgaagagctgctcaaagtgggtcttgcagtagaggacgccgtccatggacgagtagctgcacatcgagagaatccctttgcagtggctgcacttgaagcaggtcttgtggtacgggacgccgtcggcggtgaggaggtcgatgaagtggacggtcttgtcgcacgccgtgcacttgtcctgcgtgccggtgaaagacatggtggcaagagacgactgtcgacgatcgacgacgcacgcacgcccgccccccggacgcgtgggtcgacccgggaattccg

SEQ ID NO: 21800 - DNA, 2931 bp, Oryza sativa
  Clone ID: TF_OsC13226_1
gtagaatctcacttgtacatggtagtataaatttcttattaatttttgtcacataaaaaataccgctgtttccattagaatttctgaatgccatacatgtgtgattggttgggctaaccatatcacaatttaatcaatgtcgtcagttagcccttccaaaagtaactgaaaagattgtttgtacaattgcacatctcaaaattgctttcttttcctgtaaatggacgcttaatgacaaatcgatcgtgtataacttccatcaaaagacgaatctatgaaatttcaaaatgggaaagtccctgttaaccggatatgctcaagggtgcgctttagaccatactgaagaacagctcggttgccagctctaaaaccatcgccataggccattgaggtatctgactcaatttggtgcttgaaaaaatcaccaagctttcgctcaaactgagatcttcccccctttttcgatgatgtggatgctgatgaggatgaagacgttgaagcaccattactgcctgatcctgcaatgatctctgactcaatccacatgtgagcaagaacttggcatatgccctcttctacgtctggactaagtgtgcgatatcctttaagtcgcaaccacgcatgcatcatctcatgagctaaaattgaacctgtcaacaatcttgggagaccataaagaatgagaattgcagtcacttcacatcgacgagtcaacctatatggctccgttatcatttccataactttatttccagccattcttggtctcctcaatatcgtgctgacagtttgctcttctgataagcataaacctcttgtttctggaagatggtggtgaccagtcttctctccttccatggcttcatttaaagcctgtctttctacaagaagcaagggaacttgttgttccactttcatatttaggccttcataaaattcctgtatttcaagataaagaggttggcactcgctcgtatccataactgcagaatcaaggcactccaggcagagtttgcgaccatcgtccagcaatacatatcttgattcccttggctccattctttcacaactacagcatcttggagtaccgtccacctcatgtgatggacagtatttttgtaaccagaaaggatgtgctctatattcaatcaggccattcatatttgtaggaataaattgcttgcagacatcacattttgggtgaaagcgctccttgtagcatgttttatggtatggatggtttcccgacatggagaactcatagtcatatattggttgattacaagcatgacagcgaaaacattctggatgccaaacagctcccatgcaactaaggaaacgcccatgaccaatctcactgtgacatccggcacaagtcctgaatccagaagaaaacataaatggcagtggttgatacatattgccaccattggcgttgccattttcacgagcacgaggaggcgattcaacattcaaactttcctggatagctcttgcaagttgttcatcctcctccaaatgcatgtccttttctattgcctttgcctttctttgttcctcctctaatagagagagtgatatagcacgagcggtctcttcattgtcaaattctgacgggacatccaaatcacaacaatctacatcgtcaatgacaagttgacggagatcagtagccaacaatagcaagtcgagttgaccaaatgtggactctagtgggtacaccatcgtcacaactgcggaattagagggtccattccatatcgtctcctccgcgggtttgctgtggtattgcccttccgagattttgtgggttgaacctctaaaaaatttggtcaaccaacccatagagctccaaatggcaatgttggaagggacacttttatgtggttgcttgtacaagactaattcctgctcaagctccgtcctggcatcacccaccgtcacccagacctcggagattttctcaacggcgccttcaaagagatcaacaatggtgaacgcccgcgatgtcggaaccatcagtcctgttaatccttcgagcccagtcttttcgcttgtggagattgcaggctgcctgcttgattgcgcatgattcactctaggcacaacggcgccgttcagatatatagtccggttagctccaaaggcaatcatcttccgaaggcctctcccgtaggcgaggctcttgtgcatgtgaccgaacacgaccagcggtatcgaaactccggtttctctttgcagatcagatatggcttgctccagatctggatcaccatgatcaccaccaccagcaacccaatcccgcccacaaatatcctccattcttgagcctagacctgttggcccattgtgtgccagtaatatgacagcatgctcctttggtgcatttgtagcagcatcatatatcctctttgcactttcagccatatcattgacaccataccactgtagctcgatttcactgcatgttactacacagcagaagtagtatgcaataagaaaccaacccggtgaagcaactaagaatgacagcaaccattttgacagaagctttggtctaaatatcctattacccccgcaggaaaatggtcgtccaccaacaacactcagctttattgttggaaaatccaaacatttgtacccaacatgctgctcaccaaggctctctagctgaagctggacacgatctaccttcttctctgaaaactgatacgtgtgccaacagtcatgattcccaagaatagctgctttggggagctgaagatctgaaatgcttttaacaagttgaacattctcgttgccataatcacctgtaaaaagtaccaaatctggctggagaaaatgtagggcttttgagtcttcctcaagggtccaatcattatgcgagaatcgcaaggccacaccagcacccatgtctggcctatcccccat

SEQ ID NO: 21801 - DNA, 416 bp, Oryza sativa
  Clone ID: TF_LIB3431-002-P1-K1-C5
tcccgtgcacgtacccacgtacgtacgaagcacgtatctctattttccacatacgcgactagtgagcagcagctgtggtattctcccattgctactgccaccaaggaggttgccgctgcggctgctgccgccgacaaggcgccaacgacgccttcgacacccctgatacaggaggcgaacgaagctctgaaggcaccgaagccaaaagaggcgccgaaggctaaggaaggggaagagaaaaaagcgaaaggtgacaaagagaaagaaaacgccaataaggagaggcaccccagggcgactacatcccagatcggcgaggccacaccacccgccctactcggagacgatcaaggaggatatcatggcgctgcaagggaacagtacagggggatccagcacatacgcgatctccaagt

SEQ ID NO: 21802 - DNA, 1217 bp, Oryza sativa
  Clone ID: TF_OsC135984_1
ccccgtgttttttttatatttttttacttgcaatcgcaagatgagatgcacatttatataattataattaaggatgagcggaacacctgacgtttttgaggtaaacgtcttagccggctcgacccaagtacataacaagttaacaacatgttttaagttacacatcggaggaacaacatgccaaagatgacagggcaaaccaacctatgcaagtacagtagaaccagtgccgctgccgttgccgctaacagattggaattcaaaattgctttgcgccacttgcattattgttaatatctctcctcttgaacatcgttcatagatctctgttgcgagtgtaacgagagactcggtctcctcagcaagcttgaagatcctttcagcctccgtcatgtgctcattcgcaaggtgtgatttggcctccgcatcagccactttcatagctgcagctgcagctgcttctagggcaggactcgtaccagcaaatgaacctaaattctgcgatgccttcagtggcttggctggatccttctttggacttggagacttatttgcttgcgaaactttggctgcataagattctgtgatcctataggacctgtcaatcttttcaatctttttcgctgctataagcctccttaattttgcagtaagcaatcttctaaaattcgcttgcacctcgtgcctttgctctatgtagtggcaaattgcatcaacatccgaaccatttggatccccaatttcacaaagagcttctattaccatggaatttggaatcttcacatcctgagagcttttctcaggatctgcggatggtgaagcctcagcaactttatttgggggtaggacgagaagcggagtctgagagcttggagatgtggaagatgaaggcccttttatccttggaacctttaatttatcccttgaacccagtccacttgcactaaaactcaaattcctccatttgtccttgaggtcgatgttcgagcgggaggagaggacggggctgaactccggatccttctggatggtgcgccacttgccggggccatgcttgagcacgccgcgccgcagcgcctcctcctcctccgaggtccacttctgcttcggggcgcccatctccgcgcgcctcctccccacaagcctcccccgcctcctgcactctccggcgtctgaactgtccgaccagaaaccctagtttgggtttctcctcgtgc

SEQ ID NO: 21803 - DNA, 1457 bp, Oryza sativa
  Clone ID: TF_OsC20360_1
cgcggcaaggacgcaggcgagcagctgctccgacaagcgctctctctctctctcaactccggcgaggctcacgcgcgctccgaagcttcggatagcggcagtagtcagtgcattgatggcgaccgacgtggcagcgactgagcccgaggtggcggcggaggaggctgcggccgccgcgcctgagaccacggccaccgccggggattccaagccggcgaaggaggccaaggccaagaaggccgccgcgccgaggaaggcacgctccaccgccacccacccgccgtacgccgagatgatctcggaggcgatcgcgacgctgaaggagaggaccgggtcgagccagtacgcgatcggcaagttcctcgaggacaagcacaaggaccacctgccatccaacttccgcaagcagctgctcgtccagatcaagaagctcgtcgccgccggcaagctgaccaaggtcaagaactcctacaagttgccgccgacgcgcgcgccggccgcggccaagcccaaggcgaagcccgccgccgccgcaaagccgaagccgaagccgaaggccgcagctaagcccaaggcggctgccaagccgaaggccaaggctccagccaagtccaaggccgccgcgaagcctaaggcggctgccaagccagccgcgaagccgaaggcggcggctaagcccaagtctccggctaagccagccgccaagcccaaggctgcccccaaggctaaagccaagccggccgcgaagccgaaagccaaggcggctcccaagccgaaggcggcagtcgtgacgaagacgaaggcgacctcggctcccgcccggaggccggcgaaggcggcgaagacgtcagccaaggacacgcccagcaagaaggcggcgccggcggccaagaagcccgccgccgcggcgaagaaggcgcccgccaagaaggccgcgccggcgaagaaggcggccgctccggcgaggaaggtgcccgcccggaaggcgaagaagtagagctctctctccggcgagcgagcaatctagggcttcatggttgttttcttagctgtttttttttctcttctctttgttgttagttgcgaggaggggtcaggggtacaagcttgtaaatttgatatcgcggcgggggtacactggtcatttcgtacccaggtggtggtgggcgacgatgatgacgacgacgacgagacagtgtttttagggcaatgtatttctgagtagattggtggagtttttattgtggtaacaatcttgtgatatttgtcgaaatcactttagctaagtaattaattatggagtaattttacttactgtattggcttgaccacaccctgtattcctctgaattttcagatctggaaattgaaatgaaatataggatttgtgacttggcgtaaaaaaaaaactcgagacctcgtctcccgcgcgccctctccctcccccccgtgccgat

SEQ ID NO: 21804 - DNA, 2137 bp, Oryza sativa
  Clone ID: TF_OsC1869_1
atccaaagaaaaaaaaagagtccgagcagcgagcaaaagaggaaaagcagggagcgagagaccgggggacggaaatggtcgtcgccgtcgcctcaccttcgtcggcgccggggccgggcgccgccggccgcccccacccgacctacaaggagatgatcctgcgggcgctcaaggagcttccagatccgatcatctccagccgccgtgccatcgccaagtacatctccgacaacttctccggcctcccttctcaccacgacgcgctcctcaccgttcacctccgccgcctcaggtcacagggccttctcctcatgtctggacactcgtaccttctctccacctccgccaccgccgctcgaggacggggacgaggacgaccgcccaagaaagcttcctcctccgcgccgcctcaaaagcgcggacccggccgaccccgcaagaatacagccctgtttccggttcctgtgcttgaggcgaagcctgggcgcgggcgaccccggaagaaccctctccctgtggcttcctccacctcctctgctgctgctgctgctacggcgttgagcctgagagtgaagcggggacctgggaggccgcgcaagaatgctgctgctaccccgttgagactgggagtgaagcggggacctgggaggccgcgcaagaatgctgctgctaccccgttgagactgggagcgaagcggggacctgggagaccgcgcaagaatgccactgctaccccgttgagcctgggagttaagcggggacctgggaggccgcgcaagaatgctgctgctgctgcctctcccgttgctccgccgcctgcatctccactgaagcggggtgttggacgcccaaggaagaacgccactcctctagtcaagcctggacctgggaggccgtctggattcaaacgtggaccaggccgccctcgcaagaatgccactcctcctgtgctgtcagtgccacccactgctgctgctgtgttgggagtgaagcgtggccgtgggcgccctagaaaggataaaccattgcaatcttggtctgtgctctctggcggtgctgcaatgactaagagagggcctgggaggccaagaaagaagaggccactggaagctggaggtgttgtggcagcacaggtagacactgcagatggaggtgaggctggagccgttcaaaatggaggtgaagttaggtgtctgctctctgatggtgcttcttcaatggggaacagagggcctgggagtcctaggaaggaggtgctattggaaaatgaacctacagtttctacattggtgggaaagagaggccgtggccgtccaaaaaaggagaaaccatcagcagcaaggcctgctgaaactggagatgctaaatcaatggggatcaagagaggtcgcggaagaccaagaaaggacagttcctttcaagctgtgtttgcagaagctgcaggtcaggtgtcaagagatgtcacagcagctcagcccgaaggagatgcagatttactggcaaggaaggaaccagagactgcagctgtagtttcggtggagaacaaagaaactaggcctgcagatgctgggggtgttgtggtttctgaagagaagacatcgattgatccggtggaggctggaagtgtaatgccatgtgttaatgcagaagttgatcgcatgaactctgacctgcgcactgctaatccatagtgtggctggcgtcagcactcagcacagaagggaggacctggatggctggcactacctgcaggtgtgaatgtgtattcactgatttagctggagacatactgtgaaaactgttaaatgttgcaaccaaaattattactgtcatgctgttaagtagtttctcaagatcaacattggagtatgcttttaatgatatccacttctcggataaatttttataataatccatagaaaaaaaaaataaaacctttaggaatgactggatatatcatatatgttgcttttagtgcacccagtggtgatgagatgcatcaatgtttacttccaatttgaacaaaaaaaaaaaaaaaattcaatcaatatctctgttttttccatgcctatatcttaagtaattttggtgaaaaaaaaaaaaaaaaaaaaaaaaaaaaaaaaaaaaaaaaaaaaaa

SEQ ID NO: 21805 - DNA, 380 bp, Oryza sativa
  Clone ID: TF_uC-osflcyp033a05b1
cactatgtgaaagctggtccccctgcaggatagccgcgccggaagtatactgccggcgaccacacgcgtcctctcggacccatatataccacccatcagagaggggcggtatgtccagacaggactgtttgcaaaggagccacatctggcatggacaagcccggctccccgctggcaagcaccgcgtcagcctccaagaagcacaaggcagacgccctccgacgacgccgggggctcctcccacccgccttatttccagatgatcaaggacgcgatcacggtgcttaacgagaggaccgggatccagcgctcactccatcaccaagtacatggtaggacaagcacggcaccggcgttggcggccaactacaagaagatgc

SEQ ID NO: 21806 - DNA, 1208 bp, Oryza sativa
  Clone ID: TF_OsC62134_1
atagtggatccccgggcggtcctctcatgcctcactcgcctagaacccctcctcctcctcccgatctccgaggcaatcctcctcgaattccccgcgccccgatctccccctgacgccaccctcctcctccgccccggatcgccccgcccgatctcgccgcggggtcgaatttccccttctcttgtctccgatcagggccgcctcgatcgaaggcggcgccgcgccgaccatcccaccttgtttggttgtaatttcttcttgtcgcgtgaggaggggggcgtggcggcgggggagagcgcgtgagcgggcgggagatgggggcgccgaagcagaggtggacggcggaggaggaggccgcgctcaaggccggcgtggcgaagcacgggacggggaagtggaggaccatcctccgcgacccggaattcaccgcgctcctgcggctgagatccaatgttgacctcaaggataagtggcgcaacttgagtgtcactgctggaggatatgggtcaagagagagggcaagggtagctttgaagggaggcaagcgagggcctaaggcccttgctgaaccgatggatgccgacgaaaagaaccctgacattgatgataatgcaatcattgatgcacaaccgttggcagtggttgttgagcccatgcaacttgagagtactccagagaaagagaaatcagttgctaggcttgatgaccttattttagaagctataaagaagcttaaggaaccgtctgggtctaatagaacaacgatttcttcatacattgaggagcaatactggccacctgaagattttcaacgattactttctacaaaattgaaagcattggttgctactggaaaattaatcaaggtgaatcaaaagtacaggattgcaccaagttcgaactcttcaggtggaaagagcatcaaggtgtattccactggagaaatgaacatagaaaataataatgttagacagctgagtaagccgcaagtggatgctgaacttgataagatgaaaagcatgagtaaggaagaggcagcatcatttgctgctagggcagttgccgaggcagaagcagccattgctgaagctgaagaagcagcaagggctgcagaggccgcagaagccgaggctgacgctgcaaaggcttttcttgatgctgttgtgaccacgatgcaaaacagaaatcatgcttctgcggtatactga

SEQ ID NO: 21807 - DNA, 1800 bp, Oryza sativa
  Clone ID: TF_OsC4154_1
ttttttttttttttttttttttttttttttttttttttttaagacgaaatagatatttgtattatggtttttgaggatgatgggatcctatcattacaggcgagaagatgatgataccgcctagagggaggtgaaacgaactaagacgaacaagcatttacagaacacaatttctgctactacttgctgatgatgatgctaatggcgctgtcgcctgtggagatcaaaaggtgggcaatccaatccaggtggcatcatcgccggcgacctctacttcatgctcttcctcgccgcacccttgcgagcagccggcgccgcagccaccgacgccttcttcttggtcgccgccgccttcttcttggcagccaccggcgccgccttcttggcaggcgagtccttggcagaggtcttggcggacttggcagggcggccgcggggcttcaccggcgaggtggcggtcttggccttcgccttgggagacgccttgggcttcgccgccggcgcggcggcgaccttgatcttggtcttggtcgccggcttcgcggccttggtggtagcaggagccttcgccttggcagccggcttcgcggccttggtggtcttgaccttgggcttcgtggcgggggcggccttgggcttggcgtcggcggcggccggagcggcagggcgggtggaggagagcttgaaggagttcttgaccttggccagcttgccggcggcggtgagcttcttgaggttgccggagaggagcttgcggaagttgggcggcaggttggcgccatggttggcatggatgtgcttgccgatggcctgggagctcgatccagtcctctccttcagcgccacgatcgcctccatgatcatctcggcgtacggcgggtgggcggcggcgacgcggggcttcttggccttggcctccttcaccttcttctccttcgccggcttggcctccttcttctccttcggcggcctgccggccttcttcttctccttcgccggcttggcggccttctcctccgccgccgtcgtctcctcgacggcctcctccgccgcggcagcctccacctcggtcaccggaacctcagggacaacctcctcagtcgccattgcagcacgcccctcactcactctcccctctactactactcgcaagaaatggtcgcgactcgcggcggattgcttccgattctgcggcggcggcggccggccggtgccgcgcccgtgcttgcggaagttgggcggcaggttggcgccatggttggcatggatgtgcttgccgatggcctgggagctcgatccagtcctctccttcagcgccacgatcgcctccatgatcatctcggcgtacggcgggtgggcggcggcgacgcggggcttcttggccttggcctccttcaccttcttctccttcgccggcttggcctccttcttctccttcggcggcctgccggccttcttcttctccttcgcccgcctggcggcccccgcctccgccgcccccgcagttgcgcggccaggccgccgccaggcgcggcctggtcgtgcgtccggtggccggggggctcggtccgggcctcgccgtccgcccctcgcgcccctccaggttctccccggcggtccccgggggcccggcggccccgcggcccgcctgccccgtgggcttcgtggcgggggcggccttgggcttggcgtcggcggcggccggagcggcagggcgggtggaggagagcttgaaggagttcttgaccttggccagcttgccggcggcggtgagcttcttgaggttgccggagaggagct

SEQ ID NO: 21808 - DNA, 855 bp, Oryza sativa
  Clone ID: TF_OsC566_21
gtgtttttgaacatatactagattccttgacagcttggtatttatcatgggtgggctactcgatgctatcctactgcttctggtctcctgcgcgggagacagccatgccgcgttgccagcggagatgtactggaagatcgtgcttccgaccgctgccgactccgtaccgttggccaccgaaaagctcccggagatcctctcccagctctccgtccccgccggctccccggccgccgacgccatgagtgcgaggccgtgccgctcgccggcgaggcgaagcaatgcgcgacggcgctcgagtccatggtggagttcgccgcgtccagccttggcacccgcgacgtgcacgcagtgttcacggaggtcgacagggcagcgccgatcatgtattgggttgattcgagtttgtgccaatgttgcgtgcctgtccgccggatgatcaaggaggcgatcatggcgctggacgggaacggcaaggcgggatcgagcccgtacgcgatcgccaagtacatgggggagcagcacatgggggttctcccggcgaactaccggaaggtgctcgccgtgcagctgcggaacttcgccgccaagggccggctcgtgaaggtgaaggcctcgttcaagctgtcggctgccgaggagaagaaggcgacggcggcgaaggcggccaggtccaaggcggccaagggcgtcgtcggcggcgccaagaggaagaggaccccgcgcccctccggcgccgccgccaagaagcccgcgtcgtcggcggaggcgaagaagcgggttccccccgcccgcccagcccgcgccaagagggcgaggaaggccgccctcgcgaagccgatgcagccgcccaaa

SEQ ID NO: 21809 - DNA, 445 bp, Oryza sativa
  Clone ID: TF_uC-osflcyp061f05b1
tcgtttttccactacgcactagtagtagcactctggtattctcccatggcgactgcaaccgaggaggttgccgctgcggctgctgccgccggcgaggcgccgccgccgccgccgccagcggtggtagaggaggtgaaggaggcggtggaggcacccaatccggaggaggcgcctaatgctgatgagggggaggagaagaaggcggagggtgagaaggagaaggagaaggcgaagaaggagaggaaaccgagggcgaggaagccccgatcggcggggccacaccacccgccctacttcgagatgatcaaggaggcgatcatggcgctggacgggaacggcaaggcgggatcgagcccgtacgcgatcgccaagtacatgggggagcagcacatggtggttttcccggcgaactaccggaaggtgcttgccgtgcaactgcggaact

SEQ ID NO: 21810 - DNA, 980 bp, Oryza sativa
  Clone ID: TF_OsC5305_1
tccccacgccgccgccggccggtatccagctctcgtctcgaaatcaaaagcacacccaagagagagtagtggtagttccagagcggtctgcttgcgaagttgcgatgcctgccatggccaagcccgcctcccgcgctgccaagcccgcgtcggcgccgaagaagcagaaggcaaagccctccgccgccgccggtggctcctcccacccgccttatttcgagatgatcaaggaggcgatcacggtgcttaaggagaggaccggctcgagcgcgcacgccatcgccaagtacatggaggagaagcacggggcgtcgctgccggccaactacaagaagatgctctccatccagctgcgcgggttcgcttccaagggcaagctcgtcaaggttaaggcctcctacaagctctccgacgccgccaaggactcgcccaaggccaagcctgccgcccccgcccccaaggcagcagcgccgaagccagcgaaggacgccgccaaacccaagaaggacgccgccgctgccaaacccaagaaggcccccgccgctggcaccaagcgcaaggcgccggagaagaaggtggtcgccaagcccaagaagtctccggcggcgaaggcgaaggccaagcccaagaccgtccggtcgccggccgcgaagaagacccgcaaggcacctgcagcttgagttgggagtttggttgatagctatgtaggtcccctcttggttgaaatggttggtgtttaggatctgtacaaaggctgcctcggctatgtctccctatttagatagttctcttgagtaggcgaagttctatgtatcccttgatggtgtagtataagaaatggttaggtctctggagatgtgaggcgcttccatctaactcatgaaatgaactttgccgttttctttgttgtaaaaaaaaaaaaaaaaaaaaactcgtgccctctcccccccccccggcccaaaaaaaaaaaaaccaccaaa

SEQ ID NO: 21811 - DNA, 1827 bp, Oryza sativa
  Clone ID: TF_OsC11113_1
atgcagcacgggagaaggggagggtggcggaagggcgaggcggcggcggcgggtgaacgcggtggcgggctcgtcctccccgatcacactctccggcatggggaaaggatggcgcaggcggcggaccgcgcgggagaccagcggcaggcggtcgtggatgcggcgctcacgaagccctcgcgtggccgcggcatcgtgaatggcggcggggaaacggaggcccgggcgacgacgagatggttgcgccaggggagcgcgggcgggggagtgacggccccatccggggtcgccttcaacatcaccgccgggcccatgaccgagatcgtggacgacatcgacgtcgccatggtggaggaggtggtggcggcgccggcggagaaggacgagcacgtgcaggccatcctcctggccattgtcgcctccactcgcgaggaccgacacggcgtggagaggttggagaggtcggaggtcgaggcccgggacccgcgcgtccgtgacgtcgcgaatgtgcaggcactctcccttcgccgccaccgctctcgcctgccgacgtcgcatcgttccagcccgccgatgccgcaccgctctcgcccgccgacgccgcctctccgcaaccgtgctcgcccgccaccgtcgccgcttcgcctgctctggccgccattctggtgcggcgacggcgcccggttgaagaggtgccccttgggccgccctgcgccgtcgcctccggccggcttgcccagtcgccagaagataagagaagaaccacaaccacaaccccccttctcctctcagatccgcgtcgcggcggccccaaatcccacacgcgcacagcgcagcaccaacgccggaaggagacagcgcccctcgcccccgccaccccaaccctacgagagggagggagccagccagccagccagccaggcatggccacctccacttccactggccaccgcgccgccgacctcgtcctcccctcctaccccgaggcacgctctctttctaaaccctagctgttcctggccagatgcccagatctgtggcggaattgaccgggtttcttgggttgtcttctccttctctttgctgcagatgatcgtggaggcgatcgcgtcgctggcggaggagaacgggtctagccaggccgccatcgcgcgccgcatcgaggcggcccgcggcggcggcggcctcctcccgccgtcgcaccccgcgctcgtcgcggcgcacctctcccggatgtcagccgccggggagctcgtcgccgtcgcgggtgggaagtacgcgctccgcccgactcctccgccgccgccgccggcggatccggcggcggcggcggcggtggcggaggaggaggaggaggaggaggagttcctcgccgatgatgactcggccgacgacttaccgccgcctcctccgcccaagcgaggccgcggccgtcccccgaaggtgcgccccccgggctacccggccgtacccgccgccgccgcacccgtccccgtccccgtcggtgcgccggtcgacggctccgtcgccgccgccgcccccgccgtgccgcgccggcgtggccgcccgcccaagccgcgggacccgcacgcgccgcccaagatcccacgcccgcgagggcgcccgcgcaagaaccctctcccggaagggatggtgccgccgccgccgacgcgccccggcgcgacggccaagccgcgcccgcagttcgccgagtggttgatttcaagcaagaactgcaaaggactcactgcttccctgttgtttgctgttgttcctgctgcaaaattgatgatggtcaatgctcattgtcttcagcttgatccataa

SEQ ID NO: 21812 - DNA, 1537 bp, Oryza sativa
  Clone ID: TF_OsC166550_1
ccttcgtccgaaccacggacaccgacgaccccgtgctggccttcgtagagagctgcggtgctgccgtgacgactaacagagccacgatgtcttaaaaccgcgacgactgctaccttgggcctcagttgaagtgcacaccacttgacaaaccgttaatccccttcggttgcctccacggaaacggcacaagatcgaggttcgttgctgagccgtagatttttggtgtgagcatcaccgcactcagcgaaacatccccacgggattcgtcattgaatctgaggaactctaacaaccctgacaatcgaaattgcgcagggggtccgagctcaacccgaatgacaaaccatgcgcggcttctgcttctaggaaacaaaagagagggccaaaacgtagaccagccaaccatcaacaatgaggcttttgagaggctgccaattgacttctgtcttgctttgagggcggggatggctaaggaaagggcgacctgcaacatggaaccacaagactttgggcagaacaaacacccaatcacaaggatcctaaaggcgtcggcttgaaggaggatgtagatgacgacgagccaaccgctgccgccaacagaggaagaagcgccgatcatagcacacatgccgacgcctgccggcgccacagctagcataggtgcgacagagggaaacaacgccaccgctagctcgggcacggcgaagggggacgacagacgtcgtaacgccgaggacagcgcagagaccgtcgccacctcaacgacgaccaccgaagtgccaggcgcgacgcagactccgtctccaccaccaacacaaacccgcacacgagcagggtgtcggcaaccactgccagaagctcctcctccaccaccaccaaggccatccagatccggaaactctatcttactttggggctcttgctcggggatgatttgaccgccatgtcttcgattcgccgtccacgaggcgcagaggtaccaactcccaccaccgccgctaacgagaacaccggtcgccaccattagaggccagactaacttgggtggccggccgcggccgcgcttgacgggagcggagccgtcgccggcggcgggaggaggggcgggagccgtcttggccttcttgggcgggcggccgcgggacttggggatggcgtcggagatggggtccttggacttgggcgggcggccgcgggggcgcggcgaggagggcttgggcggcggcggcggcgcgttggggtcccgcggcttgggggggcggccccggccgcgcttgggcggcgcgtcgggcgcgtcggcgcggaagtagttgttcttgaggaagatgagctcaccggactccttcatcctggccaggtgcgccgtgagcagcgacgcgtgcgccggcggcaggtccccgtacttcccctcgatgaacttggagatcgccgacttgttcgacccgctcttctcgttcagcccctcgatcgccgccagtatcatctccgggtagggcgggagaggcggcggcttggaggcttcgtcggcggcggccat

SEQ ID NO: 21813 - DNA, 426 bp, Oryza sativa
  Clone ID: TF_LIB4371-022-R1-K1-F8
ggcggccccaaatcccacacgcgcacagcgcagcaccaacgccggaaggagacagcgcccctcgcccccgccaccccaaccctacgagagggagggagccagccagccagccagccaggcatggccacctccacttccactggccaccgcgccgccgacctcgtcctcccctcctaccccgagatgatcgtggaggcgatcgcgtcgctggcggaggagaacgggtctagccaggccgccatcgcgcgccgcatcgaggcggcccgcggcggcggcggcctcctcccgccgtcgcaccccgcgctcgtcgcggcgcacctctcccggatgtcagccgccggggagctcgtcgccgtcgcgggtgggaagtacgcgctccgcccgactcctccgccgccgccgccggcggatccggcggtggcggcg

SEQ ID NO: 21814 - DNA, 893 bp, Oryza sativa
  unsure (1)..(893): unsure at all n locations
  Clone ID: TF_OsC566_18
cgaatttccgggttgagaccaagccgtcgcgatttagctcgtgccgaattcggcacgagcgaggaagccccgatcggcggggccacaccacccgccctacttcgagatgatcaaggaggcgatcatggcgctggacgggaacggcaaggcgggatcgagcccgtacgcgatcgccaagtacatgggggagcagcacatgggggttctcccggcgaactaccggaaggtgctcgccgtgcagctgcggaacttcgccgccaagggccggctcgtgaaggtgaaggcctcgttcaagctgtcggctgcctatgataaaaaggcgacggcggcgaaggcggccaggtccaaggcggccaagggcgtcttcggcggcgccaagaggaagaagaccccgcgcccctccgccgccgccgccaagaaacccgcgtcgtcggcggaggcgaaaaaagcggttccccccgcccgcccagcccgcgccaagagggcgaggaagccgcccccgcgaagcgatgcaggcgcccaaatccatccgctccgccatctccaagaaggccaacaaggcagcgcctgatcatctccgccgtctcgccgcccgtccccgccgcgcgctgtatcccctgtataacctaagtgttgtcgctaacctagtagtagttcgccatcgtcgtttcgtttgcttcgatcgatcgagcgctctgtgtccggtgtgtgtgttgcgttgtaganaaggtttgggtttttttttgcaagggngggagaagctactgtagcatatccccaagaagctgtagtaataagatgatttggcgttcgcagctttgccttatgatcaaaaaaaaaaaaaaaaaaaaaaaaaaaaaaaaaaaaaaaaaaaaaaaaaaaaaaaaaaaaaa

SEQ ID NO: 21815 - DNA, 825 bp, Oryza sativa
  Clone ID: TF_OsC31153_3
ggccgcaaattttttttttttttttttgttagcacatcatgctctgtgtatattaatgtaatacactttacatttggtacagcaatcttatagttatgcaactgtgcaattcccattattgtgagccagcttgtgatgcaattctaatagatcaaagaacaataaatagtcatggaataaacacattaattttgcattcagtttttcctccccttttgcatcaggcataagactgaggcaacacaaattatctaaattatagcctacttttagggcctaaatccttttctaaaaaagtttgcttctgaattgtacgctacttttagggcatacaccctttttccccccttatgtattctggtgctttactgcccagaacatttctacctcttttgctgttcttccagggattcttccagctataagttcccacctgttcccaacaagcctgtgcattctgaaaacgagatcttcctcttcttccgtgaaatgaacaaaattctgtgcagtgttattaacttcttttgtttcacaaccatcactggttttggaattctttccctggctaccactgctgctatccattaggcgtgaaaaactccaatgaaatgccgagttgagatcttgtgctagctaagatcctcagacccttgttatgaccttatgttttctagggcccttctctgggtaaagatgagcaaaactctggtttttaaagagatgggagttggtagtcaccttctgatctagctgtcctgagtactgactaatgctgctggctgttggatttcccctagtcttccattggctcccttatctgtaaga

SEQ ID NO: 21816 - DNA, 1946 bp, Oryza sativa
  unsure (1)..(1946): unsure at all n locations
  Clone ID: TF_OsC393664_1
ggattcgtgcgtgatgacggcggcgccgctaatgccggtcgaggtcgtcgtggaatcgtcgccgacggcgaggatggcgtaccacttgccgccgccgtttgcgcgggaggtggtggcggcggcgtgcacctcgtaggcggcgatggcgttggcgaggccagggagtgccgggaagacgcgctgcgccgcccgggcggcgcggagggcaggagatgcgacgcggccctggcggcggcggcggcggcggtggcggacagcttaccgaaggagacgcggcggaggaggtcgtcgcggatgaatcgtcgccgacggcgaggatggcgtaccacttgtcgccggcgtctgcncgggaggcggcggcgtggtggacctcgtaggcggcgacggcgctggcgacgccagggagtggcgggaacagccgccgcgcctccgaactgcggctgcggcggcggcgacggcgacggtgtctccctctgatgaggcggcggcggcggcggcggcggtggctgaggcggaggcggaggtgcgggcccgctcgccggtggtggtggtggcggcggtagtgcgcccgccggctgcggcggcgaagccggaggtgtatccctctccctctgatgaggcggcggcggcgatggctgaggcggtggcggaggcgcatccctctccgtctgacgaggcggcggcggtgatgactgaggcggtggcggaggcggaggcggaggcggtggagctcggcctgcggtggccggcggttcgggtacctgatggccttgcctgcccgggcgccgcggcggcgccggcggcgcgcggcgggtggcgaagggagagctcgtcccacgccttctggagcagcctgaacgcgccggcggcggcggcggagcggttcttgtccgggtgcacgacgaggcagaggcggtggtactgccgcttgagggactcgtgcgtgacgccgccgccgccgctcgaggtcttcgccgatcggtcgccgacggcgaggacggcgtaccagttcctgccgcctgcgcgggtggtggcggcgggggcgtggatggtgagtgagttaattgcttcttggttttgatgcaaaaagaaataggtatcagatttttgaaaggagggctcggtggtggtggcggtgcgcgcgtgccgctcgtgcgccggagcactcgagtggtaggtggagactcacactggagaggtaggaggtgcgaggggccaacattcgcctaccgttggatgcgcgacacgtggcacccgttttgatgggccaagacttcctcgtaaatgggccgaagttaaattgggctttcggggaccgcctcggcgccggggccgcgccggcggcggcggagccagcaccggcagcggcagcttgtagatggacgaggcagaaggacaagttactggagacgctggtggcgcgatgcgccatgaaccggcagtgcgtgggcggctgggacgccatcgccgccgccttcggggacgacaggacggcggcgcaggtggagcagcggtacggggagatagccgcggaggtgagacgcgtcatggaggagccctgggatgcggaagaccctgcaattgcagcagcagccgccgccgtgccggcggcgccggtgaagcatgcagcggcggggccggggagcgatggcggcggcgaggaggggaaggtggtcgtggagaagaagtcagggatatggagtgaggaagagcaccggcagtgcctacgagggattgaagagatcgggcacggtcgttggacacagatatcgatagagtatgttccatcaaggacaccgatacaaattgccagccatacccagaagtattttctccggatggccaagcccaaggaggatcgcaagaggaagagcatacacgacaccccctatcatcttcatctgcctaatgctgctgatgctcacgctcaccaacaacaacaataa

SEQ ID NO: 21817 - DNA, 1190 bp, Oryza sativa
  Clone ID: TF_1044913
ctcgagtagtggtagcagcacgactgcacgacgctagtacccgggcgtcaccgtcgccgttgcgcgcgcgcgctgtacttgcaagcaaaagcccccctcgtcaattgaatgcgtgcgtcgcgcaacgcaacgcaagcacgcgccgggttttattttcttttcttcgtcgtctcccacactctccgcttccgttccgtctcgttgttgttgctgccgcagcagcgcaggtgaaaatctccggcatttaaggttgcgccgcgggggatcctcctcggccacaaacaaaaccaccctcgtcctccgcgcctctgctagcgagtactcctacatagactagccacgtctccccccaaatcttttcgcacttcctttcccctccctttcacccactgaatcactcgaagtcgtcgttctcgtccacggccctgctgtctcgtgcgctccggcagctttggcgggggtgggtgggggagcgcgcgccatggggagggcgccgtgttgcgacaagaaggggctcaagaagggggcgtggacgccggaggaggacaagctcctcgtcgactacatccaggtcaacggtcacggcagctggcgcctcctccccaagctcgcaggtaccggctggcttctctgttcttgcgaggcaatgctttgcttctgtcacgttttcgtgttcgcgtgccgcactagtgctgaactgctgatcagcacattctgagaatctgtcttgatgatttcggccttagatgctgcttatactcgattgcatctgcataccttcaagctgcaataatcacccacaagctcgattggggctaaaatacacaaattatttcatcgtatacaaagtaggagtactgattaagtcgtacactcggcgagtactaggctcactcgtactactccctgctgggttttccttgatcttcactccaggcatcagcattgcctccagctacgaacactcggtcactcactccagggctccaggctcctaccattaccatgcccatgttgtgctactctcttttcgtgcatgagaagtactcggtattattcacaggagctgagagactctagtccgttccatctggataacacttcgttttgcgttgcatgcagggctgaaccggtgcggcaagagctgccggctgcggtggacgaactacctccggcctcgtgccgaattc

SEQ ID NO: 21818 - DNA, 660 bp, Oryza sativa; identical to SEQ ID NO: 12465
  Clone ID: TF_OsC100249_4

SEQ ID NO: 21819 - DNA, 755 bp, Oryza sativa
  Clone ID: TF_OsC263120_1
tcggcgtcgactcccgtctcgtctctcgcgagctcgcccacccgccgccctgcgccgatctccagcgattccgcgacttcgcgagcagtggcgccgtcgtccgtcctgctgcttccgccgcatcctggtttgggggttcaactgaaccccctatgtccctcgttagatccgcccctgcccgcccccgggctgcagggacacgccaagaggaacaaaattttttcaatgcgctgcgccaagtagggaagaattttgagaagattacgctgcgtgtccagagcaaaagcaaagatcaggtcagacattattactatcgtcttgttcgacgcatgaagaaacttctcggtcctgagttctcgctcgatgcaaaaaattccaaggacaccattgctgctatgctctgctggtggtctctgcttgaaaaatttagctgcagtgcatcaaaactgcatctgaagcctcggagattcaaaactttcgtagaagcattgggaaatcaactactaaaggatagaaataaaaccagaaaaaagtgtccacgtggggatgtgtgcctgtcctcttcatcttcggctgtcaacaggactcctggaaatgaatctttctcagtaaaactcctgcctgtggatgtctccaatggtagcaaagtagcatcttctaaaggggcagttttcaagaggggcgcagaaccaaattccagtaacaagtcaggtgcaactaaaggggacctctccgccacaagtactgtgaaacag

SEQ ID NO: 21820 - DNA, 387 bp, Oryza sativa; identical to SEQ ID NO: 12280
  Clone ID: TF_OsC134_46

SEQ ID NO: 21821 - DNA, 330 bp, Oryza sativa; identical to SEQ ID NO: 12282
  Clone ID: TF_OsC341175_1

SEQ ID NO: 21822 - DNA, 379 bp, Oryza sativa
  Clone ID: TF_OsC96526_1
gtccaatccaaggatgtcttctaggtcaagcagctcctcccgcaacagcaacagtgtcaacatggactcagagtggagcaaaaaggagaacaagctgttcgaggaggctcttgcctactacggcgagggcgcgcctgacctctttcacaaggtgtctcgcgccatgggaggcaccaagacagccgatgaggtgcgccgccactatgagatcctcgaggacgacctcaagctgatagaggcaagaagagtcccgttccccaagggtggaagcatctgagcatggaactgatacgggtggaagcatatcaggttccagacaacacgaaaaaaattccaatataaattatattccttgctagctgaggctaaactactgaag

SEQ ID NO: 21823 - DNA, 4015 bp, Oryza sativa
  Clone ID: TF_OsC4193_1
ggcaaaagatgcaatagagagcgagccagagatagacagcatgaatattttttacagttcactaatatggctaactaggatacaacaatataaaaataacgactaataagttacatcttgtatagactgcaaaattaaaattagaattaaaaaagttgcacgcgacatacatacatatgatgtgcaggccaaggagctagccacttggggtgggtatcaacgccagcatttggtttttgatgatgcccatgcacatctcgatctccctgaagatggttacattttgtgagctgcaaggctgtaggcgcgaaagcgctgaatccaggatgtgcgcgacttcggcaggatggtactgcttttccgtgcagttctggatcataaggatcgtagcaacacacgatgaaatcaactctgagggaaattgcggttcagaatcgcaaccattgggcaatcttggactagaaatgttatttgttgcaggatcaaagtggccagatgtggtgttatcttgatgagatgaattggcctgtccagaatcaggaggtatccgtcttatgcctagtatactggaacccgagccagtgctgcgattgttcagattatcgagtgcctcccctactttggcataagcatcctctccttcactcacactgcacattgcctgaatagcaacatcaaccatcaattttgctcgggacctcgaagtctcaataacttccatcacttgggacccagattcctgattaatatagccaaaaaggttatacaggtctggtgtgccagttaaggctccattttccatgggtttaggatatgattgtgctggatgcccatgatacgtgttgcgttgccgcagagaaagcaaggctgaagccacatgatcattagaatctcttagctgtacaagcaccatagcatattgttttctgaagtgctcaaaatctctaaaagcttctccatccttttgccttccatacacctcttcgttcatgtgcctcaattctaccaacaaagcttcaacagagaacatgaggactaagcctttcaaacttgcctttttatcaagagcacgtgatagttcagcaagagcccttatatcagcctctctttcctgtatctgtgacagtgtgcacggctgactgtacattgactgctgagcagcaacagcaacctcatttactgcaactttggcctgtgcaattgaatcaaccgtgtcaccctttgcttgcttcattaaagtatttattgggtaattagaaggtatgttggaggttgcatcaccaccatcaaaacacacatttgatgtgaatcttgttggacctccagtacctaactctttggaccgatcctcgaattttgcttctgagaaactattgtaatatttgttaacaatgttctgccgtctgagagactctgggaaattttctagtggatgtagtggcatacaatcaatatccattacaaactcaacacccagttcaggtcgatcaaattgaacccggcaacgattatggtcaacattcagaacattcccatcatgaagctcccttgttctgggatgacaggctatgacacgctgtccaactcctaaaggccgagcaagatcggttggtagaccttctcgaacaccagaccgaagttcagcatagtgttgcctgacagactcacgatactgagcaagcttctctctctcttcttgcaaaaactgtttcgacaatcgacgtggttttccaagggagctccttatgacaccccactcgacacgagtcagccttggcacatgacccaacttcacatgattcaaatactcaacaaattcactcttttcaaaccatggaaaatcaattgcactatagaaccattcaaacgtgcaccatctacggagcaaacgtgaagataagcaatgagagagtgagtccttaagatcaatgacattattcacagcgtaagagaatttatcacttcggagatcatcagcaccatcagtaggtctacattctggagcaagtgctttcagaatgcctattttgcggcgacttctaccctttgatgctaagtcagcttgctgagttgtggcaccttgtgttgtatccacagtatccatggctttattagaagataccttcccttcttcagcagaaacgttgtccaagtcactaatttccatccactcagtcttctcaacatctttaagtgcacttttttcatctttagaaatctttgccgcggaaggttttcttttctttttctctgtttgaacaccaaatttagaatctagctgctttgtttcagaaatagcgattccatcacgattaggaactttggcaattctagcttttttgcgagcagccatgtcagcgcttgcgagttctgactgccttttaacctttttcactgtacttttggatttatctttcttctcaagtactgacactgctgcaggcatactaggcttttcatcagaatcattatctttgttttcatccttaatctgtgctgatgattcagattcaacgatagaagaaggttgaagaatattcacggatagatcagctaatgtatgtaatgcatcaagggctgagctttcatcaccaaagaacagctggcgatttcttttgtttgatttcttagatggccatcttcctttacggcccaatccattcacctctgattcatctttagtctttttggcgctatggccttcttcagtgccactacaggcctctctgtcatcctcaagttgatcatctgttttccgtgcagctttctttctcctcctctgagttcttttcaccttttgctgagacttgccagacgcagaaccttcgttattcatcaaataggatgcatatttgggataatcgccagtctctgcttccctacttcctaaactaccttcagggaaatcagcatctacttggaatccatgtagctttgagcttcccatctccgaatcagcattctttctgtctgtactttttacaggagacaggaacatacggtcaccagatcttccaggcgtttgagaatcctgaggtgaacctcctctttgaaacacctctgccaaagctagtgcagctacatgtgcaccttcatcatcaccattaccatctggtttggcttgtctatttgtcggccctatcttctcatctcgctggtacatactagcaacaggcactcgtggagtccgttttccaacagcacgtggcttgttccctccagatcgtttcttcttcaacagggaaaggcatccatagcttgacgaagcaggttgagattgcaattgatcaggatgttgtgtatcagaagccttcgacacagattgaaatttcgcacgaccacgctttcgtggctttctggaagtttttggtgaaccattactctcatgatcgctgttacttccatccagaatattatagtgatcagtcatcattgcaattaaccctgcagcagtagctgttccctcaggaagagataaatatgccttattcatgttgtaaagagcctccaccatttcagatgttctatcacggatagaactggccacctttctccaatcttttccatattttctataggatccataaaaacgctctagctcatctttgctccattgagaacctagcatgtcagacagttttttctttcgcactttacttttatgcacatttgttgcatctttgtcctgccaatcttcatttattttggcatatcgtttattcacatttctcactttccatggtaacacacactccgtggcacacaaattgccaccgcagacgcaattcacaaataatccaatgcgcacagccctgagtgccaggtgagtcctcgatctccaacagacgacgagggcacgaaattggggattccggggaacgtagaccctcgcgggatgagctgggcggttaacgcgggagcggctacaaaaggactcctccggcggcgcgaggtagatcattctgctttgtgcaaaaccacatacatccaagcaatatgatgcgacagcctccat

SEQ ID NO: 21824 - DNA, 1549 bp, Oryza sativa
  Clone ID: TF_OsC51198_1
atggacgcgaaggacatcctcggcctccccaagaccgccttcccgtccgtccaggagaagaagccccgcgcgcccaaggagccgcagcggaagcccgatggcgtctcgcgcgaggtgtacgcgctcactggaggggtggggatggctccactcatgccgaccatcgaggcttcgcacctgaagcggcgaccagctgttgagaaggagaagatagcatggcagtggctacctttcacgtcctctgcacggactgacaaccttcaactttaccattgggttagagttgtaaatggtgctccacccactggtgactatcactttgcaaaatacaacaagaaggcggatgttctcaaatacaccgatgaggagtatgagaagtatttaaccgatcctgcatggagcagggaggaaacagataaactatttgaactatgtgaacgctttgaccttcgcttcatagtaatagttgataggttcccaactgatcgcagcatggaggatttgaagagccgttattattctgttactcgtgctcttctgattgctagagctcggtcatttgatgaagttgctggtaatccccttgtgaaggaaacattcaatgctgctcatgagaccgagagaaagcgtgctttatctgcacttctctcccagacaaaacagcaagaacgaaaggatgctgagattttagcagaagcaaaacgcattatggaaactcgtgctgctagcaaacatactgaggaagcgggagcactggcacactttgataatgttgatggtgtatctcccttgagcaacacacacccattgtcaactgctacacttccagctgcagcagtgaataactccatacctgcttcactgcgaatggtgaatttgaagcccaaggtcccgacgaaagcagtttgcgtcgagcatcttgaactacggaatgagatacttacactgcttaacttacagaagcagctgcaaaataaagaagctgaagtttcagctaacagagaaaattcctttacagaggcaccaagcacacctaagcgtgctaatagagatgttgatagaccctttgttcctgatactgttgggtttgcaggtgagagagcaggcaagcgggaccacaagcggaagatagtgctatggatcaactccattcttgcttggaagcttcccggcgtgcactttcaccaagagtttgctcccgtcggtagaagccgttcttggcttttgtctgtacagtgcatctgccctgagaaggttttcttcgtactcctcgttggaagatgagacgaatcaggtggaagcagctgctggcgtcactgagaagtgatcgccttgagcccttgacgtctccccctactcaacgaagagtgtaactgtttcttttgtttgtttgagctgtagctaccgtttgtaaaatgagttatctgacaataccgtgtttgttcaagtagaactgtaacacaactgtttacacccaatcaatcctgtaatcttggacaatttaacgaggaaccgcgatcccaatgcaaacctgagcctggtttccatg

SEQ ID NO: 21825 - DNA, 674 bp, Oryza sativa
  Clone ID: TF_LIB4506-009-R1-N1-D10
aaggggactatgtcaatctcaaggtacgttagtcaaatctctcggagaacataggaagtgttcgtgtgtagaaaaaggagcaaacaatacatacgtcgactctttcttttgcacgagaacgcgagtcgcgatcacaactttgctatacaaggggggtattcacagacgtccaaaagcgtacatcaatctcaggggtttccccctctatttgcatgcaacacgtggatcacaagaaacccgaaactttcccctgtacaaccgtagtgctctgccctgaaaacttgatcggcactctcacgtcgccagcttgagactgcatctcagccagtttttttactcgtagcagaatcgacactggtatcggtatggcagaaggattgctcttccgtggacaaacaccatcgttttcagtggaaagttgtgtctggctggccctgatcagattccgccatttgtccttaagatccaccgaggtgcggtacgaatatgatgagaaggctagtcttctaatctcggaccatttgccagccccatatcgggccacaccatcgaccagcttcacaacctcacacaatgtccatgctcgatgatgcttccgcttcccaccccgctttgttttgggattgtcatcagagtcgcaaaaatccttgtcctgcagaccctgaacatccttt

SEQ ID NO: 21826 - DNA, 1676 bp, Oryza sativa
  Clone ID: TF_OsC25904_1
cccaaaatatgggcccctgggggggctcaaaagtgccggcaccgcacaacattgctaacagaacaacattgctagctcttttcgagataggttcttgatctaatgcaaagataattagacaggaactatgtaagttcatcaaaagatgcacagcagcatagcggttttcttgtttttttttacaatggattgctagtgcaataccagcgcggtctacttgtctgtgcccctttcatgtctcatatgaaatcaccatcgtatgggcaacctgaaggaggaatgatcatcaagccatcgatgtatgacatgtctagaagatctgagacattcgccagatgttgctccagtgtgcatgggtctgaggaggtctccaaagaacaaacattcttagcttggttgaaatcagccagtggtggttcgacaatcttttcacatactgatggaacttctggtgaaaaaccttggagtacagctggtggagaaacgatgttaacttctggactcatttctttactttcctgtaagtgcctttcagattctgccacagcagacaccttgagctccaccgggcttgacaggaaaaccagcttcttccttgctcttttacgccaattcaatctatcccttatcctctgagaagcttcacctgaatcaggatctggtctttctgtacatatcaactcagaactttctccttctgatgtatcagtattttcacataggtctatgaacccttgtttagactttgagcttgtcccttgtttagatttggagcttgccccttgtttatatttggagcttgccccttgtttatattttgagcttgttctttgtttagacattaaacttgcttgtaaatctgataacaactgattctcaccagatgaaccatcacattttgagcttgccccttgtttagattttaagcatgctcgtaaatctgataatagtttattctcatcagatgaaccatcacattttgagcttgcccctttagattttaagcttgctcgtaaatctgataacagttgattatcaccagatgaaccatcacactttgagcttgcccctttagattttaggcttgctcgtaaatctgataacagttgattatcaccagatgaaccatcacactttgagcttgcccctttagattttaggcttgctcgtaaatctgataacagttgattatcagaagatgaaccatcacattttgagctcaccccttctttagattttaggcttggtcgtaaatctgataacagtttattctcatcagatgaaacatcacactgctgaagaatatttgagtcactactctgcgaaactgatagattttcaggcagaccaggagattttttgagcaatcctgaagctaaatacgaatttaattttcttttcataggacctctccagtgttctttgattgcagcacttgtcctccctgtgaaatgttctaacaattttagttcagaaagccttttgaagtggttagatgcatgctcccttactctgcattgttgtgcatttcgaccaggtatagcgcgtgcaacagtttcccagttgttatgcccatatatgttaatcatttgaataagtgactcatcctccaggttacccttcccctccccctcctcctccccctccccttccccctccactgctctgctcgccat

SEQ ID NO: 21827 - DNA, 264 bp, Oryza sativa; identical to SEQ ID NO: 12290
  Clone ID: TF_OsC389431_1

SEQ ID NO: 21828 - DNA, 1365 bp, Oryza sativa
  Clone ID: TF_OsC28425_1
ttttttttttttttttgcttcagaaattatatccggctgcttcgttttccttgtctgtaatgctcccattcagatcacttaccctattcactgcgttacaactcaaatgccttaggtcagaattgatacaactatatgagtacgacattttctgcagtaaaaagaagggttaactagaagctctccaactccaactacacaatgcaataggttgtacacatacgagcaaaagatgacaagagtacacaatgaatgaatataagacgacgtcgcacaaaagctcagtttggtccccaaatgctactttacaaaatggctttgaaaaatactgagctacttgaccactatacagatcgctcccgtcgagtcttctggcgaccatatcatcaccaagacagacgacaggttggaggattttgaggaacagacttcccaaggcaaggcagctgttctcaatgcagaactcttgacttggtctttaacttttttggctgtgcagtcccctcaaatttcaaaacttcagcaaagatcaaaaccatctcggcgttcgaaatttggcaaacgccaaggccatccactttatttgtattgctgtcatactgttcatcacaacattctcaacaaagcattgacaattgacaaccccaatatacaaatcatctttatctccctcatcagccatatcttcagaggctcgtcatgatgtcaacatctaataacctatgtttatatgctcatgagtcctggcatccgctacatgcacgcacctcggtcactgtagtggtctagagcagcatttggcagcatcatgtgaaactcagcacattgaacaccattagatccatgcgctccattatggtcctcaaatgatgtgcatgactcgtcttggacgtcggcatcacctccaggattatctgtgttggatcccagaggcttctggcttggtccatctctgagcccagataaactatcagctaccttctcatggaaggagtcttcagactctggggacatgggattgttcacgtaataatcatgtgctggggactcaactgcagaatcctcatcctctgttacagaaggctcatcaggaacctcatcatcatcactgtccacgtgcaatggctccgatctgttttgctgagccctcttacgaagcatgaagacattgaaatagtagctgacaagctccatgctagttttaccaggcaaagctcgtgggagaaaatgccaaaagttctttcccaaggaaggaggattagagtaaacaactctataaaagagactttcctcctcatctgtccatctctgagcaatatcttctcccatatcacaaagacctaactcacgaaatttgtcctctcc

SEQ ID NO: 21829 - DNA, 2090 bp, Oryza sativa
  Clone ID: TF_OsC31153_2
atggaccatgccgacatggatggcctcgccacggccatgctcccgctctcattgtggtcgcgggagatcgctggccttcttttcatgatggaccgtctcactggtaccaccgtcacctctttgagaaaccaaggaccaaaattctcctacgcaactcatggcgctcgctgcctcatgctgctacccacgctgactgcctcggcgtccttccctctcgacatcgccatcaatggcgagatggcaaatcgaatgatgcaccaagtccccaaaaagcgtgctcctcaaacgcataatgccttctacctagatgcgctcatgctcctcccacatgctgcgctctgtcaccgcaaccaccgcagcatggagcacgctacggtctcggagaaccggtcgcgccgccacttccgcaaccctgtcctcgcctatgtgaccccctggaactctaaaggttatgacatggcaaagttgtacagcacaaagtttactcacatatcacctgtgtggtatgacttgaagagcgatgggaataagctagttttggaaggacaacataattttgatgccaaatgggtctccgaacttcaaagtaatggatctttggtattgcctagagttgtcttagaagcattccctggggttgtactaatgaaaaagaagctaagggacaaagctattgatctaatttttgtcatctggctgtcagtgaatagggataaggggtatgatggtgttgtgctggaatcctggtcaagatgggctgtttatggagtgttagatgattcagagttacgcaacagggcacttcaatttgtaaagcatctggggaaaactttgcctttgaccagttcaaatttaagtacgcatcaccatttgaagttaatttatgttgtccctgctccacgaatgaaagagctcaacaatcaagagttcagaccagaagatcttctgcagttggctgactcagtagatggtttttctcttatgacatatgacttctcagggccacaaaaccctggccccagtgcacctttgagttggatacagtattctttaaaaacacttctcgcagcgaaggggtctgcttctcatgggcattctcacatgatattccttggcatcaatttttatgggaatgactttctcctttctaaaggtgatggtggtaatgctatcactggaagggatttcatttatttacttgataagtacaagccatctttgcagtgggatgagaaaagttcagagcattttttcgtctattcagataaaggtttgagacatgctgtattctacccaacgctgatgtccctttctttacgtttggatgaagctcaagattggggaacagggctttcaatttgggaaattgggcaaggtttggactattttttcgatgttctttaggaatatctcacgtgtgttctttttattttgggagcaatgtcagttagaccacaactattgcaaagtattacaaggtcacccgtggacattatttgtttagcatcaaaactgtcacttcataactgattacatccttctgggaaatgtttccaaacaccaaatttccccttcagtgtactgctgcaaaatttagattaagtgatatgagatttttcatcttctttacagaataaacatggttgcttgtttactttagttacttcacttggtagtactatactgcctcattccttaagcaagtatgatgatgttggtctggttttgttattagcacatcatgctctgtgtatattaatgtaatacactttacatttggtacagcaatcttatagttatgccttttgctgttcttccagggattcttccagctataagttcccacctgttcccaacaagcctgtgcattctgaaaacgagatcttcctcttcttccgtgaaatgaacaaaattctgtgcagtgttattaacttcttttgtttcacaaccatcactggttttggaattctttccctggctaccactgctgctatccattaggcgtgaaaaactccaatgaaatgccgagttgagatcttgtgctagctaagatcctcagacccttgttatgacgttatgttatctagggc

SEQ ID NO: 21830 - DNA, 2608 bp, Oryza sativa
  Clone ID: TF_OsC52736_1
gaaaaaaagaaggggagaaaaaataatataataacagaacaaggagatgaaaaaggagttccccggccaagcgccgacgagtcggttacactccgagatggacgcggcggcggccggcgggggcggggcggcaaagcggaagcgcagcttctccgaggacgacgcctacctcatcctgcacaggtaccagccggcgacgatcctgacgatgctgcaggagatggggaagcaggtgggcgcggggaaggggatcgactggagggcgctggtgcggaggacgagcaccgggatcacctccgcgcgcgagtaccagatgctgtggcgccacctcgcctacggccacgagttcgtcgagagcgtcgagcccgcctccctgccgctggacgatgggagtgatctagaatgtgagattgagattgtccctgctccgggtaatgaagcattagctgaggccacatcgtttgccaagactattatcaccggatcttcacgtgaacaaacctctggtcaacgtgtcaactcagaagctgctgcgctaaacactccaaatgaaaagatagtgcgtgttccatctgataaacagcttgtgcctggtcaccgtctaacaaacggtacaggtccggtttccagctcaaagcagccctcccacacaggctcatctcctgatcctttggaccctaatggacatcccaaaaagaaaaagaagcctaaaccatggtccagagaggaggacatggaactaggagcaggtgtacagaagcatggtgaaggaaattggatggaaattctgcataaatataaatttgatagttcaaggacgcatcttcaacttcaacagagatgggcgcttatttgcaagcgtcaggggtcaaccaagcctgctacccctaaaatacccaatgttatgtcggaggaactaaaggcagcacaaaaagcattttcattggccattgggacgaccagatcgtctacattaagaccaggaggtgtgccacatcacaatccaatggttactactacgaatcctgaggtgaaatctgttacagcaccttcaccattgccggtaccggtgcatgttgttccggtgcctgttccagtgcaaccagtacaagtgcagttaccaccacctcagttgcatcaagcacctgcgcaatctgcacctccacctccaaaagtatcaaatgcttcaaataagtcacgaaataattctaagaaacaagttgcccaatcaattcctgtgaatggccctttgtcgatacaagaggcagctcttgctgctggtgggcgaattgccgaaccaagtgttgccaccaattttttaaaagctgcacagtccacaaaagctgtgcacataagatctcgaggaacaggatcttcaaaatcttctacgggatctaaaacacctactgtggctggtgaacctgggacacagcttggcagtgatcaacacctagaattacaaagtactggtggtccatctcaagttttgactgcacatgcaactgaacaagttcataatgtttcagaagtcgctggggttaatcctctgggacaatccgctggagtgcatttatcagaaactaagaaagcactgaacaccacaccagtgtctggatcttctgacaaaatggaaatagatgacaactctaattattttgcagtcacaatggaggacttgttccctgaggatgtgaagcaggaagatgttcaagatcccaagattgaggaggccatagaccccaaggatgcagacatgttagaatttgatcgctttgtggcccaaggatgcttaaataaggataatgtggataagagcaaggctgccaagattgctccagaagctcaaagcgttattggcagccagaaaaaacagctgaagacgctgcccacagttggcaaaagcaaccctgtatttgctggacctccagcaactgcgaaaaagaccaaagctccagttccacagggtgggatgtctagcggcatagttggcgtgctgaatagatcattaggagggaaggcacctgctcctgctaccacaggcacccaaagtactgtccagaagcagcaaagcatgagctcaaagggcaacttgttagtgcccaagaatgtggcgcctggcaccgtaacaccagccaacaaccgggccaacacagcggtgaacggggctagcaaggtgaatccaccagccagccagaagccagcctaacatggtaaattccttgctataataacgccctaggacttttgtgcgcttagtttacttttgaaatgtaaatagggccacgtagataccatctattctttgcccccctttgcatttgtagctcaattcctttctgaaccaaagcactggtgaaaacattaggttagactggatacaccgtttaatcgctttgccttaactgtgatgtcttagactgatatgttccatttgttaagctggcctgagattatcatgccgccttcctgtacagcctcgcctctttctccgttggatagtttggttgattggccaaatattcagaaactatgtcattgtggcctgatcaaactgtgaagatggcacgccatgcaagttgtctctatcggctttaatttatggctttga

SEQ ID NO: 21831 - DNA, 478 bp, Oryza sativa
  Clone ID: TF_OsC31153_4
cgatgttctttaggaatatctcacgtgtgttctttttattttgggagcaatgtcagttagaccacaactattgcaaagtattacaaggtcacccgtggacattatttgtttagcatcaaaactgtcacttcataactgattacatccttctgggaaatgtttccaaacaccaaatttccccttcagtgtactgctcttttgctgttcttccagggattcttccagctataagttcccacctgttcccaacaagcctgtgcattctgaaaacgagatcttcctcttcttccgtgaaatgaacaaaattctgtgcagtgttattaacttcttttgtttcacaaccatcactggttttggaattctttccctggctaccactgctgctatccattaggcgtgaaaaactccaatgaaatgccgagttgagatcttgtgctagctaagatcctcagacccttgttatgaccttatgttttct

SEQ ID NO: 21832 - DNA, 309 bp, Oryza sativa
  Clone ID: TF_rsicee_6205.y1.abd
cacgaggagaagggttatagaggctgatcgaccatcgatcgacgtcgcggcgagcggctagtgggcgttgtcgtcgtcggcggcggcgaggtggtggtggtggtagctacgtaggttgtggacatcgatctagaggtagaggcagggagggggaggaatgggacggctgtcgtcgtgcggcggcgtgcaggcgaagctgaggaaggggctttggtctcccgaggaagacgataagctgtacaatcacatcatccgacatggcgtcggctgctggagctccgtccccaagctcgcagggttgcagcgatg

SEQ ID NO: 21833 - DNA, 729 bp, Oryza sativa
  unsure (1)..(729): unsure at all n locations
  Clone ID: TF_LIB4309-043-R1-K1-B2
ccctatttccctgttctgcatagatttgtggttgttttataattatttgtttctaccatggattccttaacaagattgaatcatgtattcttctctacttggaattgtcatgcaggctcaaaaagttcttgggaacaaatggactgaaatagcaaaggttgtctcaggcagaactgataatgcagtgaagaatcggttttctactctatgcaaaaggcgggccaaggatgacgagctattcaaggaaaatggatcattatgttccagtacaagttcaaagagggcattggtacaaactgggtgtctcacatctggtgcaagtggctctgcaccacctattaagcagatgaggccatgtaattctgatttcaaagagaatatgacaccaaatatgagattagttggacaagacaagagcacacaagattctcgacagcctcttgcaattgtttatcaaaacaatcaagataatatgaatacaatggatacccaaaatcttgttgctaaaactgcagcaaaacaattatttgcggnggaacagaattgcgttaagcatgagggtaattttttgaacaaggatgatccaaaaattgctactttattgcagcgagccgacttgctttgctccctagcaacgaanataaatactgaaaatacaagccaaagcatggacgaagcctgncagcaactacagcatcatttggattagaaagatgataatgacatgtc

SEQ ID NO: 21834 - DNA, 858 bp, Oryza sativa
  Clone ID: TF_OsC44378_4
agtatatcctctcttcttcttcttcctcctcacaactcacaatatttcagagtagtatacctttcttgctagctagctagcttgttcatcgatcttgttttgaggtgttgagatagctaggatggtggtgaagaaggcggcgacgatggcggaggcggaagcggaggaggagatgatgatgaggatgatgtgtggttcaggaggcaacgagatgatgaagacgaagatgaagaagaagaatagagaaggggaagaagaagaagaagtaagtggaggaggtaggatgaggaaggggccatggacggagcaagaggacgtccaactggtatggttcgtgcgcttgttcggggaacgtcattgggatttcttagcaaaggtctcaagtttgcgcggtggcgggtgacctagctacatgcactgcatgcctccctctctctctatatatatctccttcccatcaaacatccatccatccatcgactgcttctttttctttctttttttttctcttcttgattgttcttgttcttgctcttctttctctctctcttatcatgcaacacccacacatgcatatatccatccatccatctatccccttatcacatttaatttcttcttcatatataccaatttggcaacagctaatgattctttttttatttgaaactctgaatgaattgatttagatgcatgcatcaatacaaataattgatttctttttatctggagctctgaaattgatttagatatgcatattgataaaacaaaatttgatatctcatctgaaactctgaattggttaagatgcctacacataaatgttccattttcagttgtggggatcgatgtgatggc

SEQ ID NO: 21835 - DNA, 1751 bp, Oryza sativa
  Clone ID: TF_OsC205949_1
atggtctccgccaaccagccgccgcccgacgcggccgcggcagcggcgggctcggctggggaggacgccagcaagaaggtgcggaagccgtacaccatcaccaagtcgcccgagagccggcaggaggagaagcctgcagagccagagactctgagccgccgtgccgacgccgacgcctacgccgagccgcccgcacgctccgctcccatggtctccgccaaccagccgccgcccgacgcggccgcggcagcggcgggctcggctggggaggacgccagcaagaaggtgcggaagccgtacaccatcaccaagtcgcgcgagagctggacggagcaggagcacgacaagttccttgaggccctccagctctttgatcgtgattggaaaaagatagaagcttttgttggatcgaagactgttattcagattaggagccatgcacagaagtattttttgaaggttcaaaagaatggaacaagtgagcatgtaccggcagattcatcttccatgcttagagaactcaggcatgaatgccactgtttcgtcatggacacacaattctatcccaccaattgtagcctcatccatggtgaaaggtttgttgtccgtgttatgccagattttgcacaagtatacagcttcttgggcagcgttttcgatccaagcacaagtggccatttacagaaactaaaggagatgaatccaattgatgttgagacggcattgttgttaatgagaaatctctccatcaatttgactagtcctgattttgaagatcagaagaagttgctatcttcatacagtaccccgtctgatgggcttgagctaggaagcaccagaagctcagttctagctgatagaccattaagtgctccattcataatgtgtaagggtgcaaccgtgtacagtaggcttgcacagctggtgatggcattctcgtttctgtcatctggcagagaaggcactactgccccaagtgacccatggcatagccagaaacagaatgctccatcagtccatctgatgagatatgtgtgaccccattcatgattaagggcgaatagtgctgagaaagtgtgaggtctcttccctggccaaactggctaaaaggtgctgagaagtctctccaccgataatttcagctcgtcagtcattcggagcttggtgaagcactaggaaggcactttgcaacattgtatctctagctaagcttcaagccttcaactgcagtatcccttagggcgcagccgtgggcaccgggcttgcgctcgtgggagctgtctttagcggtataatagcctaattgtgtatatatgttagccctgaagcgtgtagttttcctcacccaatacctcggtcccctgggcgcgcaaatctttctctagtttaaaaggctgttcttagtaatgggaaatggaaaggaaattttgagtgatgctggattgctggttgctccctttttcctccattgagttcagctggtgatggcattctcgtttctgtcatctggcagagaaggcactactgccccaagtgacccatggcatagccagaaacagaatgctccatcagtccatctgatgagatatgtgtgaagaggtttcagctgagctgattatagtgctgtaaagcggcttagcactatgtaaatcatgtgttatgcaccatgtatcatgtatgatccttggaagttctggatgcaaaagtgagttgtgcacttgccatgtaaaaaaaaaaaaaaaaaaaaaaaa

SEQ ID NO: 21836 - DNA, 1458 bp, Oryza sativa
  Clone ID: TF_OsC84775_1
ggctcgtgggtgtgtgtgtgttcttgttttttgttttttttttttttttttttttgactaactaatatttttttttcttataaaagagtttacaacagtacaaccacgaagatcagcactaccattactgattttgttaacatagagtgatttatcatgtgtgccagacaaacaacagatacattcatacatagcataacttacagcacatgatacagactacggagaacggttaatcttaaaataaaaacaaaaaaacaaggaggcaaagcttattttgcctgggattcatctaaatgcagttgtgtgcagaaggagatcatgcctgtgcccttgttggtggatttgcatggaaagctgattgtctattttgacctcctaccagatttaatgaaagagaagtagacactgtctcttgattggactctcctatgctgagcttcgacatgccaacaagctcatcaacgttgattgggctctttgaatgaactggaacaggcttgacaatctcatgtgtttcttgcacaggaccatcttcatctttctgattttgccagaaaggaaccgagaattgcaaaaagggcgagaaataagctggaacaatcactggataggtcgactgcaaattatctggcatgatagcagaagcggaagagctctctgcaacggcagaagtatctgactccatagaatctacctcctcctcctccctcggtggaggtagtgctggttgatttaatacttgggtctctggttcttgacctccaggaagtggtggaaggtccatagactcatctggcaccatgtcaaaaaggctagaccttcttttccttctggtcatattggattggcgtataaaatatttctgagcatgactggctacttgagtaggtgttcttgagaccacgaaattacgagagattcctcgccaatcacctttgccaagcttttgcaatccaagcaaaaacctccggtgttcttcttcagtccaaggaacacccttcttgcggtcgcgggtggcggaggaggagccctggacgaagtcgtcggaggcgtagccgtcggcggcggtgggggcggcgtcggggccgtcggcgggggaggcgccgccgctggtggatccggcggcggaggagaggagggagaggttccccatgctggcgctcttgcggatggagccatcggtgaggcgcaccccgaagatcttgaccccgcggttggggcacgtccgcgagttgtgcccgttgtggctgcagtgcgagcaccgcctcgtcatccccccctccgtccctccaccttccaaagcttcccttcccccacctatggagatcgatcgatcgatcgagtggagacggagatggtggtggtggagacgacgaggagagggaggggggagaggacgcgtgggcggacgcgtgggcggacgcgtgggcggacgcgtggaggcacgcgtggggg

SEQ ID NO: 21837 - DNA, 1033 bp, Oryza sativa
  Clone ID: TF_OsC215503_1
gcccctcgctcaatctcccatttcccctctaattctacttacttaagctagctaataattagcccaagaaaaatcccctctctcctcctctcctctcacttatcaagagaaaatcattttgggatctgaaaaacaaagatagatatgcaagatagctagctagcaagttatagtcaagttttgcttgatttctactcgatcgattcgatctctagctaggtgaaggatcatggcgtcgtcgtcgacgacgaacacgtcggacggcgccgggaagccggcgtcgtcgtcgtcgtcggcgtgcccgagaggccactggcggcccggggaagacgagaagctccggcagctggtggagaagtacggccctcagaactggaactccatcgccgagaagctggagggcagatcagggaagagctgtcgtctccggtggttcaaccagctggacccgcggatcaacaagcggcccttcacggaggaggaggaggagcggctgctggcggcgcaccgccaccacggcaacaagtgggccctcatcgcccgccacttccccggccgcaccgacaacgccgtcaagaaccactggcacgtcgtccgcgcccgccgctcccgcgagcgctcccgcctcctcgcccgcgccgccgccgccgccgcccacccgccgccgttctcctcctacgccagccagctcgacttcagcggcggcggtgcgtcatcaggcgcgcgcaatagctcgctatgcttcggcttcggcatgatcaacaggtcgtcgtcgtcttcttcttctccggcggcggcgccgttcttgatcaagtcgtttaacggtacgagctatggtacgctgctgccggcgacgacgtccatggcggcggcggcgcagcctgtgtccaccatcaccttctcctccactcccatgagagagacgctggaactgatggatgccggcggccatgagaaccacggcgacgtcgacggcggcggcgacaagcggaagggcgtgccgtacttcgacttcctcggcgtcggcgtgtag

SEQ ID NO: 21838 - DNA, 1098 bp, Oryza sativa
  Clone ID: TF_OsC92629_1
atggggtgcaaggcgtgccagaagcccaaggtgcactaccggaagggcctgtggtcgccggaggaggaccagaagctccgcgacttcatcctccgctacggccacggctgctggagcgccgtccccgtgaaggccgggctgcagcgtaacggcaagagttgcaggctgagatggatcaattacctgaggccggggctgaagcacggcatgttttcccgagaggaagaagaaaccgtcatgaacctgcacgctacaatgggcaacaagtggtcacagatagcgcggcatctgcctggccggacggacaacgaggtgaagaactactggaactcgtacctcaagaagcgagtcgaaggcgcggaggctgcggccagaaaatccgccgagccggccgacgtcgtcaccggcagcccgaaccgcagcgagaccggccaagaacgcgtcgccgctgaccggccggcgagctccgagtcttccgggccggtcgagtcgtcgtcggccgacgactcgagcagcctcaccgagcccgcggcggggctcgccgccgtccggccgcacgcgcccgtgatccccaaggtcatgttcgccgactggttcgacatggactacgggactagcctcgccgggacggcgccgggcctgagctaccagggctcgtcgtcggtgcaggtcgacgtcccgtgcggcggcgccgtggactccctgcacgggctgggcgacggcggcttctgctgggacttcgacgacgcggccgatcacatgcagggaggaggagggctctgcgacctgctctccatgagcgagttcctcggcatcaactaggcgggagcgtacgctctttcttccgtacagttcgtcgccgaagtgtaaattcgtcagtttcttttttttccccctctttttcagaggtgtaaatcgtgccgtgcatgtgtagtagttaaacttactggcttgtagtgttgagtttggacttcgaagccatgagttgtgcgtcgaagtacagtcttagctttctcttcataaggttcgtgacttcgtgtatacagctctggttttccggaaaacggttcagaaagaataacagaaacagagcgtcac

SEQ ID NO: 21839 - DNA, 1488 bp, Oryza sativa
  Clone ID: TF_OsC37603_1
tagtggatccccgggctgcaggaatcggcacgagggagggagaaatcgcctaaccctagcggtggtgcgccatgacgcgtgacggcgcgctgccggcgagcggcggcggcggggcggcggaggggccgaggcggtgctcgcagtgcgggcaccacgggcacaacgcgcggacgtgcacggcgaggggccccgtgaagctgttcggcgtgcggatcggcgacaagccgccgaccgcggccgcgggcggaggaggagggatgaggaagagcgccagtatggggagcctcgcgcagctggcggaggggggcggcggcggcggcgggagggaggaggggtacggctccgatgggaacgacgacaaacggcggaagcgaggtgaggcatggtcagaagaggagcacaaaaagtttctacttgggcttagtaagttaggaaaaggtgattggcgcggcatatcacgcaattatgttggttcaaggacgcctactcaagttgctagccatgctcaaaagtacttcattcgccaaacaaatgtgcacaggagaaaaagaagatcaagccttttcgatatggttatagatgattctgatgaccaaccactgtcccgtacatcttcacaagaagtagaagtagaagagaatctagaagatggacatcctgttactgcaccagtgatcccacctgctcctgtgcctatgctatcatcctctttggttccgccaccagtaccagcaatggcaccagttgctccaggtcctgtgttaacatctgcttcggccacactaccagtgtcagcagtggcaccccaaaccgatgaaaaggaacaagttgcctcaggttcaaatacaacagagacaggggctgcaattccagaagtcatgcccccatatggttatccaatgatgcttcctccatactacccaccggcatttgttccaatgccctactatggttatgtgcctgttttctatgcaccaccaggagcagtgcaagcacaacatgaggttgtcaagcctgtggccgtgcactcaaaacctccagtgcacatcgatgaactctacagcatgtccgaactcagcctgaagggcgaggctggtgtgaaaaacggcactcctaattctctgttgcctccaagaccaattggtagaccagacaggcaatctgcttttcatggaaaaggaccttctgatggctcttcaaatggactgattcctgcaaagtgattctgcagtaaaacatccattcatgtgtatctaatgcttagaagatagtaaatcataaaccccatgctgctgaaatggtgctgttgtacatgcaaaatgcttttactggtcattttagtttcatgtttggaggaagccatgtatgtcctgcgagtaaattgacttttagtttgacaaaaatgtaccatttctttgtcgttgtttctcaggcttcctcaaattgatttgaaaatctgaaggtttttctaaaaaaaaaaaaaaaaaa

SEQ ID NO: 21840 - DNA, 1512 bp, Oryza sativa
  Clone ID: TF_14588603
ctcgctgctccttgtcccccacctcctttacttgagcttgctcaccactgcctccatatacagagagtcttctctgtatttctctctctcagtgggaggctcacaagaatctttcagctcacatctcactgtccttgcctttctctagctagggaggtccaagaacagagcagcaggatggtgcagtggcgtttctagagagcagcatgagtactcgcaccaccgagctgggatggtcggcgatggcgaacaccgatgcagccgccgccgatgagggagaggcagcggtggcggcctgaggaagacgccatcctcctcgcctacgtccgccagtatgggccccgggagtggagcctcgtgtcccagcggatgaaccgccccctccaccgcgacgccaagtcctgcctcgagcgctggaagaactacctccgcccggggatcaagaaaggttcgctcaccgacgacgagcagcgcctcgtcatccgcctccaggccaagcacggcaacaagtggaagaagatcgccgccgaggtccccggccggacggcgaagcggctgggcaagtggtgggaggtgttcaaggagaagcagcagcgggagctccgggatcgggatcgccggcgactcccgccgccgctggacggcgacgagcgcggctgcgccggcgggcgatacgactggctcctcgaggacttcgccgacaagctcgtcaacgaccaccaccgccgaatgatggctgccccgatcctcccgccgtggatgtcgtcgtcgccgtcgtcttcttcctcgccgtcggtgacgcttagcctcgcgtcggcggcggtggcgccggcgcctgcggcgccgccgccgacgtggggtggtggtggaggaggggaggtggtggtggcggagttgatggagtgttgcagggagatggaggaagggcagagggcgtgggcggcgcacaggaaggaggcggcgtggaggatgaagagggtggagatgcagctggagacggagagggcgtgccggcggcgggaggcgacggaggagttcgaggcgaagatgagggcgctgagggaggagcaggcagctgcggtggagcgggtggaggcggagtaccgggagaagatggccggcctccgccgcgacgcggaggccaaggagcagaagatggcggagcagtgggcggccaagcacgcccgcctcgccaagttcctcgaccaggtcgccgcctgccgccgctggccgcccgtagagatcaacggcggcggcggcggcggccccggcggcggccggtgagccgccggacggtggcgctgcatgcatgcgtagttggacacctcgctttcttgcttcttcttctcgtgtcctttttacaactgttggaattcacttctctctagaaatatgtaatcttttgagtctcttttgatcattccaagtttcctactagtagctctattgaataataaatggaccaccaaattgcaaaccaaaatggttacaaaaaaaaaaaaaaaaaaaaaa

SEQ ID NO: 21841 - DNA, 1659 bp, Oryza sativa
  Clone ID: TF_OsC150_1
ctcctcctcccgtcttttccaccaccaccaccctcgcgtgccctaatttctcgctgctccttgtcccccacctcctttacttgagcttgctcaccactgcctccatatacagagagtcttctctgtatttctctctctcagtgggaggctcacaagaatctttcagctcacatctcactgtccttgcctttctctagctaggtactactactgctagtactaaccactgctcgtgttcttgggacttcttcttcttcttgttcttgttcttaaaatcatttggggttttgagctccagggaggtccaagaacagagcagcaggatggtgcagtggcgtttctgagagcagcatgagtactcgcaccaccgagctgggatggtcggcgatggcgaacaccgatgcagccgccgccgatgagggagaggcagcggtggcggcctgaggaagacgccatcctcctcgcctacgtccgccagtatgggccccgggagtggagcctcgtgtcccagcggatgaaccgccccctccaccgcgacgccaagtcctgcctcgagcgctggaagaactacctccgcccggggatcaagaaaggttcgctcaccgacgacgagcagcgcctcgtcatccgcctccaggccaagcacggcaacaagtggaagaagatcgccgccgaggtccccggccggacggcgaagcggctgggcaagtggtgggaggtgttcaaggagaagcagcagcgggagctccgggatcgggatcgccggcgactcccgccgccgctggacggcgacgagcgcggctgcgccggcgggcgatacgactggctcctcgaggacttcgccgacaagctcgtcaacgaccaccaccgccgaatgatggctgccccgatcctcccgccgtggatgtcgtcgtcgccgtcgtcttcttcctcgccgtcggtgacgcttagcctcgcgtcggcggcggtggcgccggcgcctgcggcgccgccgccgacgtggggtggtggtggaggaggggaggtggtggtggcggagttgatggagtgttgcagggagatggaggaagggcagagggcgtgggcggcgcacaggaaggaggcggcgtggaggatgaagagggtggagatgcagctggagacggagagggcgtgccggcggcgggaggcgacggaggagttcgaggcgaagatgagggcgctgagggaggagcaggcagctgcggtggagcgggtggaggcggagtaccgggagaagatggccggcctccgccgcgacgcggaggccaaggagcagaagatggcggagcagtgggcggccaagcacgcccgcctcgccaagttcctcgaccaggtcgccgcctgccgccgctggccgcccgtagagatcaacggcggcggcggcggcggccccggcggcggccggtgagccgccggacggtggcgctgcatgcatgcgtagttggacacctcgctttcttgcttcttcttctcgtgtcctttttacaactgttggaattcacttctctctagaaatatgtaatcttttgagtctcttttgatcattccaagtttcctactagtagctctattgaataataaatggaccaccaaattgcaaaccaaaatggttacaaaagaaaaaaaaaaaaaaaaaaa

SEQ ID NO: 21842 - DNA, 2228 bp, Oryza sativa
  Clone ID: TF_OsC155790_1
ccaggggggtgccccctaacctttccctgctttccactgaaatctcctatccgcaaccatacagttgctcaattctggtctcagcctaagccccaatcattcatcgttatataggtcactataccctcccttgcatttcccaccaccaccccttgaagccatgaatcgctgaagaagtcgtctgcgctactgctaccaccggggaaggattagctgcgcagaattgtgcgagcgaagcctgccagccgtgcgaatttcaagctccgaggtcctgcattgcactgaaatggggaggcattcttgctgctacaagcagaaattgaggaaggggctctggtcccctgaggaggatgagaagctcatgaatcacataaccaagcatggccatggctgctggagttctgttcctaaacttgcagggctccaaagatgcggcaagagctgcaggctgaggtggataaactatctgaggcctgacctccagagaggtgcattctctccatggggagaaattcctactgctacaatcagaggctgacgtaggggctgtggtcacctgaggaggatgaggatctcatgaacgacataacacagcatgaccattgcttctggtgcaccgttccagaacttgctcggctagagagatgttgcaaaagctgcaggctgagatggataaactacttgaggcctgacctaaagagaggtgcattctctcaggaggaagaggacctcatcgttgagctccatgctgttctgggaaacaggtggtctcaaattgcaacacggctgcctggaagaactgacaatgagatcaagaatctctggaattcatgcatcaagaagaagctgcggcagaaaggcattgacccaaacacccacaagccccttgccgaggttgatcgaagcaaagcaactcccaccatcagcaatgacaggacctctgaatccagcgatgttgacccatctagtggcgttgctcttcacaacttgagccatcttctgagcgagacggcgcaatcatcagagctgctgccagtgaaggtaactaaacctcgcacacaagctccgggcttggcacgtctgaaggtgccaccgaaggaactatttctagaccagcttacttctggccatgagaacctccctagctgccgttcatctggcccaattcccaatttcccgttccagcagctgttgtgctacaataatgattttaacagcatggacgttggaaacaggaattcactctggtataaccagaatgagtccagtagcagcacaatttccactgtgatgcccccagtttcaccatcaactctctcgacatcaacaggccttaatccatcaccagacaatgcaaactctcgaggcactggcatccacaattcccaattctattgggacaccaacaatcctagcagcagtagcagtacagggagtagtggtaacaacgggttgggattcgagctgcaaagcacaagctcccttttggagaccaacatattcccatggtcagatttagcaccagaaaaggatagccaagcacaactagaggaagaactcaagtggcctgacttgctccatggaacgttctcagagatgccagcgcccatgcagaaccttagccagtcactgtatgaagacgttgtcaaagcagagagccaattcaacatggaggggctctgtgcagcttggtctcaaaacctgctgccacagcaacatcttccagtagtatcagatatgtatgacaaggatttgcaaaggatgtccttgtcttttgagaatatctaggaaccatgttccagcatgcagggaacagagcaccacatgaaaattgagagttgaaagcttaggaagcacaatgtttcttcagagatacgtttacagtgtactcagttgtttgtggataaattattgtgagtgttcacatagatgcattcttttggtaagacatgaatgaacatcaaagagcaattcttcagttgaaagaaaatgtagtgcagtgggaaaaaagagacgagttgggtttaagttgcagaaaaatgtatagaaatgttccggagtttaccttgtttcctttgaaaaaattattgtcttcatttatacaagcaagtagatcgacttttttgtattcttgagtttccgcatgctcctttcttatcaataaatactaagaggcatgggaaaaccacatgtgtcggcagtacttagaaaccataaacctcgtgccg

SEQ ID NO: 21843 - DNA, 1290 bp, Oryza sativa
  Clone ID: TF_OsC52992_1
cttcgtttcgaacaaatgatcacacatatcaaggcataaatcatcataggtagagaccaggagttcttcacaagagttggtctggatgtagctgttctcatccatggtgagtattccctgggtgaccatttggttggatgggttggaatctggcctgatcttaccattcacctctgctaacttttgtgtggatgctggtgaagacgatgacactgcagtagattctggtggagcttgacgaacacttgacttgattggaccaattccaaggctcttgatgtagttttgcagaagggttccagatttggggttcttggagctagcgcggctcctcctccgtgcgaattgccttctctttgttgcattccagtgattcttgatggagttttctgttctaccaggcaggtgcttagctatctctgcccatttgttgcccacttctttgtgtgtttggattagaactatgtcttcctcttcactccatgtatctttcttgatgttaggcctcaaatggttgtgccatctttctctgcactgtttgccaactcttccaggaagaatttgagcaatgtgagaccacttccttagtccaaactgttcgactaatttcacaagcttcctgtcttcttccaatgtccactggcctttgacaacattagccttcttcagagacttacccgaagccgaaacctcagatttaggtgtgaagagaggcaggtgaggcgaagctttacgaatagtcggcgaagcccgatcgacgacgacagcatccttttctcctccttgagggtagtactcatggccaagatcatagtaggttgcaaagggaagaaaagatccaccagcagatggagaatagtattcatggccgtcagtgacattgttgaatggatgatcaacaagatggagctcctgatggccattttgctgcctgttgaagtaggccttcttgttgacactgttgtcatgaatcctccctttgggacaagcagaaaaggagctgacatggaattcatttctatgggcatgaaggtgagggcactgggcagcagttgccatcatacacatgactgagattagtttatgtgggcttttggtccacttgtggtggtgggctttggtcgcgtggcatctttagcccacatggtgaagcaacggcccgactaagatttggaagttggaacccatcgtccattgcgcatggtccacatttgactgctgttcttgtgaacttgtatatacgtgcatgtatgtacgaacaaaaccaaactcttactgtatttgcgaatg

SEQ ID NO: 21844 - DNA, 966 bp, Oryza sativa; identical to SEQ ID NO: 12380
  Clone ID: TF_OsC134_57

SEQ ID NO: 21845 - DNA, 1178 bp, Oryza sativa
  Clone ID: TF_OsC351_4
ccgccgcggctcacctggaaactgggcagattggacaatcgctcgagcgagctagcgagagagagcgcgagagagcgaggcggcgcgcgcggtggttgcggatttgtagcttagagcgcggggccatggggaggtcgccgtgctgcgagaaggcgcacacgaacaagggggcgtggacgaaggaggaggaccagcggctcatcgcgtacatcagggcgcatggcgaaggctgctggcgctcgctgcccaaggcggcgggcctccttcgctgcggcaagagctgccgcctccggtggatgaactacctccgccccgacctcaagcgcggcaacttcaccgacgacgaggacgagctcatcatccgcctccacagcctcctcggcaacaagtggtctctgatcgccgggcagctgccggggaggacggacaacgagatcaagaactactggaacacgcacatcaagcgcaagctcctcgcccgcggcatcgacccgcagacgcaccgcccgctgctcagcggcggtgacggcatcgcggcgagcaacaaggcggcaccaccgccgccgcatcccatatccgtcccggcgaaggcggcggccgcggcgatcttcgccgtggcgaagccgccgccgccgccgcgcccggtcgactcctcggacgacggctgccgcagcagcagcggcacaacgagcacgggggagccacgcgtccgcgacctcaacctcgagctctcggtcgggccgacgccgagctcgccgccggcggagacgcccaccagcgcgcggccggtctgcctctgctaccacctcggcttccgcggcggggaggcgtgcagctgtcaggctgacagcaagggcccacacgagtttagatatttcaggccgttggaacaaggccagtacatatgagatatgaccatgagatgtgagatggcttaatcagcttcaattcccaacatgtgtaacacagggagtttttctagtggacgacaatactgtttaatttcagaaaaaaaagggaaagaaaaaggttctaatctgttcatatttcttactattatccaatcttcatgatctcaatctctctctctctttattatttttctttgtagtaattaacttcatgttggttcctctaaaaaagattggtcgatgttattcagtgataaatattcctag

SEQ ID NO: 21846 - DNA, 1966 bp, Oryza sativa
  Clone ID: TF_OsC159752_1
ccatcaggttgtctcgaaaaagattggagtttttggtggtttgggttgtgcggttcttgcttttgttggcgcaagcgcatggctggttctgggacatagtgagctgagatagagttcttgtgttcggtggagtttggctttggtgaatcttcgattcaagtctggagatggcgcgttttcaggaaaccaaggcgaggaatgatcaaggacctgttgctgatcatgttgggcaccaaaacctcatggaaaacctcacagatcctctggattccagtggcatggacatgatggacgaagcgcgaattcctaaggcgcggaagccatacacgataacgaagcaaagggagaaatggaccgaggacgaacataagctgttcttggaagccctgcagctccatggccgagcctggcgacgcatccaagagcacataggcaccaagactgccgtgcagatcaggagccacgcacagaagttcttctccaaggtcatcaaagaatcatctggggacaattgcaacagcttgggtgctgcatcatcaattcagattcccccgccgcggccgaagcgtaagcctgttcatccgtacccacgcaatctagggagcacagccagcaagaacgtccctgcactgaaacagctagagaagcctcagctgcaggtgcagtctctctacgaccaggacaatgggtcgccgacgtcagtgttaacagtaccacagatacgggctgatacactgggaagtgagagtggtgggtcgccaacctcgacgattgatattgaagagagatgtcctacaccaagcatagcaactgctgagttagctatggagttgcctcctacaaatgacgaggaggtcaagggcaatggcgatcatgaagaagttacatgtgacagatcaggagttccagtccttaggctatttggcaagagggttatggtgaatgatttacatcagatgtcagcccctgatgccgggaacctgcaaactgtggcagacatggaagtggacgcttcagctgagacaccaactagtggaactgggaaattctcttcccatggtgcagcagaagcaaatacatggaacccatggctgactaacacacagcagtttctgtattatcttcctaacggacaaattttctccgtgcattctgctctcccatgcttcacctaccataatgagggtgttacttgcacccagttttcaaacccacaggtggtagcctcagatcaacagcatcaacaccaaacttctgaagctgtagattacaagggtatacagagggaaggatcttggacggagtcaaatacatcctcaagcagtgtgcctgaaacagcaactcataattcagagactacagaatcatatagaaacggaaacagaaacgaagatgaaatggtaccttctccagattcaagaaaatgtgtgagcccaggttccaactgcaggcgaggctttgtgccgtacaagagatgtgttgctgatagtgaggcgctgctgaagtcacaggcgcctcaggaggaggcagacggagagatgacgaggctgtgcttataaatttttggagcctcgtagatcactgcaactatagatgcttgctactaatattttgttcacagatgagtaggaactgatgtactgcaggaggggctgctttcctgttacaagaggcagattgaaaccgcgttagtactccacaaaacagggagtggccgtggttcttgtctggccatgtacagttcaaatattctatgtttccattttcctcgtcgtgtgtttgtaatttcgctcccattgcgggagcgttcagaggtcaatggctgtcatgcaatgacaagtattttgatagagttgtagaagggttgtactgatgtaaattatacagtaacttattatctgtaagacaataacaggcgagctaaagaaaacaacgttggaaagctttgttcaaaaaaaaaaaaaaa

SEQ ID NO: 21847 - DNA, 1926 bp, Oryza sativa; identical to SEQ ID NO: 12358
  Clone ID: TF_OsC150867_1

SEQ ID NO: 21848 - DNA, 1141 bp, Oryza sativa
  Clone ID: TF_OsC833_1
gcacgaggctctcactctccaccaccaaactctcctcctctcttgcaacatcaaactcatccatccatccatcgatctgagaaatccagctttccagttcttggatctccatcgaccatggtgaggccgccgtgctgcgacaaggacggcgtcaagaagggcccgtggacgccggaggaggacctcgtcctcgtctcctacgtccaggagcacggccccggcaactggcgcgccgtcccgaccagaacagggctgatgcggtgcagcaagagctgtaggctccggtggaccaactacctgaggcccgggatcaagcggggaaacttcaccgaccaggaggagaagctcatcgtccacctccaggcgctcctcggcaaccgctgggcggccatcgcgtcgtacctccccgagcgcacggacaacgacatcaagaactactggaacacccacctcaagcgcaagctcaagaagatgagcgccaccggcggcggcggcgacgacggcgagggaggtggcgccggcgaggtgaagaccagggcggctgcgccgaaggggcagtgggagcggcgcctgcagacggacatccacaccgcgcgccaggcgctccgcgacgcgctctcgctggacccctcgccgccggccaagccgctggactcgtcgtcgggcgccacggcgccgccgtcgtcgcaggcggcgacgtcgtacgcatccagcgccgagaacatcgcgcggctcctggagggctggatgcgccccggcggcggcggcggcaagacgacgacgacgccgtcctccgggtcgaggtcgtcggcggcgtcggtgctgtccggggaggccagccacagcggcggcgccacggcgccgacgcccgacggctcgacggtcaccagcaagacgaaggacgaggagaccgccggcgcgccgccgccgccgccgccgccggcgttctccatgctggagagctggctgctcgacgacggcatgggccacggcgaggtggggctcatggacgtggtggtgccattgggggacccgagtgagttcttttagagtggcagcttgctcgacgcggccatggattacaccttctaatccacaccaccaccaaaccatgcaagaatcgtagcgtaagcgagagtga

SEQ ID NO: 21849 - DNA, 492 bp, Oryza sativa
  Clone ID: TF_jC-osflLIB3479001e05b1
cccacgcgtccggaagacgtctggactgaggagggacgacaggatgctgatcgaagcacacaggacttatgggaaccgttggtcagtaatcgcaagatgcctccctggccggtcggagaatgctgtcaagaaccattggaacgcgactaagcggagcctgaagtcaaagcgtcggatgaagaagaaaagcgtgcaagtggtgaattcaccgccggggcagctctccccccttgaagagtacatccgcagccagtacccgtcggccgttgagaccacaccgccgccaccggccgtgcctgcaccgccttccgacgtcattgtgcacggtgccggatcggtcagcgcaggtccaaccgttgccacacaggagcccaccggcaccaacccatcggaaatggggatctaccttggcctgggtaacccggctggaccgaccacccagcagctagcggcgatgaacctgaacatgtcactggcgccggacctcaacgc

SEQ ID NO: 21850 - DNA, 1077 bp, Oryza sativa
  Clone ID: TF_OsC1123_3
atgcagcgagagtgcatcgtgtcgggaccgatcgacgggtcgatctctgcgacgggcgacggcgcgcgtcgaggcgttggcggcatgcgcggtcatcgctcacgcgtccgcggggaccgtggcctgcggatgcacaggagcggcagcgatcctgattctgacaaggcgcactggtatatgagcaatagcgatgacgagtcatttgttgataaagataaagattgcagaaggggcaccgtagccccgctgctgaagaaaggcccatggacatcatgggagaactccatcttagagaagtacattaagaagcatggtgaaaggaattggaagcttgtgcagaagaacactggcctcttgagtttttgcatcacaaggcgtactgataatgaaataaagaactactggaacactcgaataaagaaatgcaagaacaatcgttggcttttatatcctgctaatgtatgcaacgatgctttgaatgaagatcaatatgggtctgttgaccccagtgttagggagaagctaaccaataatcaactagaagatactactagtatgtattctgcaccccagttttcatatgcttccatcagtaatatacttgataggagacttgcatcaaaagattatgactccatagaagatcaaagaaaccgaatagaagttgcagcagaatatgagatttcacttcctgtgttgaaaacaaccaacaatgacatatttccatcagcctctatctttgccaaccatggcatttcaaatggcaatctctctgctttgtccacaactgatgctttgcagatggagctccctttaatccaatttgatccaaacaaccagttcatttactcaagggattatgcgacgcacctaacaaacttagctttattaaatgatcaagcagaagaattactaaatcatattgatgtattgaactatgtggtgatgaaaaaagagctttctggagggagtttgagtcccactattaatatgccatgtaaagcaacggcatattcttcagaactccctttatgcaagggatatcgggaacaagatcttgatttttacacacaatag

SEQ ID NO: 21851 - DNA, 603 bp, Oryza sativa; identical to SEQ ID NO: 12361
  Clone ID: TF_OsC352864_1

SEQ ID NO: 21852 - DNA, 1640 bp, Oryza sativa
  Clone ID: TF_OsC1123_1
gttgccgcacatatactcgtgctcgcgctcacgccgccgcccccgaaactccccgctccgccattgccgggggaggcgatctcccatctccatctcccatctcgcctcagcgaactccccttcacatcgcgtctcttccgtcgcagagagtggcggccggtgaccatttccggtgggagggcggaggttttgtcccggctccggcgacactccacactccgacagcccaccgctccgtcaccctgcatttttggtcaggatgcacgagagcgacagcggtcctgattctgacaggacacactggtatatgagcaatagcgatgacgagtcatttgttgataaagataaagattgcagaaggagcaccgtagccctgctgttgaagaaaggtccatggacatcttgggaggactccatcttagagaagtacatcaagaagcatggtgaaaggaactggaagcttgtgcagaagaacactggcctcttgaggtgtggcaagagttgccgtcttcggtggatgaaccatctgaggcctaacctaaagaagggggctttcagcaaggaagaagagaataaaattattaatcttcatcgcaaaatggggaataagtggtctcggatggctgctgatttgccagggcgtactgataatgaaataaagaactactggaacactcgaataaagaaatgcaagaacaatcgttcgcctttgtatcctgctaatgtatgcaacgatgctttgaatgaagatcaacatgagtctgctgaccccaacgttagggagaagctgaccaataatcatctagaagatactactagtatgtattctgcacccccaggttttcaggatgcttccatcagtaatatacttgataggagacttgcatcaaaagattatgactccatagaagatcaaagaaaccaaatagaagttgtagcaaaatatgagattccacttcctgtgttgaaaacaacgaacaatgacatatttccatcagcctctatctttgccaaccatggtatttcaaatggcaatctctctgctttgtccacaactgatgctttgcagatggagctccctttaatccaatttgatccaaacaaccagttcgtttactcaagggcttatgcgatgcacctaacaaactttgctttattaaatgatcaatcagaagaattactaaatgatactgatgtattgaactatgtggtgatgaaagaagagctttctggagggagtttgagtcctactattaatatgccatgtgaagcacataactccatggctgcctctaatgagctggtagtgccacaatatgaaggagatgctccacctcttcaagatgatttcacatcatatttctatttgaatgatactaatctatccatattcgaagacacaaatgaattgtttttggaaaacaagttggatactaaaggtaactgacgccagattgtcatgagttgctgctctcttggataaactcatcatgaaaccaagaattttattccatgaagctcgtgaacgagccagtcgttgctatctctcttattaggatttccagtttggatattgccgtactcctttacttttcttcatgtcgaaattaccatgcgtgctatgttgaatttcatctgct

SEQ ID NO: 21853 - DNA, 1708 bp, Oryza sativa
  unsure (1)..(1708): unsure at all n locations
  Clone ID: TF_OsC26573_1
ctacatgtgaatattttgatgtgacgtgaagagaaaaattaatcttggtttttggttgttgtcatgcaccccgggctgcaggaatccggcacgaggcagcacacatccatccatccatccatctatccagagagcacagcaacggctcatatatagtacccctctaccaaagcacaacaaccagaatctcctgagctcgatctagctactagcttgatctatccgatcaatcgactggcccgcgaggatcgatcgagactcgaaagggagggattttgatccggatcggtcgacgatggacatggcgcacgagagggacgcgagcagcgaggaggaggtgatgggcggcgacctgcgtcgcgggccgtggacggtggaggaggacctcctgctcgtcaactacatcgccgcgcacggcgagggccgctggaactcgctcgcccgatcagcagggctgaaacgcacaggcaagagctgccggctccggtggctgaactacctccgccccgacctccggcgaggcaacatcacgccgcaggagcagctgctcatcctggagctgcactcgcggtggggaaaccgctggtccaagatcgcgcagcacctcccgggacgcaccgacaacgagatcaagaactactggcgcacgcgggtgcagaagcacgccaagcagctcaagtgcgacgtcaacagccagcagttcaaggacgtcatgcgctacctctggatgccccgcctcgtcgagcgcatccaggccgccgccgccgggcagcagcagcagcaggaaggcggcaccgacacgccgcccctgtcgtggcagcacggcggctccgacgggctctacgagtcgccggagctcccggcgcccgatgccagctgctggccagccgagtactgcgcggcggccggcggcgcgcagtcgggcggcacgcctgcaccggagctgtcgagcaccacggccgggtcgtcgtcgctgtccacggactccggcgccggggcgcagcccagctggcccacgcaggccgacggcgccgagtggttcaccaccgcctgcgacgcctccagcgccaccggcggcgtggccatgcgcgacacggagctggagctggcccagccgccgtgccagggcgggcagacgtggacgacgtccgagtcgtcgctgcctggcctcaccttccccgacctcgccgtcgcggacttcgagatcggcggcttcgacgtcgatagcttctggacgagcatggaggacgaccagctgtggtgccccacccaggccgccgtgtgaaaagtcagcacggccgccatgggaatccgccgcggcgagcgagcgcgcgcgcgcgcgacacccgcgggtgcacaaccgccggggacgcgtagcggagcggagaagcggattagaagaaggagagaagctatctgggggattagaacaagattaatcgcctccccgatgccatttttggactcctagctcccagactattctagctccagttcttttccgtttcctttctccttnttttacttcctagggtaaaaaaacagaagttaaagtgtagccgttatactagtgttgacgctgctgttactaaagtttgtccgttcaattttactcattctttttgagtaaatacagtactggcactactgtatgtacgagctgaactctgtaggattgacaggattactgtacacttctagaaaccgg

SEQ ID NO: 21854 - DNA, 179 bp, Oryza sativa
  Clone ID: TF_2943794
gggaagtcgtgcaggctgcggtggctgaactacctccggcccaacatcaggcgcggcaacatctcctacgacgaggaggatctcatcatccgcctccacaggctcctcggcaacaggtggtcgctgattgcaggcaggctgcccggccgcaccgacaactcaatcaaaaactattggaa

SEQ ID NO: 21855 - DNA, 1077 bp, Oryza sativa; identical to SEQ ID NO: 12371
  Clone ID: TF_OsC344488_1

SEQ ID NO: 21856 - DNA, 1481 bp, Oryza sativa
  Clone ID: TF_OsC351_3
ggcacttgtcacgcccccaccccctttgctttgatgcacgcctagctaatcaattaacttaacctgcctcgcctctgcctattcgaaacagcagcggctccagctcgccgtggtcgactttcccggcggcgatcaccggcagcggaggaggagcagtacgtgtgtatatataaaggatggggaggcagccgtgctcggacaagctgggggtgaagagggggccgtggacggcggaggaggacaagaagctgatgagcttcatcctgaccaacggccattgctgctggcgcgccgtgccgaagctcgccgggctgctccgctgcggcaagagctgccgcctccggtggacaaactacctccgccccgacctcaagcgcggcctcctcaccgacgccgaggagcagctcgtcatcgacctccacgccaagctcggcaacagatggtccaagattgctgccaagctaccgggcaggacggacaacgagatcaagaaccactggaacacgcacatcaagaagaagctcatcaagatgggcatcgacccggtgacgcacgagcccctcgaccggaagcaggagagcccggccaccacctcgcagtccaccgtcacggcggagtcgtccaagtccggcgaggcgaccaggcagcaaagccggcagcttgacgacgccgtcgtcagggacatgtccgtgtctgccggtggcgacagcccgccggagtcgagcactaacaccgccagcaccgccggtggcagtagcagcagcagcagtagccatcaccaggaccctctggtgaagtggctgctggaagaggacctgctgcccaccggtgacgagccatggctcaatttcacggccagcaacgacgtcgacgagttcagtagcatcgccgccaccggcgccacgccggcgctgccgtgggacgtcggcatgacgacggactggctgctcgactaccaagattttgggatgggagactcgagcttggtggtcgatgcctccatggtcaacagctcaaatgggtccaacttctagctagaagatgtcagcagcttacttaattgtgttgctatcagtgtagataatcaagtgaagtgtataattaataaaagcatcaagattgtgaaagcagctaggcatggccggccaagatcggagggtgatcacaagtcgaggcctttgctcttcggaaaaccaatcaacggttgggattgatgcatttgagagagggtatgcgtagatggtgcatgttgttgtgtattttccccttgagattgattcgggggtttgtgccattaactagaagtgttattacttctcaaatggagatacttagatctttgttttttttttggagagatagaactatttgttggtgtagtacctatacatgttttcaataaaagatgtgggtgggtaatgtccaataatattagctcactagtttgtgtatatatacaatggtgtatgtgctgctaaaaa

SEQ ID NO: 21857 - DNA, 1301 bp, Oryza sativa
  Clone ID: TF_OsC490_2
cttctctctctctctctctctctacaacttctcagctaagctaagccaagctagagccatctagctacttttgctgctttctctctcctcctgcaacacacgacctagctgagagctgagctgagttgcgccggccatggcagcatcgcagaggagcaggagcacggcggcgcagctcgacgtcgacgaccaggcggcggccgatcagctgatgacgatgatgcggcggccagcggcggtactacaggatgaggccgccgccgaggaggaggcctccgcggcggcagcggacctgcagctggagctccggcgagggccgtggaccgtcgacgaggacctcaccctcgtcaactacatcgccgaccacggcgagggacgctggaactccctcgcccgcgccgccgggttgaagaggacggggaagagctgcaggctgcggtggctgaactacctccggcccgacgtgaagcgcggcaacttcaccgccgacgagcagctgctcatcctcgacctccactcccgatggggcaaccggtggtcaaagatagcgcagcatttgccagggaggaccgacaacgagatcaagaactactggaggacccgagtgcaaaagcatgccaagcagctgaactgcgatgccaacagtgctaggttcaaggatgctatgagatatctatggatgcctcgcctcgccgatgcaagccagctcggtgatcaccatgggtataatagtaccactgccatgggcgatgctcatgggatgccagtgatgacatcgtcgtcgtcggactcgttcgcgacatcagagtcatacgatgggggcctttatgcaaatgtgcaggacaatgagatggtgaatggtggggactactggatgcagggagcaaataaagggttttgtagtaattatgagtcagagcaacttcatcctcatgagcatagccagtttcaggatccagatcttgttggttgggttcagggcttttctgagggcatttccgagaatttttggagcttggaggacatttggaagatgtagtgaattttgcattaatttgtattgtggctatatatacacatacgtacaggagtatacattttataatattgattgataactcgtggaacaaagattagagtcagcttattctaacttcaaaagttactacgagagaaaaaaagtaaatttcttctttgattttcctttttttttgtatggatgtcgattgacacatatgtatatgttgtcccaacaatgtaaaacatataagaagacgtgattgttactacaacttttgggc

SEQ ID NO: 21858 - DNA, 1314 bp, Oryza sativa
  Clone ID: TF_OsC42685_1
atggagaacaaagatacaacagaaaaggccagattactcagtggtgctctgagcaaagaaggctcgtctggtacttcaaatgaaggaaagaaaattcaagcaaacggcgtggatggttccaaagcaaaatccacctcttcaggtgagaaggtcacgcaaggcaatacactaagcaactatgagaagaaagaagagaaaccatggggaagggaagagatcgagttgcttaggaaagcaatacaaaagtatccaaagggaacctcccggaggtgggaggttgtctctgagtttattggaactggaagatctgttgaagaaattctgaaggctacaaagactgttcttttgcagaaaccggactctaccaaagcttttgactctttccttgagaaacgcaagccagcaccgtccattgcatcacctctttctgtaagaactgaaacagttggtttgcctactgagaaagcagctggaaatgcatcatccaaagcgcctgcacaacatgcaagcagtaaaacatccgacgagaaagctgctgctcctgctcctgctcctgtatcaaatggaacaccttctggaacagcagatccagaggcttggtcagaggcgcaagtgctggctcttgtacaagctttgaaggcatttcctaaggatgcaagccaaagatgggagcgtgtggctgccgctgtcccaggtaaaaccatggtgcagtgcaagaaaaaggttgcagagatgcaaaagaatttccggagcaagaaaagcgctgagtagaacaacatagtaccggcacaagtactttttgtggctagtggctgacaaaagcttctgtttgaacatcagtatcccttatatgttagagaatcatagctgcgtactcctgatgaattttgccagcatatcacggcctccagtggtagcaataattttggtttggagctctgtgagaactcgcattgggccttaaccggtgtcggcattctgcttacacaagttttttggtctaccaagaaagaagctgatctgctgttgttgatagctaatgttttggccttccccaacattaggtggactttctgctgacccttgggttgtttatgttcgagagccccttgaagagtattatttccttgcattggtggagtgatatgatctggtctggcacgacacagggagtgtagagaacagcatcggcatttatttatcaacttataagatagaaatatttgttacaacttgagaacttgctatatcaagaaaccatatttttgcctaatcagattcattattcatgtccaaaaaaaaaaaaaaaaaaaa

SEQ ID NO: 21859 - DNA, 1523 bp, Oryza sativa
  Clone ID: TF_OsC57946_1
atgtccgcgtctgcatccgctgcctgtctccttcctccccgaggaggaagcctggcccgacccgacaccgcactccccccagccagccagccagccactgtcgcggtgaaccaaaatatcccccgcctcgcctcgcctcgcctcgcggtaacatccatcacactcctcccccgccgcggccgccgctgcgcggtagatctcctcctcctccacctccaccgtctcctgctcttcctctctctcttctcggaggaaacccccaatttattccttccccgcaaacccgcagccttcctaaaacgaattaaatctccctcccttatccgccgctgcaatccctccccacaaaatctcgctgcgccgcgcgctgttttagggtttgagctcatggcggtggaggaggcgagcagcagcagtggcggcggtcgtggtgggggtggcggtgggggtggggaggaggggttgtccggttgcggcggtgggtggacgcgcgagcaggagaaggcgttcgagaacgcgctggcgacggtgggggatgacgaggaggaaggggacgggttgtgggagaagctagcggaggccgtggaggggaagacggccgacgaggtgaggcggcactacgagctgctggtggaggacgtcgacggcatcgaggccgggcgggtgccgctcctggtgtacgccggcgacgggggcgtcgaggagggctctgcgggaggtgggaagaaggggggtggtgggggaggaggtggaggtggaggggggcatggggagaaggggtcggctaagtccgctgagcaggagcgccggaaggggatcgcctggacggaggacgagcacaggctgttccttcttggacttgagaagtacggcaaaggcgactggaggagtatctcaagaaactttgtgatctcaaggacacccacccaagtagctagtcatgcacagaagtattttattcgcctgaactcaatgaacagagagaggcggcgatcaagtatacatgacataaccagcgtgaacaatggagatacatctgctgctcaggggccaatcacaggtcagccaaatggcccatcagcaaatcctggaaaatcctctaagcagtctctacagccagcaaatgcgcctccaggcgtcgatgcttatggtacgacaattggacagccagttggtggtcctcttgtgtccgcagttggcactcctgttacacttcctgttcctgctgcacctcatatagcctatggcatgcatgcccctgtccctggagctgtagtccctggtgccccagtaaacatgcctccaatgccctaccccatgccgccaccaacatctcatggatgagggctttgaatactacagttcttctagacaaactcataatatctgtcttgtttagagtttcaatgcatgctgttatgtctcaataaagcaatatcaataaactcttgtacattacaaatggttattgaatgtagcattttgaggccatcctggactgtaaaaaaaaaaaaaaaaaaaaa

SEQ ID NO: 21860 - DNA, 619 bp, Oryza sativa
  Clone ID: TF_LIB4506-019-R1-K1-H12
cccgcgtccgcttctctgtctctactctctctacaactcctgagctaagctaagccaagctagagccatttacctacttttgctgctttctgtctcctcctgcgacacacgacctagctgagagctgagctgagctgcgccgggcatggcagcatcgcagaggagcaggagcacggaggcgcagctcgacgtcgacgaccaggcgggggacgatcagctgaagacgatgatgcggcagggccgcggcgggactacaggatgaggccgccgccgaggaggaggcctacgcggcggtagcggacctgcagctggagctccggcgagggccggggaccgtagacgaggacctcaccctcgtgaactacatcgcacgaccacggcgagggacgctggaactccctcgcccgcgccgccggcaatataatcaaatcaagttgtagtcaatcagattcgatgtcgatgtgaggcgaattatatatggaatcgatgaaaatagagatgatgatcgtgatcgatcgatcgatgaaggcgtgaagaggacggggaagagctgcaggctgcggtggctgaactacctacggtccgacgtgaaacgcggtaacttcaccgccgacgagca

SEQ ID NO: 21861 - DNA, 795 bp, Oryza sativa; identical to SEQ ID NO: 12409
  Clone ID: TF_OsC199642_1

SEQ ID NO: 21862 - DNA, 999 bp, Oryza sativa
  Clone ID: TF_OsC134_84
ccacgcgtccgccgcctgctcgctccgcgcctctctctccccgctcgcgtcctcgctctgcgcctcctctcctcgcgacggtccaccgccggaccagcgacctcgcctcctcgctccgcctcaatgccggaccagcgccgaggcactaccgcactgctgcccacggccaggcacggtccagccgcctctgaccggcaccacagcgcctccgctgctcgcagggacgccgccgctacccgcccggctacctccgttgccgccgccaacacgctagtctcctcctccctgatcgagatcgagtcgacacatacaccaccaaccaccggccggccgccgcgcaccggcgagcaggatggggaggccgccgtgctgcgacaaggttgggtgaagaaggggccatggacgccggaggaggacctgatgctggcctcctacatccaggagcacggctccggcaactggcgcgccgtgccgaccaacaccggggtgatgcgttgcagcaagagctgccggctccggtggacgaactacctccggccggggatcaagcgggggaacttcactgagcaggaggagaagctcatcgtccacctccaggctctcctcggcaaccggagggatcatatggaggtgatttcaccaatgaaagatggaacatttattgattgggatattgttgacaatatatggaatcatgctttcagcttttatcctgaggagcatcctatgttgatagttgaaccatctacaaacacagggcagcaaagagagaagtatctattgactttaaagatcatgaaggcattatgcatatatcaaggctttgacatggtcttcgtgcaagaataaaatgccattttgtgttcgccaacaagagttatttatttttaatcaacaattgtgtgtcttacttcaaggtcactgatctaatggtttagtcttgcacctgtcacttgcttataatgttgtaaccccgctcctgtcacttgatagtatttc

SEQ ID NO: 21863 - DNA, 1134 bp, Oryza sativa; identical to SEQ ID NO: 12385
  Clone ID: TF_OsC419061_1

SEQ ID NO: 21864 - DNA, 1040 bp, Oryza sativa
  Clone ID: TF_OsC149302_1
actattaaatcttagcttgtactattgtcgtagctttctgaagtatcagaattcagaacctcacagagtgcagaagagcatctttttaacctcgccaaaaaagttctctcacgaacaaaaagcgagatcaagtatctgaaacatccgcctctacaagcaagtatagagacatcgttgacgatttctgtatcttgtatcttctctctataggctatagtgctattatattcgctagctagttgctgccgcgcgcgcggttaattggtttgcgtggcgcgcgtcacaccacgtctgaaaccggcatcgtctcccagaagttgtccacgaagttccagaagccgtcattgaaaccgaactcagtcgggacgaactgcgcggcggcggcggcggcgacctcgcccacgccggccatttcgaggtggtggtcggcggcgaaggagacaagctccgggtgagggaagctgctcgcctgcatgtactcatcccagacgccggggctggcctggctctggccgctcgacgccgacgtcgacgccgcctcgctggtggtggtggacatgcccatgcccatggcgtcctcgcacggctcctgcagcagctggctcctgccgcgcggcttcctgtgtatcttggtcctccagtagttcttgatctcgttgtcggtccggccggggaggtgcttggcgatcttggaccacctgttcccccaccgggagtggagctcccggatgaccatgtcctcctccggcgtgatgctgccccgccgcacaccgggcctcaggtagttgagccaccgcagcctgcagctcttcccgttccggttcagcccggcagagcgcgcgaggttgtcccaggatccttcgccgttttgcgagatgtagctgacgaggatgaggtcctcctccagcgtccacgggcccttgcgcaccgccggctcgccggcgcggccgcacatcctggtggccatcgaatagctagcgtgccgcgaggaacagagagcagagcagagcagagacgggtgagggggcggtggatttgct

SEQ ID NO: 21865 - DNA, 5911 bp, Oryza sativa
  Clone ID: TF_OsC351_1
ctgccccggcgggacgcccacgaggcaccagaagaaaggaaaaactcaagaacgctcactcgccctcatgggcaggtgaccgaggtgccaaaagccccacaccaagaagggaacatggccgcagggggaagaggagcggtacagtgcgtacatcaaggcgcacagcgaagcgtgctggggatcgcggggcccaggccgccggccccccgccgcgctgccaggagccagcagctgccgctggctcaagatgcaccaggcctgtcctcaggtgcggcaactcacgccgagcggcgagaagagctggccctccagcctcacagccgttcaggtagcaaaccagctgttgatggtccgggaggatccccctccacgacctgctcagcgacctaaggaccgcgattgcagcgcggctcaccgggggagggacgggacagcgagatcaagtatgtgctggcacacgcacctcaagaagcggctggacccgaagccgtcgtccgaccgggaaaccgtcgccgcccaagcgaaacgcgaccaagaagaccccagcggtgtcggccaagatcgacgttccgaccaccgagccgttgacgctgaagaatgagccctcgaggcactccgacctcagccggcaccgtccgcatcagccccggccgtcgtgccaggaaagtaaggcacgatgactatgaggcgaagccggcgatgatcgtgagggcgcctggagctgcaggcggccagcccgctggcagagcctcctgctttccggcttgcagccctcggcctccagaaggagtgcaagtggcagctggccggcggcgccggcagccggcgccggcaacaacttcctcggcctcagggctggcatgctcgacttcagaagcctccccatgaaatgaaatgatcctgcaaaccaatccatgatcgttacactttctcttctcttttgggttcttgatttcttagctagctttggttactgcttagtgttagtccttcttaattaggatcagatagaggaatacttcctttggggagatgatcagtgatcttgttgatcacttcctccattttgtgtaaatactgttccactcatacttagttcagttgatgatatggttatttaggttgttggatgtaaaaataaacacaatgtgggagatctatggtatttgtcactccttgtcaagaacaaaaaaaaaaacaatcatcaacgccaggagctgttttctcacctgatatgatcggtgaggcagttgctgacaggacaattgaactactgaggctcacgaactcagagactcagtgctggcaagattggcttttatttgctgacatttttttctttctgatgaaaagtggctgtattgattttcttgatttcgtggacaagcttgcatctcgagtaacaaatagtgatcaacagattcttcgcagtaatcatgtcacttggttactcgcacagattatccgcattgagattgtgatgaacacccttagttcggacccaagaagagagcatttgaacagtgatcagcttcagaaaggcaaacagatagatgagtggtggagacaaatgacaaaagcttctggggagaggatgatagattttacgagcttggatgagcgggcgatgggcatgttttgggttctctccttcaccatggcacaaccagcatgtgaagcagtcatgaactggtttacatcagtaggagtagcagatttaattcagggacccaatttgcagccaaatgaaagaatgacaatgatgcgtgaaacttatccactgtctatgtcattgctttctgggttgtctatcaatctatgtttgaaacttgctttccagcttgaagagaccatatttcttggccagaatgttcctagcattgctatagtggaaacctatgttagactgctgcttataacccctcattcattgttccgcccgcattttacgacattaacacaaagatctccatctatcctgagcaaatctggtgtgtctctgctcctacttgagatactgaattacaggctacttcctctatacaggtatcatgggaaaagcaaggcattgatgtatgatgttacaaagataatatcaatgattaaagtcaaacgtggagagcatcgtctttttagattagcagaaaatttgtgcatgaatttgattctctcactaagagacttctttttggtgaaaaaagaattgaagggtccaactgagtttactgaaacacttaaccgcataacgataataagccttgctatcaccatgaagacacgtggaattgctgaggtcgaacatataattcatcttcaaccattattagagcaaattatggcaacgagccagcatacatggtcagagaagactctaagatattttcctccccttattcgagattttttaatggggaggatggataagagaggccaagctatccaagcatggcagcaggctgagacaactgttattaatcaatgtaatcagctactctcaccatctgctgagccaacctatgttatgacatatttaagtcacagtttccctcagcatcgtcaatatctttgtgctggtgcttggatgctgatgaacggacatctagagatcaacagtgcaaatcttgcccgtgttttgagagagttatcacccgaagaagttacagcaaatatttatacaatggttgatgttcttctgcatcatatccaacttgagctgcaaagagggcatcaaattcaggacttactctctaaagcaattacgaatcttgctttctttatctggacacatgagttacttccattggacattcttctgttagctcttattgatagagatgatgatccttatgctttacgccttgtgataaatctccttgaaagaccggaacttcagcaaagaattaaagcattctgcacttcgcgttctccagagcattggctaaaaaatcagcctccaaaaagaatagaacttcagaaagccctcggtaaccatctctcagggaaagaacgttacccccccttttttgatgacattgctgctcgtctgcttctagtcatcccgttgataatttataggcttattgagaacgatgccacagatatcgcagatagagtccttgcagtttattctacctttctggccttccatcctctaaggtttacatttgtgcgtgatattcttgcatatttctatggtcatcttccatccaagttaattgttaggatcctcaacgtgctgggtgttagcactaagacacctttctcagaatcatttgcccagtatctagcgtcatcaaattcatctatttgtccaccaccggaatacttcgccaaccttttgtttggccttgttaataatgtcatacctcctttgagttgcaagtccaaatcaaacccatcggatgctgctggcagtacagcacgcacaacttataacaagccttatacatcttccgctggaggaatcagtaactctgatggtcagagggcattttatcaaaatcaggatcctggatcatatacacagcttgttttggaaacagcagccattgaaattctctcactttgtgtgccagcttctcaaatagtatcctctctagttcaaataatagcacatgtacaagcaatgctcatacagtcaaatagtggtcatggaatgtcaggtggtttgggccaaaactctggggtgccgacttcttcaggtgggggagttgaacctgttggtgccaaccgaccaaacaccacagcaagtggaatcaatgcatctaactttgtttctagaagtggctattcctgccaacaattgtctgttctgatgattcaagcttgtggtctgttgctggcacaactcccaccagaattccacacacttctatatgcagaagcagcccggatcataaaagattgttggtggcttgctgatagttcaaggcctgttaaagagcttgattctgctgttgggtatgcactgttggatcctacttgggcttctcaagacaatacatctacagccataggtaacatcgttgcccttcttcactcgtttttcagcaatcttccacatgaatggcttgaatctacccataccgtcatcaagcatcttcggccagtcaactcagttgccatgttaagaattgctttccgcatattgggtcccttgttgcctcgtctagcctttgctcgacctctgttcatgaagaccttggctttgctgttcaatgtgttgggggatgtatttgggaagaattctcaggcttcacctcctgtggaggcatcggaaattgctgacataattgacttcttgcaccatgcagtcatgtatgagggtcaaggaggtcccgttcagagcactagcaagcccaaactagagatattgacgttatgtgggaaagaatgcgcggcaatcagtggagtgatgctattagacaagcagttggttgatggtcagagtcaggcctcgccatccatgttactacctccgcattcttgcactgcagactactgtagacagtactacatcgagggtgagcgagctgtgacacaactgctcaaggacgtggatcctctgcagactgcagtggtactgacactacgcagacaacgcccccgtcgagagctcagtccagattacacgtgtacgcgtaacagcattttggaggcctggagggccaggaggctcgcagccgatgtcagtgacggcctgacgccgtcacgcctacgactcgcctcggcctttccacttctggccgcatctattaatccccgagcagcgccggaacctctccaaattaagactcgggtgagctcatcaggctcagttcatccctctcgtgagatacagatagcctcgcaaatcagggatcagcgtgtgatgggcaggcagccgtgctgcgagaaggttggcctgaagaaggggccatggacggccgacgaggaccagaagctggtcaccttcctcctctccaatggccactgctgctggaggctcgtccccaagctcgcagggctgctcaggtgtgggaagagctgccggctgaggtggacgaactacctgcggcccgacctcaagaggggcctcctttccgaagaggaggagaagctggtcattgacctccacgagcagctcggcaacagatggtccaagattgcggcacggctccccgggaggacggacaacgagatcaagaaccactggaacacccacatcaagaagaagctcaagaagatgggccttgatcccgtcactcaccggccggtgatgtcactcgctcagcctgatcccctgaagcagcagcagcagcagcatgaaccgtccgtctccggcggcaccggtgccgacgacaaggaggaggaggaggaggagacgccgacgagcgcccagccacagggcgtcgcttgcgctgcttcatccgcctccgccgtgtcgtcgtcatgctcctcgtccgcctcggcctccgccgcgacacccggcgcggacgtggactggcccggcctcttcgaggtggatgccattcttgacattgactgggctggcttattgtctgcctgcggcgacgatggcggctgcagcgccattggcgtcgatatgttgttcgaccaatgctctgacgttggctttgatcaagatgtgtggatgtgatcctgatcctgacaggagagtttacgtccgtgagtagaattagattggccgtgaagttgagattcatatcttcttctttcactcttctttgttttcctatattgaattcgtccatgacaagcatgcatatttgttgacaatgaagaagagaagaaatggtttggtgtgttttgtgataaaaaatgtagaaagtgttcaagcagttgcagttcacttcatttcggggaatccatcccttatgagcaaacatcaaaaaaaaaaaaaaaaaaaaaa

SEQ ID NO: 21866 - DNA, 943 bp, Oryza sativa
  Clone ID: TF_OsC351_12
cggacttttgggcgctcatctccatcttcctcctccctgcctcgctcctgtgcttcttctcttcatcaacaagagagctatccctggatctgtgtgtgtatatatatagagagagagggactgatctgggtgtagcgagctaggtagcctagctagcatggggaggtccccatgctgcgagaaggcgcacacgaacaagggagcctggacgaaggaggaggaccagcggctcatcgcctacatcaaggccaacggcgagggatgctggaggtcgctccccaaggccgcagggttgctgcggtgcgggaaaagctgccggctgcgatggatcaactacctgagaccggacctcaagcgaggtaatttcaccgaggaggaggacgagttcatcatcaagctccatgagcttctaggcaacaagtggtcactgatcgccgggaggctgccggggaggacggacaacgagatcaagaactactggaacacgcacatcaagcgcaagctcctcgcccgcggcgtcgacccgcagacgcaccgcccgctcaatgccgccgccgaccaccaccagcagcagcagctccaggcgccacggcggttcgccgccgcgccagccggccaccaccaccaccaccctgaccatttcgccgtcctctccaactcgccggaggcctgcagccacagcagcgacgacgagcccagctccgccacgccgccgccgccgccgcgtcacctcggcatcgacctcaacctttccatcagcctagctccttaccagccgcaggatcagaccagcgagccgatgaagcaggaggaggacgacgaagcgtcagcgacggcgaacggcgccggcaatgcagcgatgacgacgacggcgacgacggcggcggtgtgcctgtgcttgaaccgcctcgggctccacggcggcgagcctcggccagagtga

SEQ ID NO: 21867 - DNA, 600 bp, Oryza sativa
  Clone ID: TF_18698673
gccaacgcgaagctctcgtcgcgcacaaccaactcgacaccgcggcgaggccaaccaacgcgcggcgtgggcatggggaggtcgccatgctgcgagaaggcgcacacgaacaagggggcgtggacgaaggaggaggaccagcggctgatcgcctacatcaaggcgcacggcgagggttgctggcggtcgctgcccaaggcggcggggctcctccgctgcggcaagagctgccgcctccgctggatgaactacctccgccccgacctcaagcgcggcaacttcaccgacgacgacgacgagctcatcatcaagctccacgcccttctcggcaacaagtggtcgttgattgcggggcagctgccgggaggacggacacgagatcaagaactactggaacacgcacatcaagcgcaagctctgagccggggcattgacccgcagacgcaccggccggtcacgccggaacacgcccccccgggaaaacgggcttacacgacggcaacaccgcgcttttcgtccttggcccggggccgccgccgaagaagacaggctaaaacccgggcacgcccgggggccaacattgcagctttccaggtccgg

SEQ ID NO: 21868 - DNA, 1334 bp, Oryza sativa
  Clone ID: TF_OsC76_1
tggctttctgtgtcccaatatatctcctgaaaggcagtgtttctctgtctctctctatgtcctctagctagatagatagcacagaggagagagctctagcttagctgctgctgccccggcagctagctacaaattaagaaaaggattaggagcagtgggatttggtagtttggtgcgtgtgtcttgttgcctttagcagcttggagttgaggcaaaaatccaattctgctcaattggactcatggggagggctccatgctgtgacaagaacaacgtcaagaagggaccttggtcgcctgaggaggatgccaagctcaaggagttcatagagaagcatggcaccggcggcaattggattgctctccctcagaaagcaggattgaggagatgtggcaaaagttgtaggcttagatggctaaattacctgaggcccaatattaagcatggagagttcacagagcatgaagacaggatcatctgcaacatgtttgccagtattgggagcaggtggtctataatcgcgtcgcagctccccggcagaacggacaacgacatcaaaaactactggaacaccaagctcaagaagaagctcctcggctcgagcgccgtcgccgccgccgcgccgccacggatacagcgtcatcagcagagccaccaccggtcgtctctcctcctgccgaactcgccgtcgctcaatcccggcggcggctacccaggcttcttctccggcgccggcggcttccatcctcaggaaccagctatgccgttaaccctaccgaccaccacccaggaattcatgctgggcactcactctggccttccaatggtgagcgcctctgcgctgctcaaccatctgcacggcgcatcacatcatcatcagctgcttgtgaaggaggagatcagcagcaacatgatcgtgttcggctccgaccagcagagctgcagctcgtcagatgggctggcggcgccacacagccacaaccaccatggcaacagggagttcatccttgatggctacagctatggcgtcggctacggcagcagctgcatcgatcaggtcgacaacgacaagctgttccagcatcatcatcagcaggatcaggcacaagaacagcagcagcagctggtgtacaactacgacgagatcaagcagctgctgatgaacacatcaaccacaagtaatagtattaatgctggtcaggatcatggcggcagcatggaagcagggttgatcggctcacaagggaaggtaaccatgatgtaaattaaactgatcgattaaagaggaggggaaggcagcagctgggcacggcaagattaaggatggattaatt

SEQ ID NO: 21869 - DNA, 1395 bp, Oryza sativa
  Clone ID: TF_OsC16767_1
caaagctccatccgttctgaaggctttgtggccgagttctcctcccccacctcctcctcctcctcctcctctgtagccgagctgaggccaacgcgagtagtgacattctcctgcaatggggtgcaagtcgtgcgagaagcccaggccgaactaccggaagggcctgtggtcaccggaggaggaccagaagctccgcgactacattctccgccatggccacggctgctggagcgcgctccctgcgaatgccgggctccagaggaacgggaagagctgccggctgcggtggatcaactacctgcggccggggctgaagcacggcgtgttctcgccggaggaggaggagacggtgatgagcctccacgccgcgctcggcaacaagtggtctaggatagcacggcatctacctgggagaacagacaacgaggtgaagaactactggaattcttacctgaagaagcgagtggagagcggcggcggcaagacgagccaagggccaccaaccacgcctgcgtcagccgcgagctctcccgccgattcagacgactcgcacagcctgcagcagaagccgcacgagccggccaactccgactcgtcggagccggcgcacgagtcgtcgtcggcgtcggccgactcgagctgcctgacggtgaccacggaccacccgcccgtctcgaggccccacgcggcagtgacacccaaggtcatgttcgcggactggctcgacatggagtacatctgtgggcaggtcgcggcagcacctggtctggacgctgccggattcgcggtggttggtggtgctgcaggcgatcagcagcagcagcagcagcaggtgatgagccaggacggatcggttcatcaggccgatgggccatcgtgcggcgtggacgattcttccctgcagcagcagcagcaggaggggttcggtggcaacggcggctgctgggattttcaggagcagttcgacagcatcgaccagatgcaggcgagcggcggcggcggcggcttctgcgacctgctctccatgagcgacttcgacctctgggccgagctggaacgtaccgcgtgatgggggaacgacgtgctcaaggatcgatttttaattagagcttgttaattcatagatgtcccgtggaaatcaaattaaggggtgtttgtaatactactgcattgtaaattatcgcggtgtatttatagagctgtttaaattagcaacatatataaggaagatcagaggcatgataagtcacttctgtacgaatttatgtttgccactttgctttggagagcatgggcaccgacagaaagatggaaaggaagaaggaaagctgtagagaattgcgcctatggatgcaattattttggtttgtttaatgttgaaaaaaaaaaaaaaaa

SEQ ID NO: 21870 - DNA, 1597 bp, Oryza sativa
  Clone ID: TF_OsC1737_4
cggacgcgtgggcggacgcgtgggcggacgcgtgggcggacgcgtgggcggacgcgagcgcgccgtgcaccgcctctcacaatgtcgaccgccgccgccgccgccgctgcccagagctggtgcttcgccactgtcaccccgcgctcccgcgccacagtcgtcgccagcctcgcctccccatcaccgtcctcctcctcctcctcctccaacagcagcaacctcccggcccccttccgcccccgcctcatccgcaacacccccgtcttcgccgcccccgtcgcccccgccgcgtgatccgggaggccgcgacgaccgccagcgaacggaagggaaaaaaaaaagtcaaaaactagagccgatcgtttgatccattcgatatagggaagatgagtggatgcctctgcctcccccgctataaaaaggccccaaacgggacgccatcgccaccaccaccagcagcagcggccgaagcggaagcagcagcagcagcagcggcgacgaagccgtccatagattcttcttcctccccgtcactcctcaccaacaaccatcccccaccctccaagatggacgccgccgtcgaccgcctcaaggatgggttcgccaagttcaagaccgagttctatgacaagaagccggagctcttcgagccgctcaaggccggtcaagtaaccctgattcaccccaaaaaaggcgccctcggcgacgaactgggctgatcgttctgacggacagtcgagatcttgagctccagatcaggtggctggagttgcagttgcacctgaggctttgccaccatcagagaaggatggattgttcttggttgttcgctgctgctgctgctcactgctggtgatgaacagcttggcgtcagggttaaggatggaggaggcagcagcatggcttctggctgtgccatgctgctgatacccagtgacagtgcagggaatcccatttcagcaggcacagaggctgtctcgtgtctcagtttcagacgttcattcacactcggagccttttctgcatcctcaatcacgtcaaagaggctggatcttctcttcttctgcgtgaggctgctctgcctgaggaaatacttctgggcatggctggccacctgcgtcggtgttcttgtcgtgacgaagtgccgggaaatgccgcgccagtcgcctttcccgagcttctcgagccctaccaggaatttcctgtgctcctcttcagtccatggaacacccttcttcctctcctgagctctcgccatgaggccatcggagaggtacccgttggccatcttctcgccggcctcctccaccgacaccagcgacgacgacgacgacacggtcggcgacgagttggaggcggcggcggcgaccgcggcgtagtacgccggcgacggcgacggcgacggcgacgataggcactccatgctgaagcacttcttcagaggcgcaccgccgacgtgcaactgcaccccgaacaacctcacgccaccggcgccaccgccgccataaccgccgccactctcctgcaggctcctttggccggtgcaagtcctggagttgtggccattgttcccgcagctggagcatttcctggccat

SEQ ID NO: 21871 - DNA, 5437 bp, Oryza sativa
  Clone ID: TF_OsC6483_1
atgtcgtcgtctgctgcccgcccctatcagggcgcctctgcctccgcccacgccgccgcagacgcctcgccgacgtggggggctctcggcgccgccgcctgcacctctgactgcctgcctgactcgacgcctcgcatctcctccgccgcctgttcgacgggtggcggtgaagggaaggcttggacgagtacgtctctgagcgacctgcgacgaccgacgagcgccgccgccgccgccaccgactctgccggggacggtagccccgggataggaggagggaggaggcgctgccgagttggcttcttcgccgcgcacggctattaccgacagggcggcggctcctacgaccgctcctaccccgatgaatcgctcggctacacgccgtcgcgctcagaccggtactggctggacgacgacggtggcggcggcggctataagggtttcagccggtacggtggtggtggtggtggtggcagccggagggacggccgtgacatgcggggttcctaccggaggtcgccctttaggggatacgggagcgacttctccagaaaccaccaagaacacccgcctccgccactgaggaggtcgcccctgagatcagttgctgtaccgatgtcttatgaccctcctggtgatagggctgataggggggatagagaccatcatcaccgtgtgactccttggcggccgctgcgccggagggagagcagatctgatgctgcagacgctgctggggctggacctgtgcctgttggacaggccgctgcagcagcggcctcagagaaggacgtttcagctcggtcctcagccgtcgcggctcctcaggtctctgaggaggaggcaccaaggaagaagcctcggcttggatgggggcaaggtttggccaagtatgagaagcagaaggtgcaaggacctgcagagtctgctgaagctgttgccgaaggcagcccaactgccaccgaacaaaagggaatcacccatacaccagcacctgcgccttgtgtgtccccagtggcggcaccatcacccacgccttgtgcgtccccagtggcggcaccatcacccgcgccttgtgtgtccccagtggcggcaccatcacctgcaccgccatgtaaatcaccagtccctgaagataaatcctgtgaactgacagcaaatacagtcactgaatccaataaaaatatcccaggacctgacgttcaggcttgcaataacgaagtccccactaagttagatcagcttgagggtgatcccattgattcgcttgcaaaggtcctttctgaactggtgcaacatgaagattcctgttctggggattcgaaaagactgtccaatgtcagtaagttattgttactgaaggaaagcattagcaaagagctcgaaaagacagaacttgagattgactccttggaaggtgaacttaaatctgttaatgtggaagccagaaatagaacactcaaagatccacctacagctgtaacttatgcacaaaatccttcaccttcacctgtgaaagaacaaggagagctgaccccttctcccaagatttctatggagcaggatgctgatgtaaaaggctcagagctcatggaaatagagacagctcaagctcataatgcaaaagcagtttcttcagaagagagtgttgcttgtcctggagttgctctgggtcaggtccctgccgctgctgatgttatcccatctgatccatgtgggaaaactggttctggaattgatgtcgatattgagcagcgcgaagagaatccatgccaagaaacttttaatgccatgaaagcagatggaagcagtgacttggccacaaggccttgctcttatcgtgaagttaaatataacttaatggatcaaattattgctgcgaacaggagtgaagccaaaaaaaattctcaattactatttaagcctgtgccagctgatcggtccaatcttgatttattggcatcaagctatctttctagccaaatgaagaatgatgtaattatcaagaagaagcatgccatacttaaaaatcgacaaagattcaaagagcagattcttaccttcaagttcagggtgctgcgtcacctctggaaggaggatgtgcgacttctttctgtaagaaagcagcgctctaagtctcataagcgcacagaccagagcaaccgatcatcacagagcggatctcagaggcaacggtcctctaatcgctccagattggctgtaccagctggtaatttaagcacatttcctatcacagaaatgtcaggtgtagcaaggaagctgttttcagaatttcagctcaagcgttgcagaaattacttgaaaatgcctgcactgattgttgacgaaaaagagaaggcaggtgctaagtttgtgagcaagaacggtttagttgaggatcctgtttcagttgagaaggagcgagctttgataaatccatggattcaggaggaaaaggaaatttttatggagaaacttgcaacatttggtaaggatttctccaaaatatccagtttccttcagcacaagacaactgctgattgtattgagttctactacaagcaccataaatctgatagtttccgagaagttaagaaacttcttgatcttcggcagcaacagcaacctgccaacaattacctaggagcagtatctggaaagaaatggaatcctgaggcaaatgcggcatcacttgatatgcttggggtggccacagaggtggcagcccaaggccttgaatatgtgaatgaagtgaagaaaaattctgcgaaatctatcctgaggactgtttgtggtgttgataattctaccaaaggatccgagaaggattgtgttggggatgtttctttgcacgagagagaatctgtagctgctgatgtcttggcaggcatatgtggaactctctccccagaaggcatgggctcatgcattaccagttctgctgatcctggccagaagatagggatcatctcaagaatggagcatcttttaactcctgaagcagataaaaactttgatgatgacggcactctctcagatcaggagtgtgaagttgacatagttgattggaatgatgatgagaagtcaagttttattgaggctatgaatagatatgggaaggatttcgctcgaatttcgtcatacgtgaagagcaagtcatttgaacaatgcaaggtttttttcagcaaggctcggaaatcacttggtttggatctgatccatcaaggtgctgctgatgctggtttccctacaggtgatgccaatggaggaaggagtggtacagatggagcctgtattgctgagatggattcagctatctgtagtgcacagtcatgtcctaaagtggagatagatgcatgtcctgtttctgatggagaaattcaaggacataatcctctttctgatattgcctctaggcagccagaagctgacaaatcaaacatgcctgatgttgtggacataaatgtcgaggaaggtgaaagcaaagcagaaaaagactgcagcattcttgttgatcataaacagttacgtgaagacattaatcaaacatcatgtgctcgtatcgacatcaactgtcctgagagcacagataagctgcaagacatagaggatgtaacaccagtgaacatgcatggagatgatctcatggccacttcagttgaacaggttgcggcagcgcatgtggaaagtagatccagtttacattctgaagggattggcattgatgtttccaggatcgaaggatgttcacatgagagtacaattggtaaaggtggaaaatcaacaccgtctgtttgcttgcctgcagaaaatggggttagtaaggaaaatatcatccacttctcgaacatggatggtgcttcctccattagtcctgcatttacttcaaattatcagcaaagtaagctggcagatccaatccaatcaaaaccgaagccccttaccccaaaggatttaatgcctgtccaatttagttcgtcgctgcctgatcctacctcaatctgttttgagggtatagctgccataactacacccaattttgaggatcatggcaacagagccagcattgcttcaggggcaaaagatgtgaacatgttcccaacatttaaagaccagtccagtaatcgtcatgatgcactgttttctaatgtcgatgggtacatgcaacagagacgaaataatcactttggaactgaagtatgtggcttatctgaaagcacaggcatttcccagtcggaccagttcacagtatcgaaattccagaatggcaggcccagcagcttgggcctttcgaatggaaatcttggggttctatcgactgggagaagagaggaagcacgtgaaggcttgtttaggccttgttctgtcaagacaagtgctgggaatgaggagcagcaaaagcggcctggtgatgtcaagttgtttgggcaaattcttagccatcaatcatccttgcaaagctctggttcatcagttcatggaagcaaaagcaagcccccctcaccaaaggttgataagccagcttcttctaggttgttgagtaatccaagggaacgcctggtttattcttccaggcctccaatcattgctaacttggggctagaggagagagcgatgaggagttttgaccatatggatgggcgaacaatacagcctgagcctatggttatggtggcaaagtgtcagagaccgtcagctggtgtaccagtttactcaaccaaaaatggcgcgctcagcgtgtttgcggaatttcagcaaccttcaatgccgccacatacatcagatcacaaactactagaaaactttgccgatcttcataagaggaatggaatcgaactcctttcggggttccagcagcctgggaggcttgggggtgctggggtcctggttagcggtgtatctgaccctgtggctgctctcaaggcacagtacggctctggttcgaagatgttgagcagcagcaacgacgtggatacatggaaagacataggaagcaggtagcgtctgtagtgttggtagcggcaatagtgcaatgctttcttgctctctgtatcatacttagtttttgtaacttgggatgaaactaaacatgggaaagtgaatggctttcctgtccatattgttgtaggatttgcagtagaagttcgtttaaatttatcgctggtattaactttttgtacctttcttttttgctgcagccgctccatacttgatagtttttacctgttaacagtgatgtaggttttgctagaggtgttggtcatgctgtccgctggctgacaaggatgtttgttggtatgtctatcagtatttatgcagaaacctcacacagatcattgtaatgtggtaatgattcctaactgagtttactcctttgcctgctggagttttggtgaaaaaaaaaaaaaaaaaaaaaaaaaaaaaaaaaaaaaaaaaa

SEQ ID NO: 21872 - DNA, 1167 bp, Oryza sativa
  Clone ID: TF_OsC26138_1
ttttttttttttttttttcatctctgtttcacctcgttgggaagccaattcatcacagattcaatcacaaggggaaaatcaactaaaaagagaaaaaaatgaaaaacaaatctcttaaaaattcatcacaaagagaggagccctagcgtgcccgccaccgccaccagctcgtcgctgtcgtgtccgccaccgcaacacctgctccaaccgccgcctactcctgcgcccaactaggaggaggtcgtagccgctgccggggaagggggctgcctcaatgaggagaggaggacggggtggagccggtggtcgactggaccgacgcgggaagccgacgtcgccgccggatccgcccgtgggaagccgcaggagggcacctccaccgccgctgctcacggtgggggagggcaccgccacagccgcttggagagggcgtcgtcgccgccgctgctcgaccaccgcaagagggggatggaggaggaggtcatcaccgatgaacgcgaaatctagcgcgaggatgccgtcccggggatccgtcgcgtcggatgctagggtgcaagaatccaagctcgaggcaagaacgtcggcgagagggtgctgctgctgcggcggcggcggcggcgacttcaactctgcctcgctccccatgtactccgagtcatcggcggccggcggcgggcaaccggcgttttccgccgtcttggcggcgtcggggaccaagccgctgcggcggagctggatccagcggtccctcatgatggccgaggtgcggccgtagaccgagcggctgatcttcctccagctgccgccggtgtggcggtggaggcgcacgagctcctcgtcgtcgcgggcggtgaaggggcggtggtagacgtcgcgggcgaggtggtggcgccacctggcgcggcacgagtcaccggagcgcccaggcatttccctggcgaccttccaccattgccggaagaggttctccttggcgagccgccgcagccgctcgtcctcctccgccgtccactcccgctcgggcagccgccgccggcgggagcacctgcacttcgccgccgccgccgccgccgccgccgcgagccatggacgtctctcctcctcgggatcgtggttggttgcagcgagagcaagggtatcgtcccagacgtccgtctccgtccccat

SEQ ID NO: 21873 - DNA, 1280 bp, Oryza sativa
  Clone ID: TF_OsC174168_1
gccgcaggcgccccgcccccgcggcgggccgctgggaagagagtccccgccgccgcgcgccccggagcccgggctggggtgggcgctctcggcccccgtcggcggcgagtgcctcttcgaccacggcggccgcggtggcctccgctgccggagcgcccgcccggcgcgcgccggatgcgggggggggggcaagggttgccggctgaggtggatcaactacctgaggcctgatctcaagagaggcagcttctcccagcaggaggaggagctcatgcatcagcctccataaaatccttggcaacccgtgggccctgtgggcggcgctgctgcccggcggggctgacctccctctcgccagcccccgggaggggagcattctcacaggaagaagaagacctcatcatccatctccattccatgctaggaaacaagtggtctcagattgcggctcagctgccgggtcggacggacaacgaggtcaagaacttctggaactcttacatcaagaagaagcttcgccagcgcggcatcgatccggccacccacaagccgctcaagtggtccgattacgtgttcgacggctacaaccaccagctccctccgtacaaccatggcggcatctatggcggcggcgacagcaaggacacggcggtgcacttcgacgcccacgccctcggcaactggtgctagcagctacccctccgtaaaaaaaaaaaacaattctagctacaaacctggacatatgcgtgtctagattcatagctaaagtttgtttttttatgggacagagtagtaccatctagctaagctcgaatccaccccaaattaggcgcaacgagaccgacggcgagcgatgagccatagcaatgatcagccgatcaattagtaggcgccataattgcatgcaagcatgctgctacgtataaatgtacgtatacctacgggtcaagttttcaacgtgtatacgcgcgtgtgaattaattaagtcggcgcgtacgtaattaagatcatagctgatgtttggtgagaggtttttgggttgtcaaaagattttttttttttttggtttagtttctttcatttctcttctctcctttgatcgatcgatcgagagatatcgatggatcgggcattagtttgctgcttttgagtgacatgattgtgatgataattaaagtctttaatctcgatcgccggtacacgtacaacatgtaaagttcttcatatgatgatatatataaatatatatatagacattgatgctaaaaaaaaaaaaaaaa

SEQ ID NO: 21874 - DNA, 1480 bp, Oryza sativa
  Clone ID: TF_OsC3325_1
gagaaccttgattgttccttcttcaggagaggaatacacgttacacagtcctcccagtggcagcaacttacagagtacaagtgtaagaacttaattattcttacaaaatcttatagtagtaatgtctcttattctaaccaaccagaaaaacagtatacattttctcaaaaaaaaaaagaaaaaagaaacagtgtgagtagagtccgggctagagaaaattaacatgtagtagtagtaataataataataacaatcctaatcttccaatggttctttatcctgtacgtgtagaatatactgtagtgtggtaaaaaaaaggagtggtaaaaattaattgatcagaagtattccaagttgaagtcgaattgagccaagctctgctcatggcatggtagcgagaacttgtgctccagcgtggcgtcgtcttccacctgatactcgccgccatagccactgtgctgctgctccatgtcggcgaagggctctgccttggcggcggcgtcggcgccggccgaggcggcccagttgagcacctcgctgtcgagcacattgctcacctcggcgcaggtccagttgctgctgttgctggagctctcgccgtagcccaggttctccgacacgtcgagcacgctgctgtagtcggcgacgaacccggcgccgtcgtcggggtgggagccgtacagcgccgccgccatgttcgccgcgccgaggtcgaagccggcgccgaagtcggtcaccgggaacgggtcgaacaccgactgcttggcgttcgcggcgaggccgtcggcggcggcggcggcggcggcggcgccgtggggcttgtgatcctcatccacctgggtgaccgccgactccgaggacgtcgccgccgcggcggcggcggcgatgggcttgtgcgtggccgggtcgaggccgcgttgccggagcttcttcttgaggcagctgttccagaagttcttgatctcgttgtccgtcctccccggcaagtgcgacgcgatctgcgaccacctgttcccgaggatctcgtgcagcgcgacgatgaggtcctcctcctgctgcgagaagctcccgcgcttcaggtcggggcgcaggtagttgatccaccgcagcctgcagctcttgccgcacctctggagcctgtgcgagcttgggaacggagctccagcaaccgacgccgtagcggtagatgtgattgtagagcttctcgtcttcctcgggagaccagagccccttgcgcagcttctgctggacaccggcggcagagcacgcgtgccgtcccattcccgcccgacacgcgagcagctacctgccgctgggttcgttgcccttgccggcgtgtatctgtctatcgatctctctgtcgatcgaggcggccggctgggcgcccgatccagggggtatatatggggaagcgtgccgagaactactgcacacacacacgtacggtgcgcgcgcgcccacgcgtccgcccacgcgtccg

SEQ ID NO: 21875 - DNA, 1349 bp, Oryza sativa
  Clone ID: TF_OsC46522_1
atgagggatgtgtgcatggaggtgctgcctccgatggaccactacgcgtcgagggggaactggttcatggcgcgcaagtggtcgccggaggagaacaagcagttcgagcgggcgctcgccgggctggacctgcggtgcccggactgggaccgggtggcgcgcgccatcccgggcaggtcggcgctcgaggtcatgaaccacttcagggacctcgagctcgacgtccagcagatcgagaatggcatggtgcccttcccggtctacggcgccgccgccgccggcggcgcgttcacactgcagtgggatggcgcccatggcgtcggggacttcaggaacgcgtaccggttcggcggcggcggcggcgggaagcggcacttcggccgtacgccggagcaggagaggaagaaaggcgtgccatggacggaggaggagcacaagttgttcctcttaggactgaagaaatatgggaaaggggattggaggaacatatcccgcaatttcgtgcagacgaggacgccgacgcaggttgccagccatgcgcagaagtatttcatcaggctcaactccggtggcaaggacaagaggagatccagcatccatgacattaccacggttaacctgacggatgaccggcctccctcgccatcacagtcctccttgatcagcaatcagtccaacacatcaactctgaccgcagcggttgcccccttctcatcgacggccgatgtcaagccacagaatgccgcgaatgcgtccttcaattcgccaagccggacacttgggatggcgggttacgggatgggattgcaagatcaaggattgcagtgtggtggtcctctacatgatcagttggccgcgagccgaagcatattgttttagatgaaaccaatccaggcagcaccatggatcagatgtctagtgtaatattgccctgcttgtagcttcatcactacctgtattgaagtaattaattatggggaatttttcggaacataacagagggggtgtggagggatctttgtgccatgttggtgactgataacctgtgatccataattgttggcaatactgagaatgtaacgaaacgaacgtcaagaacttgatgccggtggtattttcagacagtgattgctgctagtgctgaacactgatcatgcatgaagtggactttgtattcaatcatggatccagcttttgtgaggtggatgaggagaattctattcactatgttcttctggtcagtgatgcactgagaaacaccggttgccatctgattgaggggtttcagatcatgctgtacttcacacatacttatccacagtttatcaatttgctcattggtgttcccc

SEQ ID NO: 21876 - DNA, 966 bp, Oryza sativa; identical to SEQ ID NO: 12397
  Clone ID: TF_OsC215051_1

SEQ ID NO: 21877 - DNA, 3549 bp, Oryza sativa
  Clone ID: TF_OsC139519_1
ggggtcagcctggcagcttggctcgtgggtgtgtttgtgcgtgttgcggcgctgtgtcgcgcccagcgtctcggggtctgctgccccgcccccctccagctcccggggcggcccggggctgtcctcctcccccccccgggcgaccggctctcccgtgatcgtgctccgttctgcttctccattgcggtttcccctagcgcctggacccctcggtccctgtttggttgcgcccggctgtccacccgcgcgggggcccctcgctcgcctgtggtcgtccccctctcgacccgagagtgagagccccgctgtcccggggcccccccgtccccctcttcctctcgttcacctccccctcacccccgcagctaaaagcccacgccaacaccgcccggctgtgcctttaacgcgagccctttgtaggaccatcctgggactactgagatcccctgttcatttgtaattagacatcgcataacactgtccttggactataccatgatatgtgccagcttcagctgattgggaatcttcctttgaatatgatttttttcccatgtatatcttcctcccacttcaagaagttgcacctatcaacaataccacatccgcagaagtaaagctccgagtatcgctgatagtcaatagagcctcaagcggtgttgctattctcaacagaagtgggatctgtttcagcagaagtgggatccttagctgacacatcagaaggtccatttgattggatcatgttgcttaacggcttgacactcacacataagtgtcttgcaaccctgctggatccattgattcggccgaatgacatgcaatcagcaagccgcgtggatgtggaaaatttgtctgcagatccctcagtcatgtttatctgcttgggtctcggcattgacttgagtctcccatttttcacatttccattattagcatctctatcttcagaagccacagttggaaggtccgacccaaaggctgcattagccatgctatcagcttttgagttctcttcggctgatttccttgatggtgctctcttgcttttcattacagcaccatgattatcagtagagactgaacccctcattctttgtttggttgctcccttctgaacaccagagatagagcccctcattctcttgttgacttctcctttaccagagagagagcccctcgttgtcttcttggttgtgccttcttcaccaacagatgtagagccagtcttccgtttcgtggctacctcattatcagcactgatagtgcccactgtctctacgacagcctcattatcaccagagatagaccccttcattttcttttgcacaacttgatttttgtcagtaatagatctctttctcttcctggctccactagaacaattagaagagttgttgacatcacagacagcaagattttcatcagtttgctttttcgatctacttctagatggtttcttctttgaatttgctgtggttgtgtttacagcagcctcagcatcaatagattcagaaagaggtagattcatagaaggtgaagaatttgatgtgtcaccagggagtacattgtcctcacatggtattctagaacgttttcggggcttcctgactttagcactcacagtgttctcatcacttccatcaactttggagcgaacaagtggcattaagtcactgggtccaatggcaggtcgctctgtttctctgtcaacaaagttgcattgaagaatggatttctttatttgttgagctgccttaactgaaggcaatttatcttgacacaactttctccatcttctcaagcacatattgtcagtacggtgaggaatcttcgccccagcaatcttggaccagcaaggcccaaactcatcgactgatgccaatagtatggagtcttcttcaggtcgccattccccaagatctatatcaggatcaagaacattgcgccacctttcattgcactgactctgtgtgcgaccaggaatgaactgagcaatcttattccagctgccagacccaaacaacttcacagctaccatgaggcgtttatcctcatcaagagaccatctccccactcttgacctttcagggtttaaggtttttctccacctgttagagcactgattgccagtgcgaccatccatactagctgatacaagttgccaattagttccaaaggtgttgacagcagcttgaagttgaagatcttcttcttcagcccagtccttattcaatatgcagtgattaagacttcgctgataacgaacaaggcactggaaaggtgtcctgtgagtacccaatgtaactgcaatgttaatccagttattcattccttgctgttgaacagttagtataagtcttttttcctcccgagcagtccaggcattatgactaatcaatggatcatcaaagtttagccacctcgattcacattcagcaccagatcgaccaggcaggtacatagcagctattttgtcccagtttattaatggcaggaccgatctaagactttcgggagtaacctcaaaattgccagcagtattcgtcagtgcatatgccatatctacagcactgaagtcaccggtggaacttcctttattgatcgagttcaaaatcaatgcctcttggtattgctgctttattcctttagcaagtttctctttctcaacatctgaccacggttgcttctgaagagacatagggagttgcttcagtaccattttgtactttgaaacatgagggttatctgcagggccaagaaataatgcaggtgtcttcttatctttattcttcgttgattgtgcacatggctttcgagaggagatcaatctaacacgaggatcctccttttggcacaaaattttgccaaatgcttttctgcagcttaattgataatccaaaagacattttacacgatccctgagatccttattttcttcaatttttgcttcaatggtaatcatcttccttctaatgaacttctggcatgctctgttcttcttaagagcatccactaacaacaaggcagctttaggaaacccagttctggtagttgcctctttattgtgcttctccgcatcaaattcttcatcaagttcatttccaaaaatattgccactcccttcctttgatgcctcagtttttgtgttcatctctgacccactggaggtaccggagtggtagtgcgagaaccggcgctgtatcgcgcggagcgtctcgaggtcgtcctcgtcgtcctccgagtcggagggcggccaggcgcagatcgggcgcggcaggggcgaggacggcgaggccttgttgaggaggagattctcacgtatgctgcggacgagggccaaatcctcgtcctcctcctcgtcgtcgtcatcagacaagccattcacctccgctcccgccgccgccgccggcggggcggcgaggcaggcggagacctgcgcgaccgccgcgtcggggtcgttcccggagaggatgcaggattggcgcagcgcgtccaggtccctctgcaggtcctcgtcgatgtccgggtcggagtcgtcggagtaga

SEQ ID NO: 21878 - DNA, 2812 bp, Oryza sativa
  Clone ID: TF_OsC1713_5582
ttttttttttttttttttccgtaacaacacttttgaggctataaaatgaaaacccaagtgatcataaatacataaaatgagaacctaagtgatcataaattatacgaccaatggaacatattgtacaaatgaataacaatgagatgtttatgaatcatataaagctacaactgaggaagctacactggttggaatcttatgaatctcccttttttctttctcctatcctacacttgaattgtttccagaagacgacctcaacagttgatgatgattaggggttacagaattgggcatgcctgggttgaacatgatgtttgacgtctgtggggatggctgggtttggatggccgacagcggcagacgaggtccaaatgacagcatctgctgccgctgctgctgctgctgctgttgtaagaatgccatctgggggtgaccatgcccctgcatgttattggcaaatggtgctggcatactggattgaggcatcgagcctggcacgcccatcggtctggggctcatactcattggattggatgacatggtgctagtactacccccaggtaggctatttccaggcgaggccaagcgggtggacacgattcggacacggtcagatgcaatcctctgccttattctctccacttgctcgcattctttcaaaagcaaggtctcgacttcggcaaactgcttcagcttcagttccaacctttttaactgatggtttattacagtagcagttagtctttggatttcacgttcctcttgatctgcaaaaagtttagccttcgtagctgctgccgacaaaccacacatggcagcatgcttcaccttttctggagagatggatgaagatacaccaccattatgatcacgaaaattcggatgcggaccttggcccctagaatcagagcaaatgccttctgaattcaccctggaatcatcatctactgtcaaaactgataaagcagcacttgcacatgatgctgcaactcttggtcccatagcagaagccaaaaacccaaccagtgacatcaccggattagaagaattaatgaacggaagctggttatcaggtggaattttttgaggtagatttcctgaagtactgccattgcaatctaaatgtgggtatccattggtttctgctctaaatggcacagatgcatctggcacctcaatattctctaacaaaccatcttcaacaggaagacgaataaaatggtaaatacattgtgcttttgactttgttccaacatgctctgcaatgttattccagttgtcattgtacttctctatgccctccaacagcaataacgtttcttgatcagtccaactatccccatcattttctgatctatcgttatccccatcaatcctctgaaaatctaagcttgaatgcccagtaatatatctcgcatcatggaagcaatcagagcatagagcgatatctgcctcctttagtgactgatagtgcaagctggtcaaaggctgtaagcaataactgcaagaactctctgacaatcgctccctaatctttccatccaattctgcaagtccagcatcaaaatccacaacctccgaatttgatgccaatgaagaaatgtcctctgcttggaggttacatttcggtcgatcaaacaaaattaggccatcaattgatttcagtggcgcagtcaatagttgcaactccccggttggctcctcccttagaagggaggttgccatccttagaccccggtgcaccgacccagacgcaaggtaattgatgattccccaagtgtctaagaacctaacaatcctactgagatcatataattcagctgtgttcgcaacaagcccctggcactctgcaaaagcaagcctcttgcttgggttctctaaatattttgcaataaccttattcctcaatagcatgtacttctctggagtgttgcccggcgacttccctgaaaagaactgtggcaccacctgcctttccagcctgtgcacgatccctggggagaaccaatctacaaatcgcaaacaagttagtgccgcattatagctcagacattcaggtttttggttgcaaagagcaggcggacctgagtgcttgggcacgacatgtaggcgaccctggaactgcttggtcacgccatgcccctccataagattcggcggcgtgcacacataggtagacggcttgtcagtgtccgtcgcgagcgaagcgtggtcagggagcaccccggagagcacctgctgctgcccgtacgagatgttctccagcaccggcgccgccgccaccgcggcggaaccctcacccgcgcacgcggatcgctcggccgcgatgacggcgaggacggacgggtgcggccggttgacgacgcgtcgggtggcgacggggaacgccgagacgggctccgccgaagggagcacctccgcctcgcggaggtcgagcacggggtcctccgccccggctagggtttcgtcgtcggcgtcctcggggaccgcggagtcgtcgtcctcgttaacggcggcggagtcggagtcgtcggagtggtccgccgcggcggcggcggccgacgagcggttggacggcgacggggacgcggtggggttccgcttccacttccgccatttcaggcgcgaatctgaggtcgacgaggccttccgcggcatcgtcgtcgtcgtcctcggcgtcggcgtcggcggcggcggcggcggcggcgagtgagggggacgggtcgggacggggtcgacgcagggaagcacgtgcgagggaggtcgggactcgggagtgagtgaatcagtgtactgaatgaactcattc

SEQ ID NO: 21879 - DNA, 3270 bp, Oryza sativa
  Clone ID: TF_OsC158_1
gggagggctgcctgtttccatcggtgccgggaggggtgcataacgtatcgagcatcggtctcctctgctctcttgggtttcctctgcccagcccttctgcccctgagcattctctggggtgactgcatttggggcttggcctgctgctgacgcgacgcgctttgagaactgcgagttttaatctgattctagagttgaagataacgaaaggagcaagggtgaactctgctgacttggtttttgtgtgcacagaccaactgcagctgaggatttagtagattgactgcaattggatcaattcaagtagaggtctaggaggaggtatgaggtactacttgtgtcaggtccagcgtttggttggagatatggaaggaggagtgcttttgtttgtggaagacctcaactctaactgacaaagcgaccaattgccaacacttctgttatatttcttctttttcttgaattgggaatggagattaattcctctggtgaggaagcggtggtaaaggtgaggaagccatacacaatcacaaagcagagggagcgttggactgaggcagagcacaacaggttccttgaagccttgaaactgtatgggagagcctggcagcgcatagaagagcatgttgggacaaagacagctgtgcagatcagaagtcatgctcaaaagttcttcaccaagttggaaaaggaagctatcaacaatggcacttctccaggacaagctcatgacatcgacatacctccaccacgaccaaaaagaaaacctaacagtccatatcctcgaaaaagttgtctcagctctgagacatccaccagggaagttcaaaatgataaggcaacaatatcaaatatgacgaacaatagcactgcacaaatggcaggtgatgcagctcttgagaaacttcaaagaaaggagatatctgaaaaaggaagttgctccgaagttcttaatctctttcgagaagtcccatcggcatcattttcttcagttaacaaaagctcttcaaatcatggtgcatccagggggctggaaccgactaaaacagaagtcaaagatgtggtcatcttggaaagggattctatttccaatggtgcagggaaggatgcaaaagatatcaatgatcaagaaatggaaaggctcaatgggatacacatcagctcgaagcctgatcattctcatgaaaactgtttggatacctcaagccaacaatttaagccaaaatcaaactctgtggagacaacatatgtggattggtctgctgcaaaagcttcacactaccaaatggacagaaatggggttactggctttcaagccactggaactgaaggaagccatcctgatcaaacaagtgatcaaatgggaggagccagcggaactatgaatcaatgcatccatccaacacttcctgtggatccaaaattcgacggcaatgccgcagcacagccctttcctcacaactatgcagcctttgcaccaatgatgcaatgccactgcaaccaagatgcctacagatcttttgccaatatgtcatccaccttctccagcatgcttgtctccacattgttgtcaaaccctgcaatccatgcagctgccaggcttgcagcatcgtactggcctacagtagacggcaatactcctgatccaaatcaagaaaatctttctgagagtgctcaaggaagccacgctggctctcctcccaacatggcatctattgtcgcagctacagttgctgcagcatcagcatggtgggcaacacaaggtcttctccctctttttcctccacctatagcttttccatttgttccagctcctagtgctcccttttccacagcagatgttcagcgagctcaagagaaagatatagactgcccaatggataatgcacagaaggaattgcaagaaactcggaaacaagataattctgaagctatgaaggtcatagtgtcttcagagactgatgagagtggaaaaggagaagtgtcgctccacactgagttaaagatatctccagcagataaggccgacaccaaacctgccgcaggagctgaaacaagtgacgtttttggaaataagaaaaagcaggatcgctcttcatgtggttccaacacaccgtcaagtagtgatatagaagcagataatgctcctgagaatcaagaaaaggctaacgacaaggcaaagcaagcatcttgcagtaactcttcagccggtgacaataaccaccgtagatttaggagcagtgcaagcacaagtgattcatggaaggaagtttctgaagagggtcgtctggcttttgatgcactgttcagtagagaaaggcttccccaaagcttttctcctccgcaagtagaaggatcaaaggagattagcaaggaggaagaagatgaagtaaccacggtgacggttgacctcaacaagaatgccgctattattgatcaagaactcgacacagcggatgagccaagagcttcctttcctaatgaattgtcaaacctgaagctgaaatctcgcaggaccggtttcaaaccatacaagaggtgctcagtggaagcgaaggagaacagggtaccggctagcgatgaggttggtaccaagaggattcgtcttgagagcgaagcatcgacatgatttgctttccacctggttgctggcctctaccaagtcagaagttaaatttacatccgagctaccataggacttcagaccttccaatgcattacctcacaaactcaatttattgtgtgttgtatcttaatgcttgccaagcagctcctatagactgcttttaaaccgtatctcatagacttttgattagcatttaagcgactgctaaactttcttcataaaagggtattatccttattatgcattatagtctggggaaggtaataagtggaattttggttccaaaaacaaagaaaaaaaaaattaaaaatctttgtgacttgggaaaacccctgggtttacccaatttaaattcctttggagaaaataccccttttcccacggttgggtataatcaaaaagggcccacacgatcgcctttctcaacaatttgccaaccttaaagggtaaatggaaacccccttttatccggcgatataaacgccgttcggggtggtggggtatttctaaatatgatctcattcatttttcatacgccatatactcccagtctgtatcgtttattatcctctctttcgtcacaacatctttcggttttcttccttatatactaaaacttggggtccgcctgttggtcttgatct

SEQ ID NO: 21880 - DNA, 1799 bp, Oryza sativa
  Clone ID: TF_OsC144018_1
acatatgcatattatctcatataccaactagctatcaattaacaattggatccatatcactgaatgtaatatatatatgtgtagctagcacccaacaccaaaatctattattgatcataccctagaacgtaatcgccggcgccgcccgaaccgtagtcgcaagacgacgacgtccacgtcgagaacttctcgtcggcgccgatgatggcgctgccgtccgggcactgcagctccggcaacgacgaagggatgatcccgccttgcgctccgccgatcgactcgcacttgaagaggaagtcgtatagctcgtcgtggagaccgtagccggcgacgaacccaccaccacccgccattgacgacgacgaggtcatctctacaccggcgactcccggcatgtagttcgaaccggtcgccgccgcagggtcgaggtgctcggcggcttggaacgcctccgacgtggtggcggcggcggcggcggcggtggcgagggtatggccgccgacgaccaaatgatgggggtgttgcacggtggcgacgacggcgtccgtcggctgcacggccgggagcggtctgctcggcagcagcgcctcgagcttcggccactgcggcggcgcgacgccgacgccgccgccgttgctgctggtggtggtgcagccgaacgcgctgttgtagaggccttggaggcgcatgtggagctggatccgctcgagggccgacgagcttagggcttgatgcggcggcgccgccgccgccgcggtgccgacgccaccgcacatggcggcggcggcgctgcctgctagaccgcagtggtcttggtttgcgcgggcgcggcgcgacggcgcgcgcttgccgaggagcttcttcttcagcttggtgttccagtagttcttgatgtcgttgtccgttctccccggcagctgcgccgcgatgatcgaccacctgctaccgatgctaatgtagaggctacaaatgatgtgctcctcttcttctgtgaaatcaccatgcttaatgtttggccgcaggtagttgagccatctgagcctgcaactcttgccacatctcttcagcccgatcttctgcggcagcgcgatccagttgccgccggtgccgttctcctcgatgtaggccttgagcttggcgtcctcctccggcgaccacggccctttcttcacgctcgccttgtcgcagcacggcgccctccccatcactaactccttcgaattcttgatttcttgctgctcagctcgatcgtcgtcgccgtcgccgtcgtcgtctatctcagcagaagagagatctagaaccgatggatcgctagtgcctgacgacggcgacgatgtgtagctagctgctgcggctggtggtggtggtggtggtatggtgatggcgtgtttggcagcagcggtgagcgggtgcatctggggttgtggccgggctggctttatagtaggtttagtagatggatagaggtgtgtgtcctctgaaactgatcttttatcagtatacatccctgctgagctcccccgtatcccctcggttgccttgtcatcgtcaccaccatcccctaagctgaggagcaccgccgcgaccgccgccgttgacagccaccgccgccagccatggccgccgtcatttgcgtcgtcaccagccatggctgccgtcatttggaggcctatgtcaccatgcaacccctgccggattgggccggccgtgcgacctccagactggcggcgtggatttgaccggtcatcgtcgaggtcgtcgttgccgaggtcgtcatcgcgagccgccgccgccgccat

SEQ ID NO: 21881 - DNA, 640 bp, Oryza sativa
  Clone ID: TF_sicee_6517.z1.abd
cggcacgaggggctatctaagcaccggcattgcatacagccgcctaagcaaagagcacagcaagtatacgcgaatctgagtgtgtgagagagactagtagcacagacgaaggtatggcgttctacctcggcagcatgggtggctcgccatcgtcatggggggtggcggaggtgccggtgccgagcagcaggccgtggagcaaggcggaggacaaggtgttcgagagcgcgctcgtggcgttcccggagcacacgcacaatcggtgggcgctcgtcgcgtcgcggctcccggggcgctcggcgcacgaggtttgggaacactaccaggtgctcgtggacgatgtcgacctcatcgagcgtggcatggttgcgtccccgggctgctgggacgacgacaacaacagcgccggccacggccgtggcagtggtggggatgagcgtcgtcgcggcgtgccctggactgaggaggagcacaggctatttctggaagggctagagaaatatgggcgtggcgactggcgcaacatctcgcgctggtcggtgaagacgcggactccgacgcaagtggcgagccatgcgcagaagttcttcatccgacaggccaacgccagcagccgtggcgactccaagcgtaagagcat

SEQ ID NO: 21882 - DNA, 1014 bp, Oryza sativa
  Clone ID: TF_OsC1122_1
tctgcgaggaggccaagctagtcgcgcgcaaattaatcgccgatcgatcctacgatgaagcggaagcggccggcggcgctgcgcggcggggaggaggcggcggcggcggcgctgaagcgtgggccgtggacgcccgaggaggacgaggtgctggcgcggttcgtggcgcgggaggggtgcgaccggtggcgcacgctgccgcggcgcgcgggcctgctgcgctgcggcaagagctgccgcctccggtggatgaactacctccgccccgacatcaagcgctgccccatcgccgacgacgaggaggacctcatcctccgcctccaccgcctcctcggcaaccggtggtcgctgatcgccgggaggttgccggggcgcacggacaacgagatcaagaactactggaactcgcatctcagcaagaagctcatcgcgcagggcatcgacccgcggacgcacaagccgctgacggccgccgccgatcactccaacgccgccgctgccgtcgccgccacttcttacaagaaggcggtgccggccaagccgccgaggacggcatcctcgccggccgctggcattgagtgcagcgacgatcgtgcccgaccggccgacggtggcggtgacttcgcagcgatggtgagcgccgccgatgccgagggattcgaaggaggatttggcgatcagttctgtgccgaggatgcagttcatggtggcttcgacatgggttccgcttccgccatggtgggtgacgacgacttctcctcgtttcttgattctctgatcaacgacgagcagttaggcgatctcttcgtcgtcgagggcaacgatcacgagcatggcaatggtgagattggtcatggagacgtcatggaatccaaacagtaatctttcgggagattgatcagggaataagttgaccatgagaaaacatgtaagaacagcttgtctgctgagtcatgaccggtgatgtgtatgtgatggaagaaaacgtatgtacgacttaatgcttgcacctat

SEQ ID NO: 21883 - DNA, 735 bp, Oryza sativa
  unsure (1)..(735): unsure at all n locations
  Clone ID: TF_OsC6000_6
ctcgcgatctatacagaaaccgcagaaaccaacaccttttggctcctccactagtagcaactactcgttgtcgtcgtcgtcgtcgactcgtcgtggtagtagtagtcttcttcgcgtgacgccatgggaggaggaggaggagttgaggcggattgcgacaggatcagggggccgtggagccccgaggaggacgaggcgctgcggcggctggtggagcggcacggcgcgaggaactggacggcgatcgggcgggagatccccgggaggtcggggaagtcgtgccggctgcggtggtgcaaccagctctcgccgcaggtggagcggcggccgttcaccgccgaggaggacgccaccatcctccgcgcacacgcgcggctcgggaacaggtgggccgccatcgcgcgcctcctccagggccgcaccgacaacgccgtgaagaaccactggaacctgctccctcaagcgcaagctcgccgtcgccaccaccaccaccaccaccaccaccggcgccgccgccgcgccgggagtggtcgccgatgccgccgagctcgtcgagcggccgtgcaagcggttcatccccacgccggacagcccgtcggggtctggttccgggtcggaccgcagcgacctcatccacggcggggggttcgggcagattttccggccgntggcgatgaccggngcgttcgagcccgtngactgcgcgctcagccggcggnagggaggaggatccct

SEQ ID NO: 21884 - DNA, 1179 bp, Oryza sativa
  Clone ID: TF_OsC342590_1
atggggagatcaccgtgttgtgagcaggacgccgacgtgaagaaagggccatggacgccggaggaagacaagcttctggtggagtacatcggcaagaacggccatggcagctggcggcgcctcccgaagctcgccggactcaaccgctgcggcaagagctgccgcctccggtggaccaactacctccgccctgacatcaagcgcggcggcttctccgacgacgaggagcgcctcatcatccacctccacgccaccctcggcaacaaatggtcgtccatcgcgacgaagctcaaggggaggacggacaacgagatcaagaactactggaacacgcacctccgcaagaagcttctcagccaggggatagaccccgtcacgcaccgcccgcgcaccgacctcctcgccggcctccccaacctcctggccgccgccaatctcggcggcgccgcccaccagctgcccttggacttgaacgccatcaagctccaggccgacgccgccaagttccagattctgcagggcctcctccgcgtgctcgcctccaccaccgccccgccgcccaccgccgctgtgctacctggcacagacctcatgacgtccatcctcggcgccaccctcgccgccaactccgccggcatactcggacagcagcagcagctcgccggcgttgacctcagccgcctcggccagtacaacggcaactacgacaacctgccgccgttgaccaacgacagctgcacgcagcagacgcagccggccatgtcgagcatgtcccccgacagcctactcaacagaatttccagcggtatttccggggacatgctgggctcgccggagctttgccacggcggggacgggcttagctcgccggagctcggccagggcggcccgagcgcaagcaacatgacgacctcaccgatggcgccgccgccgccaatggtagctgcagatgatcatcagtgcaatactaacacccccagcggcggcggcgacggcatgtcgtgtgagcagacgccggcgtcgagcacgttcgacgggctgaacctggacgacatcgacatggaaggttgttgcccgatgacgcacattttgcgtgccgactgatatatacttatctcacatgatactaatttgatgcaggcaatgcccatcatggttgatcagcagcaacaacgcaag

SEQ ID NO: 21885 - DNA, 3415 bp, Oryza sativa
  Clone ID: TF_OsC251248_1
atggccattggaggtaagcaactggctgtgttcggcggcctgtgttctcaactcctatccttcgtgttccacgcgcatacgaggcgagacgaagacgaagaggaagagcaagagctagggttaggaggaggcgatttgctccgcccgcagatcgggggcgccacctcgtctcgcccccgatctcgcaccgcccgccgcctccacctctgccgcgccgaatctctcagttggagccgccgccgccgccgccgtgggccggtggtcggtgcgccgcaaatcgcgccgctgccgtggccgtcgggctcccacccgcagatccagcatccaggaatcgtgcggctggggacggcgctccgcgggaccagggcggccagggtcgccgtcgccagggcgattgtcatgatgacaagcgacaacggaaaggctccagagaaggatggagagccttctggacctccgtcggctcctcaagaaggagaaatcagcaatgaaccaaaaaggcgacgacctctcaatgggtaaaaggctaaaagctcttttgactatcgtaatgaggaccaccggtccgacacggcgttccaccaaaggaaattggacccctgaagaggatgccatattgtccagagctgttcagacatacaacgggaagaactggaaaaaaatagcggaatgctttccggatagaaccgatgtacaatgcttgcacaggtggcaaaaggttctaaaccctgaattagtcaaagggccatggtccaaagaagaagatgaaatcattgttcagatggtaaacaaacttggaccaaagaaatggtcaaccattgctcaagctttgcctggacgtataggaaagcaatgtcgagaacggtggtacaaccatcttaaccctggcataaacaaggaggcatggacacaagaagaggaaattaccctcatacatgctcatcgaatgtatggaaataaatgggccgagctgacaaaatttttaccaggaaggacggacaattcaattaaaaatcactggaacagttcagtaaagaagaaagtcaattcatacatgtcatcaggtttacttacccaagtttcgtgtctccctctaaatgaatattctgcaaattgtaattcctcaccagcgatgacccaacaaaacagtgaagatagtggttgttttgctgtccgagaggttgaaaattcatcagggtgtagtcaatcatcacttgccaaggtttcttgctcccaagtgcatgatactactgtgccattgggctgtgatttgcaagtaaacgcgaattttgacaagaatgaagcacatgattctcaatcttccatgggtccccaagcatgctatacttctgcggaggctgttgcatctgctttgcctgctgtgcattgccatgtttcttcctctaacttggatccagatcaacacttgcaagaggactttgctcaaggactgaatttggacatgactatagatgaaatgccaactgttcctagttttgcagacaaccagactgtttgtagtatagaaaatcatgaaagatctctggagccatatgatgtagcaatggaggtgcctctctctatgttatcaagtgattctggagctgagcaaaaactacatttcatgtctgaggctgacttcaacagtcctaactgtctgaaatctgaactctggcaggatatttccttacagggccttctttctggacctgatgcagttgaagctgattcaatttcaagatcaaatcaccaatcggatgtatattcctctgaagcagatacccattttttagcaccaccctacatgccacagacatcaaattcttcaagtgtgatggggcttgctgatgaccagagtccacagatgtcagtacctccatctcttatttgttcaaatgctatgactgatgatgcacctttcgataatagaccagggcggaaggaaatgccactttctcaggcagaagtggttacccaatcttccagttcttctggtgatgctgaaatgtttgctaaccctggttgtagcaatgacagacatgttccttcttcaacgatggaaagcatacctgaatgtggggaccaacaggttactaatgcggaagaacctgaagccagtctagagaaagaaccatcgcttacacagagtgtgactgcaccagatgaacaggacaagggagccctcttctacgaacctcctcgttttccaagcctggatgttccatttgtcagttgcgatcttgtaacctctggtgatctccaagagtttagtccccttggcattcggcagttaatgcattcaaccatgaatgtctgcacgccaatgagattgtggggctcccctactcatgatgaaagcacgggcgttttgctgaagagtgctgccaaaagcttcatatgcacgccatcaatactgaagaaacgtcacagagatctcttgtctcctattccagataaaagaatcgagaagaaatatgggactgaaaaggatcgtggggtatcagacacatcctccaccggcattcaaacaagttgtatcaatgccactaaagatgatgcacttataactacagttttgcgtattgagcgatctgcttcttctaaatctctggaaaagaaacttgttttctctgatgaaaacaaggaaaatttgggctacacaactgaacagacaaaagatggacagagtgctggaaatgacgaacacatggacgagcagacaacaggggaacgcagttctgcaacaaatgtagctactaatgatgacctgtcaggcaatttacaacctgcaggtattcttattgaacacagcggcgatgatcccatttccccagattatggcaaaaataccatgaatcagaagctgaacacaaatgtgaaatctttatcagtctgtaaggagggagtgtgtgctaaatcaaagcccactgaactcatcgtggagaaatcttcaccatgtataaatgtggattatgaatatgtgaacatattggctgataccccaggtatcaaaagaggactagaatctccttcagcatggaagtccccttggttcgtcgatatgcattttcagggttcatacttcaccagcccagctgatagttacgacgcactaggattgatgaagcagataaatgtgcagactgctgctgctttggtggaagcccgtgaggtactggcaagcggcggccaatgtgacaacataagctctgataaggaaaacacggggaatccagatgccaagaaggaaccagggacaaccaaattgcaaacaaaaatcatggcagagggtagagtcctggatttcgagtgtaccacacctgaaagatcatcagacaaaaatgctggcagcaatctgggaagatatctgagctcacctattccttcgtcccatcttctgaaaagttttagatag

SEQ ID NO: 21886 - DNA, 892 bp, Oryza sativa
  Clone ID: TF_OsC134_42
ctaaatagccggggcccacatgtcggtgacttggcggctagggaagcagaggcaataggagggcaacggcgactgatggcgttcgcggctgcgtattggcttgatcatatttgggcgtctttttcctgggacgtaggcgacgtcgttggcgcaatggctcggccggagatggttcgagtcgacgggaatgacgaagtggggcgatggcggcgctatggacaccgggaacgccgacgagcatatcaccaactgttcgatcagcgccgaggcactaccgcactgctgcccatggccaggcacgggtccagtcgcctctgaccggcaccacagcgcctccgctgctcgcagggacgccgccgctacccgcccggctacctccgttgccaccgccaacacgcgagtctcctcctccctgatcgagatcgagtcgacacacatacaccaccaaccaccggccggccgccgcgcaccggcgagcaggatggggaggccgccgtgctgcgacaaggttgggtaaagaaggggccatggacgccggaggaggacctgatgctggcctcctacatccaggagcacggcgccggcaactggcgtgccgtgccgaccaacaccggggtgatgcgttgcagcaagagctgcccgctccggtggacgaactacctccagccggggatcaagcgggggaacttcactgagcaggaggagaagctcatcgtccacctccaggctctcctcggcaaccgttctctaccataatagtggtccacaacatagccgtgctttctgaatactttcaatggataatcaacgaagctctacactacaaatttctgcaataacatgagggatcatatggaggtgatttcaccaatgaaagatggaacatttattg

SEQ ID NO: 21887 - DNA, 1402 bp, Oryza sativa
  Clone ID: TF_OsC806_1
ttgcggcccaattaaagcctaaagcctttccatagtattaacccaaatcgagcaaattttttctcatcttggtagctttgattcttcgtcttctttgcggcgatcgattgatcttgaggagcttaatatatcgattgagatagcaaatggggaggcagccgtgctgcgacaaggttgggctgaagaagggtccatggacggcggaggaggaccagaagctcgtcagcttcctcctcggcaacggccaatgctgctggcgtgccgtccccaagctcgccgggttgctccggtgtgggaagagctgccggctccggtggacgaactacctccggccggacctgaagcgtggtctcctgtcggagacggaggagaagacggtgatcgacctgcacgagcagctcggcaacaggtggtccaagatcgcgtcgcacctgccgggcaggacggacaacgagatcaagaaccactggaacacgcacatcaagaagaagctccggaagatggggatcgaccccgtcacacacaagcccctctaccctgctccgccgctggccgacggcggctcgccggagcagaaggtgccggaggaggaggaggaggtggaggagaagtcgtctgctgccgtggaaagctcgacgagcacctgcgccggccacgacgtgttctgcaccgacgaggtgcccatgctgcacctggacgacatcgtcctcccgccgccgtgcgacgtcgtcggcgacaccgccggctcgccggcagagtcgtcgtccacgtcgacgtcgtcgagcggcggcggcggcatcgacgaggagtggctgctgccgatcatggagtggccggagtcgatgtacctgatggggctcgacgacgtcgacatggtcaccacggcggcgccggcgatggcgacgtcgtgggagttcgaggatccgttcaacgcgtaccagaggatcgcgttgtttgatcaccaccacgagctgacgtgggcttgacgtaaccacttctgaattttctcttgtttcatactccctcggtctcataatataagagatttattgtaccgggatctattatattatgagatggagggagtacaaatttcatctcggcgctagctgcacttagtgatttattaccattggattattagtgccctaattaaacaattagagataggattaagaacatatataagatgataaaaaaaaaggtgaagtggttgtgtgagagagagagagacaaatgcatgagctagccctctttaatttcgtctttctgtcatttttttttctgctcatcattttttttcaggcttcttttagatacatgtgtttggcatacatacatgtaaatgaaaggaatttgaataatgaaaatgagagtgaatggtgtcaaaaaaaaaaaaaaa

SEQ ID NO: 21888 - DNA, 1429 bp, Oryza sativa
  Clone ID: TF_OsC146515_1
caagaagacagatagagaaggagaaaacccaccgcgcgcggcggcggcggcggcgagggtcgacgaggcgacgcattttggtgatctcgtggtgtcacggtgcgtgtgcgatgacgaggcggtgctcgcactgcagcaacaacggccacaacgcgcggacctgccccgcccgcggcggcggtggaggcggaggcggggtgaggctgttcggcgtgcggctcacgtcgccgccggaggtggcgatgaagaagagcgcgagcatgagctgcatcgcgtcgtcgctcgggagtggcggtgggtcagggggttcgtcgccggcgggaacgggaaggggaggaggaggagggggagagggcgcggccgggtacgcgtccgacgaccccacgcacgcctcctgctcgacgaatggccgcggcgagcggaagaaaggtacaccttggactgaagaagagcatagaatgtttctaatgggtctgcagaagcttggtaaaggagactggcgtgggatctctcgtaattttgttgtttccaggacaccaactcaggtggctagccatgctcaaaagtacttcattagacagacaaactcatcaagaaggaagaggaggtcaagcttgtttgacatggtcccagaaatgcccatggacgaatccccagtggtcgtagaacagcttatgctccatagtactcaagacgaagccacaagctcaaatcaattgccaatatcacatcttgtgaaacagaaggaacctgagtttgctagacacctgtcggatttgcagctaaggaagcatgaggaatctgagttcacagaaccttcactagcagcactagacttggagatgaaccatgctgcacctttcaagactaaatttgttctgacaatgccaacattctacccggcattaatacctgttccactaactctttggcctccaaatgttgctaatgtgggtgaatcaggcacaaatcatgaaatcctaaagcccactccagtgaatggaaaggaggtgatcaataaggctgatgaggttgttggcatgtccaagcttaccataggtgacggcagctctaactccatagaaccctctgctctttcccttcagcttactggaccgacaaatacaagacaatcagcttttcatgtgaacccaccaatggctggacctgacctaaataagagaaacaacagcccaattcatgcagtttgagaaagcatggaaaaggcctgctgggtcaaatcttatagattatatattacttccccaataccatagaatgttgcataaggtcctgagcatgtacttttgtagcagcttctgagttgtatcaccatattatgttctttgatatcgataatgaaaaatgttgtatgcatatacctttgataatacatcctccatcctttggagaaaatggttttcagttt

SEQ ID NO: 21889 - DNA, 824 bp, Oryza sativa
  Clone ID: TF_OsC43020_3
ggaccagataggttattggatgcactatcctttgcttcatcaaaacaatggccctgggagcacatttggtgcctcaatttccatccatatctgatccatgggataaccatccatgtcaacaggggtgcttttcatgatgcttgtgatgcagccactgccgccatgaagttcctgctcctcaattccaatgatcattgacggggtctctgggtggcaagattggtatgtcagtgaagacgaggatgatgagggtgacatgttactcttcctctcctgtgctttcttcctcatatgtgtcctccagtagttcttgatctcattgtcagtacgtcctggcagacgccttgctatcctggaccacctgtttccccgccgagcatggagctcaaggataagatgttcctcatgcggagacatgcgcccatgcttgaggccagggtggaggtagttgacccaccggaggcggcagctcttgcctgtcctattgagccctaatttgcaggtccccacccctcaaacctgatactttggcaacgaaatcccaacggcggtcaccgaacaggcggacagtgcataccagttgcaggtcctcctgctctgtccatggtcccttgcgcatctcctctctcactgtcaccatattggggcttgggatgttgcaatgctaacgttgttcacttctaccttggataggatgggagccactctccgtgttcttcttcctctttgagtttgttggctccagcttcacgtttagagccttgatcaactccagaccaactggaaggttgctattagggagagaggaagcccggacgagtggg

SEQ ID NO: 21890 - DNA, 765 bp, Oryza sativa
  unsure (1)..(765): unsure at all n locations
  Clone ID: TF_LIB4309-001-Q1-K1-A10
ctctctccaaattccccaatccaaatccgccctcgcctcgccccgatcgatcccctcgattcgattcgatcccgcccgatgcgagtggaggcggcggcggcggcggcggaggccgtggcggcgtgcgcgcgagcttagggtttctagggtttgcgctagggtttgggggcgcgcccgcgatgggccggtctcgcggggtgcccaattccggcgacgatgaaacgaaccacaggtcgaagcggaggagggtcgcgtcgagcggcgatgcgccggactcgctctcggcggcctgcgggggagccggagagggtggtgggaagaaggcgctgtaccactgcaactactgcaataaggatatttccgggaagatccggatcaagtgctccaagtgccccgacttcgacctctgcgtcgagtgcttctcggtcggcgccgaggtcaccccgcaccgcagcaaccatccttacagggtcatggacaacctgtctttccctcttatttgtccagattggaatgcagacgaggaaatccttcttctagagggaattgaaatgtatggtctgggaaattgggctgaagttgcggagcatgttggcaccaagaccaaggcacaatgcattgatcattatacaactgcatacatgaactcaccttgttatccncttccggatatgtctcatgttaacggtaagaacaggaaagaattgcttgctatggctaaagtacaaggcgagaagtaaaaaggaacttcagtgttaccagggg

SEQ ID NO: 21891 - DNA, 2439 bp, Oryza sativa
  Clone ID: TF_OsC2142_1
ttttttttttttggatcgcaacaaactatgttaacatacagtgtgtaacatcgaataaacacaaaggaaacctcttaggcagtgaaatacaacaattaaatagcgtctggtatcggaacgatgtcacatatgaaaaaggtggcaatgtttacatacatcatttcaggcactatactgtcaaggcccttttagtggctctgcaacacgttacacgttacacttcgaacgagggcaaaccatcctcttaaaatggagagtaatggtatggtaaactcatgctacacattccaatcggggcgataattttacaatttggctgaaatgccttattgtgcttcttcagacacctcacacaaatttcaactacagccaatttaattcaagtatagcctccattttagctgtctcagtagtcatgctgcaaatcagaaaccacgcgctgattgaggaactcaaaaacatggctaaacagtcggggcctcctcattggtacccaactttttcgtcaccatatcataaacgttatctactttggcagggtcaaccttaaataatacatgggcatcttccttcttggcgacactacccttgaatatttcctgcatcaaaacctcctgcattttcaggtaatggttgggtagcaatctgttctgacagcatagatttttttcactggtgcttaatagctctgccccaggaaaaccaacaatatcccagtcatcccaatgtttagtgcctgcatgccctgtggtttttggagaatccctgccagtagaatccaagctggcaccacctttcttctgatccaaattaccatctgactcgattttcataggtcgattcgtcttatgcaccactttagtgttggataagagctgaccactttccttagctttttgggcattcacctcatgttcctttttcctcttttgctctatgtgaatctttgcttcagccaatgtacggcatccagcagaacgacattcctgaagctcttgaatcctccttcgaattttccgttcctcaagaacactcctaacaagtgcttcatgttcctccttagaaaggaaacgcatgaacaccttatagcgatggtaaacttccttgtcttcatttgtgagatccttctccaaaggattaggaaatagtaagtttctttccagtatgaactcttttctcctttttctttcatcaagccttgacaagtaaatacgcaatacccttagcttcagttcacgatcagtttccgaatcagtttctttaaactccatctcagcgagtgcctgttcagcatcgttatcatactctgggtcaaattcatgtctctttgaattgtatccactcagttcagtcaaagaaggcccttcatctgcagaatatcggggttttttcacacctatacttctatccacatgaccatcttcaacttttgctacattagcaccatctttgaattgtccaacatttgatgctttcttatttgcacccccagctatgtgtgaaggtgatcgaccagctaaaccttctccaagtgcatcttccaccttgacccttgggggagaaaatggagactcgtccttaggggtcaaatcccctggtaacactgaagttccggctcttgaaagggtgaaagggagctcgacctcgccggttctcgcaagggtgacggggagggggagatcgagctcaccgctgatgccgatcttatgagttcatgtatgcagttgtataatgatcgatgcattgtgccttggtcttggtgccaacatgctccgcaacttcagcccaatttcccagaccatacatttcaattccctctagaagaaggatttcctcgtctgcattccaatctggacaaataagagggaaagacaggttgtccatgaccctgtaaggatggttgctgcggtgcggggtgacctcggcgccgaccgagaagcactcgacgcagaggtcgaagtcggggcacttggagcacttgatccggatcttcccggaaatatccttattgcagtagttgcagtggtacagcgccttcttcccaccaccctctccggctcccccgcaggccgccgagagcgagtccggcgcatcgccgctcgacgcgaccctcctccgcttcgacctgtggttcgtatcatcgtcgccggaattgggcaccccgcgagaccggcccatcgcgggcgcgcccccaaaccctagcgcaaaccctagaaaccctaagctcgcgcgcacgccgccacggcctccgccgccgccgccgccgcctccactcgcatcgggcgggatcgaatcgaatcgaggggatcgatcggggcgaggcgagggcggatttggattggggaatttggagagagatctgcggctgctgggcacgcgtgttggaattggggccggggtgtcgcggacgagacgaccatcgcagatcgcgacacggag

SEQ ID NO: 21892 - DNA, 1433 bp, Oryza sativa
  Clone ID: TF_OsC90588_1
tttttttttttttttgggaaaaaccaatccattcatcaacactgatatatatatgggagagagagagagagagagagagagagagagagagagagagagagagagagagagagagagagagagatcaatatatgttttggtccaatgagacagtaggcaaatttacatcagcaaaatggaaatcaatccctaattgcaacccctgcaagatcatcgatcggcgccaccacgtacggaaggccgctgctaattacatccacatttggagctaagctttcaccgggtgtacgtgatgatcacttgcaaacagtcagcaaaatactttacttattcgcctttaatccccaatccctgcactcttggcatctgatctatgtatgtttacattagtgagattgtgagaagaacaagatgatcagggacgatgagccggcgactacacaaagaacaaatcaagattcacatcaagaaaggaggaggaagaaatgctgctcatgtccgtccatggcgcgtcattggtgcatcttggccggtggcgccgggtagccgacgggcacgacgtacggcgcgtggcccggcgggaacaccaccggcgtgccgacggcggcgggcaccatgtggccggcgacggggtggcccatgggcgcggcgctgtacatgggcatgggcggcggcgcgccgcccgggtggtggtggtggtggtgcttcatgcccggcgggcccagcgccgccgccgcggggttgcccgtggcctggtggccggtgatcggggcgccctgctgcgcggcgacctgatcgccggcggtgacgctggtgatgtcgtggatgctggagcggcggcggtcgcggttcatggagttgaggcggatgaagtacttctgcgcgtggctcgccacctgcgttggcgtccgcgagatgacgaagttgcgcgagatgctccgccagtcccccttgccgaacttgtccagccccagcaagaacagcctgtgctcttcctccgtccatgggatgcccttgcgcctctcctgctccgccttggagcagctcttgccgccgtcgtacccgccgccgccgcccttgcgctcgtcgcgccggtgtccgccgtccttggacgcggcggcggcggctccggctccgtcgggcggcgccgcggactcctccccggcgtagcgcgggagcgggacgcggcccgcgtcgatggccgcgacgtcctccaccagcgcctcgtagtgcctccgcacctcctccgccgacctcgccccgggcacgctcgcggcgagcgcggcgaaccagtcgtcgtcgggcgcgcctccgtccgcgggcggcggcgccgcgcacgccgcgagcgcgttctcgaacgccttgtcgtcctccctggtccacgccgccgccgccgccgccgtggtcgtcgtcgtcgccgcctgggaggtcat

SEQ ID NO: 21893 - DNA, 894 bp, Oryza sativa; identical to SEQ ID NO: 12419
  Clone ID: TF_OsC387490_1

SEQ ID NO: 21894 - DNA, 1216 bp, Oryza sativa
  Clone ID: TF_OsC804_1
ccccaagaaccccccgtgcgccaccaccaccaccaccaccaccaccaccaccaccgaggaattctcgctgtcgccgccgccgacgacgacgaggagaaggagtatcgctcacaatcttccgggccgatggggagggcgccgtgctgcgagaaggaggggctgaggagaggggcgtggagccccgaggaggacgaccgcctcgtcgcctacatccgccgccacggccaccccaactggcgcgcgctccccaagcaagccgggcttctccgctgcgggaagagctgcaggctgcggtggatcaactacctccggccggacatcaagcgggggaacttcaccgccgacgaggaggacctcatcgtccgcctccacaactccctcggcaacaggtggtcagccatcgccgcccagatgccgggtcgcactgacaacgagatcaagaacgtgtggcacactcacctcaagaagaggctggacgacgaacggaagctcgccgccgccggcggtggcggtggccgccggccgcatacgcgcaagcagcccaaggcggcaaagagcgccgccgccgtcaagcgcgaggcgacgccgtccgtcagcgtcgacaccagtagcggcgtgacgtgctccacggtgaccgagtcgtcgccgtcgtcggccgacggcgaccaccggcggcagcagcagcaaacgcagcatgccgctgtcaaggaggagagcttcagctcgggcggcgagctgccggcggcggcggcggcgcccacggcagcggccgacatggacgagagcttctggtcgtcgacggaggtgaccgggatgatggccggcctcggcgacatggacgaggagctggccatcgccggcacgtcgtcggcggcggcggcgaggagcgacgacatggagttctggctcaagatgctcctcgagtccggcgacatgagggatttggccgtcttgtaatctatttaatttaatcatggcagaattaagcttgattaaattaattaactaccgggaagaattgatagtatctcttctctgttgtttttttttaccttcttttttcatctttaaaaaaaaaaaaaaacagtgagaaaacgatgggaaattcaggtgatattttcacctttgttagaaaaaggaatactgtggtagtagcaaaaatttctttggttcgttaaaaaaaaaaaaaaaaaactcgagactagttctctctctc

SEQ ID NO: 21895 - DNA, 451 bp, Oryza sativa
  Clone ID: TF_LIB3433-019-P1-K1-H3
cccacgcgtccgaaaaattcagtactagtagtacatatatatagtcatataacaaatcaaaataatctgtatatgaacatgacaggagttccgtggagcgaggaggagcaccggctgttcctcgtcgggctcgagaagctgggcaagggcgactggcgaggcatctcccggagctacgtcacgacgaggaccccgacccaggtcgccagccacgcccagaagttcttcctcaggcagagcagcatcggcaagaagaagcgccgctccagcctcttcgacatggtacaatcccaattccttggcctccttaaattaatccgagttcttgaattttttggctaacagccagttcgattctaatatatatttacatgcaacaggtgccgatttgcgagaacggtgcgcgcgtctcggagcatctgagcggcgaatgcgcggcggcggcggctgc

SEQ ID NO: 21896 - DNA, 1564 bp, Oryza sativa
  Clone ID: TF_OsC96816_1
gcacgagggagcagtagtagtagtacaacgccacccaccacacagtgtccgtgtgctgcgggtgtggacgcactggcctccacccatctctctcaccgcctctgcagcagcaaaaggcgagcgcgtggccccgtgccgcagccggcacccgccaccaccccgatttatagccagccacgccatccatggcgaggaagtgctcctactgtggcaactacggccacaactcaagaacctgcagcagcagcgccagcgctggacacagggataccaccatgctctgcgacggcggcgacggaggtggcggcagtgggctgaggctgttcggagtgcaggtccatgtcgctgccggcggcggcggtggaggtggaggtggaggtttgccgatgaagaagagctacagcatggactgcctgcagctggcggcggcgggggcggctccgggctcgctcgtgtcgccgtcgtcgtcgtcctcgtcgtcgatgctcctgtcgatcgacgaggggggcttggagagggcgtccaatgggtacctgtctgatggcccccatggcagaattgtccaggagaggaagaaaggagttccgtggagcgaggaggagcaccggctgttcctcgtcgggctcgagaagctgggcaagggcgactggcgaggcatctcccggagctacgtcacgacgaggaccccgacccaggtcgccagccacgcccagaagttcttcctcaggcagagcagcatcggcaagaagaagcgccgctccagcctcttcgacatggtgccgatttgcgagaacggtgcgcgcgtctcggagcagctgagcggcgaaggcgcggcggcggcggcggcggcgtcgacctcactgtcgctgatgaacacgcacgagacctcctcggacagagtggcggcaattgatctgaattccaccgaggaagatgacacggtgggcgcgtcagggaggccgtttttcccggtggttctgatggagcagcagcagcaggcttcccatggacatggtcaccaccaccactgcacgccgctcgacctggagctcggcatgtccgtctcgtcgacgccgtccatcggcacatgacccggccatgccatgcacaccgtcgtcgttaggagatgctccagtttcgtcggtgcaaggtctgcaggatatagtacacgctgtaaaactgtggctgatatatctgcagtctgatctgtctgccaagtggagtaaagggctggagtattttggcaaatgtttgtagtaattgtaaagctggtgcaagtggagagatcaacgagtagtaccaactgtggatacagtaatgtccgtactactttttaattaattaggttgtgtaatcagagacaccgattctctactgctcatgtcatgtgcgccttgtgttcaaaaaatattgcttaagttttgggaagattgcaactctgccattgctgatgtgtggaattggcaacctgacagtccaaatgcaagaaaggttttttttttctgaaaccagaatgaactaaatatgaaaatgatgcacttaatgcgatttccccattaattct

SEQ ID NO: 21897 - DNA, 1184 bp, Oryza sativa
  unsure (1)..(1184): unsure at all n locations
  Clone ID: TF_OsC165761_1
atggagttcatcgacgacgactgggactaccagccacgcgcgcgagtcatccactcccgcagcaacgctaactccaacggtgccaccaccgcctcgtcgtcccaaccgacccgctccctcccccacaccgccgcctgcgccgccgcggccgtggcgctcctcgccgcggcgtactacctcctcccggactaccagagctcgagctcgaacccgacgcctccgcccccgaagccctcagatccgatcgcgcctccgccgccgcgacacgcggcggctgcggctgcggctgcggcgacggccgtgtcggatggcggcgaggcggtggaggacgccggcgagtggaccgaccaagagatggacatcctccgccgccagatggtgaagcacccggcgggtgagccgcagcggtgggagaagattgccgcggcgttcggcggccgccgcacgccggagagcgtaatccgcgcggcgaagtccggcggcggcgctgctgccgcgggggcctcgttcgaccagttcctccgcaagcgcaagccgctcgacccgaggtccgaggcgaccgacgcaggaagtggcaatgccggaggaggaggaggggagagtggtgatgggtcttggagcgccggcgatgaccgggcattgctcaacgcgctcaaggagttccccaaggacacggcgatgaggtgggagaaggtggcggtggcggtgcccgggaagacgaaggcagcttgcatgaagagggtcaccgagctcaagcgcgatttccggagcagcaaggcagcatcggaggcagctccatagctgcaaatgctacctagttgcctgcaattcttctttgagagtaaggttttagacagagatttaccatgatgaaacgagaaacgaaaagccatttgctccggggtgatgccaaatgaaggagacaactgaattatagaacagatggtgtacttttattgttttgagaaaggtcaggaaaaaaatccttgattcttgaagatactgggacacacgaaaacaaacagattgccagattgtaaaagaaattgtagccccttgtttggttgtagtgtcactcaagcctccatccaacatgtgttaacattacgtgactgtttctgctcatcttttgatanggctaatacgatacacactgttctcttccaaaaaaaaaaaaaaaaaaa

SEQ ID NO: 21898 - DNA, 2216 bp, Oryza sativa
  unsure (1)..(2216): unsure at all n locations
  Clone ID: TF_OsC44378_1
cggacgcgtgggcaagtatatcctctcttcttcttcttcctcctcacaactcacaatatttcagagtagtatacctttcttgctagctagctagcttgttcatcgatcttgttttgaggtgttgagatagctaggatggtggtgaagaaggcggcgacgatggcggaggcggaagcggaggaggagatgatgatgaggatgatgtgtggttcaggaggcaacgagatgatgaagacgaagatgaagaagaagaatagagaaggggaagaagaagaagaagtaagtggaggaggtaggatgaggaaggggccatggacggagcaggaggacgtccaactggtatggttcgtgcgcttgttcggggaacgtcggtgggatttcttagcaaaggtctcaggtttgcgcggtggcgggtgacctatctacgggaattctgcaccgactactcgctgtggaggatcgacgacgaggagtactacaagaagatgctcgatgcctcgcaatagtactactcaaattgcaaacaagcaacgccttaattcaattgctgctcttagcttaattagctgacgatcgatcgacgacgactctcatcatctgatgaacgaactgcgaaatctatatttgcactgcatatccttgcatctgtctactgtaattacacctgatgatgcacgtattatgcattgcttgtcagacaactctgctttatatatatctagctatagcttgatcaatcagcatgcctagcttgtgtacatgtaggggagagagtattagtagttaagactgatgggatcaagtgctatatgtatattgctttaatttcatggtatatgtactatgattgtactatgtgtcatatattcagtgtaagcagtggtttgcaattatttttttctttttttgaatgatctttttctttttcttttttctctctctcttatcatgcaacacccacacatgcatatatccatccatccatctatccccttatcacatttaatttcttcttcatatataccaatttggcaacagctaatgattctttttttatttgaaactctgaatgaattgatttagatgcatgcatcaatacaaataattgatttctttttatctggagctctgaaattgatttagatatgcatattgataaaacaaaatttgatattcatctgaaactctgaattggttaagatgcctacacataaatgttccattttcagttgtggggatcgatgtgatggcttttacatatatgcatgcgtaaattaacatgcggtgttgcatgatcgaagttaattaatctagaggcggtcgatgatcgatggatgatacagtacttaactaggagatggaggcatgcatgcatgagcttagaacgcacgggaaactgaggtgttaaccatctgcttcttcttcttcttcttcttcctcctcctctggatggctgtctccctggcacatgttggccttggtggtttcacctttcaggtttgaagcgcacaggcaagagctgccgtctccggtgggtgaactacctccaccccggcctccagcgcggccgcatcaccgccgacgaggagcgcctcatcctccacctccactcccagtggggcagccgctggtcccgcatcgcccgcagcctccccggccgcaccgacaacgagatcaagaacttctggcgaacccacatgcgcaagatcgcccaccacgccaagaagaagaccaattcaccatcgccggcgccgacgacctccttcggttccttgtccttctcgctcaccacggcgacgacgacgatggcgacggctgcggcgctgcaagaagcagcagctgcggcggcgacgacgaggccgtcgaccagctggtgggggggggcaccacgccggcgagccagctgctgacgatggactacaccatggaacacactctggaacgacatccgcgggggcggaagccgatacaagctgctacgacgcgggggggaagggctngccgccttcgcggtcttggaattctgcaccactactccctggggggatccccgcngagagtctccagaagatgctcgatgctcccaaagtccttcccaatggaacaagcacgcttaattaatggcggttttgctaattgcggagacgtcgacgaacctttaatttgttaaaaacgggaattttttgcctcggtctctgatgctctgattcaccgaa

SEQ ID NO: 21899 - DNA, 3461 bp, Oryza sativa
  Clone ID: TF_OsC11497_1
tttgtttcgtcttcttccccggcctttcttcctctctggctctccgctcgtgttcctctcgcgcggcggagatcgagggggcacaaccgcacaaattccattcgtttcgatccgtacgtttcggccttcccaaaatccccacttccatcatcacagcggtgctgcgggggggggggatgaggatcatgataaagggcggggtgtggaagaacacggaggacgagatcctcaaggccgccgtgatgaagtacggcaagaaccagtgggcgcgcatctcgtccctcctcgtccgcaagtccgccaagcagtgcaaggcccgctggtacgagtggctcgacccctccatcaagaagttatgttctcctcatgccatattgctgcaagcatacactgcttttgaagggctgatgactgaatggacaagggaagaggatgagaagttactgcatcttgctaaactcatgcctacgcagtggaggacaattgcccctggtgttggccggacaccgtctaggtaccttgagcgttatgaggaactccttcatggtgcctgtgaaaaggatgggaattatgagcctaatcatgaacgaaggaaagggcggcctggtgagattcacccgaaacccgagccaaaacctgaacatcatgatgctgttgacatgtctaatgctgatgatgatgaacttcgtagggcagattctcccagagccaagtccacaaggtaacgaccaagtggtgatgctcgaaaggaactctatttcgcaggacggtgacactgctaactgcaaaaatggatctaattaaatgatggtggtattgatacacggaagtgagagagacatagaaagggtatcgattacaatgctgatgttcgttttgataaaagtccgccaccaggtttttattatactgttggtgaggactcaacacatgagcatgcacagttcccaaccattatagaggagttttaagattagagaagagaagacatcgaagcacaattaagaaagcaagactttctcaggagcaaaattatacagaggcaggtggctctcgctgcatttgcacaggcaattaaactcaaggttccttaatcggtcacgaaaaggtccaagttaaagcttcttccaccctgaaactcttatcatttgctagtagggactgcaaacatgggtaatggcggcgatacatctttagttgaggaacttggcgaaggtagtactgccacaagagcattgctttctagttattcccaaactccaagacttgcaatgacgtgggtgcggacgccacaacgaactccagctgggaagggtgatgctattatgatggaggcagaaaatctagcgcgtctaagggagtctcagacccctcttttaggaggggataacccggagcttcacccatcagatttctctggtgttacaccacgtaagaaggaaatgcagactccaaatccaatggcaacacctttggcaagccctggccctggtgctactccaagaattggaatgacaccctccagagatggaagttcttttggtttaactccaaaaagtactcctttccgagatgagcttcgcataaatgaagaggtggatatgcaagatactgctaaacttgagcttcgtaggcaagctgaattgagaaaaagcctacgatctgggtttgcttctattccacagcctaagaatgagtaccagatagttatgccacctatcacggaggaggagaaggaagaagctgaagagaaaattgaggatatgtcagacaggcttgcacgagagagggctgaggaacaagcaaggcaggaagccttgctcagaaagagatccaaagttttgcagaggagcttgccaaggccaccggcagcttctatagaaattctccgacaaactctaattaagggtggtgaaagcagaagcaggagcaccttcgtgcctcctacatcacttgaacaagctgacgaactaataaatgaggagcttcttcggctccttgagcatgataatgctaaatatcctctagatgagaaaactcaaaaggataaaaagaaaggaagcaagcgccaggcgaatgggactccttctgtacctgagattgaagattttgatgaagacgaattaaaagaggccaattctatgcttgaggaggaggttcaataccttcgtgtcgccatgggacatgaaagtgaatctttggaagattttgtgaaagcacatgatgcatgccaagaggaccttatgttttttccaaataacaacagctatggtcttgccagcgttgctggaaattctgataagatagctgctttgcaatatgagtttgaaattgtgaagaagagaatggatgatgaagctaagaaggcttcgcggcttgagcagaaaatcaagcttctgacaccaaggataccaggtaggcttgggatgatgcaccataagcattgcaacatgtaccgagctggtaaactctggtcacaggttcaagatacattcaagcagatggacacttcagcaacagagcttgaatgctttcaagagctgcagaagcaggaacagatggctgcatcttatcgtataagaaatttgactgaagaagtaaacaaacagaaagcattagaacggactctccaaagccgctatggtgatctgttaactagttacaagaggatccaagagcagcttgaggagcataagaggcaactgatgatacaggaggaaatggaagcacagaagcgtgctcaggaggaggaggaaatggaagcacagaagcgtacgcaggcagaggaagaaaaagaagcggcgaaagctgaagaggaagcaagaaagatggatagggctgctgatgaagaagcggcaggaagcaaacaagtcaatgaggatcagatggatgttgacaactctaatgctgatggtgatgaattcgtaggtccgattcccccaggaccaggtactcaaggtgacgacaatgtggtggcggtcgaagagaactctagctcgcagagcggtgatactgctaccacggaagatggatcttgtggcatgatcgacgcatcaaaatcaggaggtcaggatcacatcgacagcaaggatgaacttcccactgttggtgccagtctagatgatggaagtgctgctgcatcttctgatcaagatgtctcaactgaggtgaatgccactgtccctgaatagaatgtcatttcttgtacttcatcttcgagggcggcacagagaaagctaagagggacggataccttgagagaaaaaaaagaagaggcaaattgaatgtccaaagctgtgcactgaatttttattcgctgcttgattgttagtgaacgacaaaatgcgggactaagcttgttgtacaatgttaattttgtcaattcccattgaggactctcagctcttagaattgctacgaaagaatgttagttcgatgtactatctgagaaattgaacttg

SEQ ID NO: 21900 - DNA, 909 bp, Oryza sativa
  unsure (1)..(909): unsure at all n locations
  Clone ID: TF_OsC44378_2
atggcggaggcggaagcggaggaggagatgatgatgaggatgatgtgtggttcaggaggcaacgagatgatgaagacgaagatgaagaagaagaatagagaaggggaagaagaagaagaagtaagtggaggaggtaggatgaggaaggggccatggacggagcaggaggacgtccaactggtatggttcgtgcgcttgttcggggaacgtcgttgggatttcttagcaaaggtctcaggtttgaagcgcacaggcaagagctgccgtctccggtgggtgaactacctccaccccggcctcaagcgcggccgcatcaccgccgacgaggagcgcctcatcctccacctccactcccagtggggcagccgctggtcccgcatcgcccgcagcctccccggccgcaccgacaacgagatcaagaacttctggcgaacccacatgcgcaagatcgcccaccacgccaagaagaagaccaattcaccatcgccggcgccgacgacctcctccggttccttgtcctcctcgctcaccacggcgacgacgacgatggcgacggctgcggcgctgcaagaaagcagcagctgcggcggcgacgacgaggccgtcgaccagctggtggcggcggccaccacgccggcgagccagctgctgacgatggactacaccatggaccagctctggaacgacatcgcggcggcggaagccgatacgagctgctacgacgcggcggcgatggcctcgccgccgtcgccggtctgggaattctgcaccgactactcgctgtggaggatcgacgacgaggagtactacaagaagatgctcgatgcctcgcaatagtactactcanattgcaaacaagcaacgccttgattcagttgctgctcttagcttaaataggtgacgatcgat

SEQ ID NO: 21901 - DNA, 1187 bp, Oryza sativa
  Clone ID: TF_OsC2083_1
agaattcagaactgccatttgctaccttacataccatacctagctgaattgctgtcagttaatctcttgatcagatcgatcaccctgcagcttcttgttgtttctagcatttctggtgaagaaaccaaatcttcagcagcttaaggtaggagatcatcaatggggaggcagccgtgctgcgacaaggtggggctgaagaaggggccatggacggcggaggaggaccagaagctcatcaccttcctcctcaccaacggccagtgctgctggcgcgccgtccccaagctcgccgggcttctccggtgcgggaagagctgcaggctacggtggacgaactacctccggccggatctcaagagggggctgctctccgacgccgaggagaagatcgtcgtcgacctacatgcccaattgggcaataggtggtctaagattgcgtctcatttgcctgggaggacggacaacgagatcaagaaccactggaacactcacatcaagaagaagctcaagaaaatggggatcgatcccctcacccacaggcccctccagccgccgccgtcgccgtcgccagagaagaagcacgcagagagaaagaacacggcggcggcggcggcggtggccgagcagcatcagcacgacgaactctgggaggaggagtccccgggattctgcaccgacgaggtgccgatgatccacccggacgagatcatggtgccattgcgcgaccacccgccgccggtttgcacggccgccggtgcctcgacgccgacgacatcgtcgtcgtcgtcgtcctcgtcggtggcctcctcgacgacgagctgcgacgaggtcgacgccgcggcgctgctcccggtcctggagtggcccgacgacgccatgtgcctgatggagctcgacgagctgatcgccgcggcggcgccgccgtccctgctgtgggacgacgactaccgcctcccgctgccgccgccgccgctatcgccgccggcgatgtacgaggagctagacgcctttcagtgctacgaccagcagaggagcgcgtttgagcaggaggcagcagcttcagcgtggaacaagcttgagctcttctaatcaatcaaaattaaactctgtaaattatgtttacagtgtttattataatcaataattaccgaactaaaacagaacagtgttgtttcattgttctaaaa

SEQ ID NO: 21902 - DNA, 1686 bp, Oryza sativa; identical to SEQ ID NO: 12433
  Clone ID: TF_OsC951_5

SEQ ID NO: 21903 - DNA, 940 bp, Oryza sativa
  Clone ID: TF_OsC351_7
caaaaccaacgcgaagctctcgtcgcgcacaaccaactcgacaccgcggcgaggcgaaccaacgcgcggcgtgggcatggggaggtcgccatgctgcgagaaggcgcacacgaacaagggggcgtggacgaaggaggaggaccagcggctgatcgcctacatcaaggcgcacggcgagggttgctggcggtcgctgcccaaggcggcggggctcctccgctgcggcaagagctgccgcctccgctggatgaactacctccgccccgacctcaagcgcggcaacttcaccgacgacgacgacgagctcatcatcaagctccacgcccttctcggcaacaagtggtcgttgattgcggggcagctgccggggaggacggacaacgagatcaagaactactggaacacgcacatcaagcgcaagctcctgagccggggcatcgacccgcagacgcaccggccggtcagcgccgggagcagcgccgccgcggcgagcgggctgaccacgacggccagcaccgccgcctttccgtcccttgcgccggcgccgccgccgcagcagcacaggctacacaacccggtgcacgccgcggcgccgagcaatgcgagcttcgccaggtccgcggcgtccccgccgtcggaggacggccacagcagcagcggcggcagctcggacgcgccgcggtgccccgacctcaacctcgacctcgacctcgacctgtccatgagcctgccgagctcgccgcccaagacgccggccgccgcgtcgtccacgaccgcgtcgcgccaccatcaccaccagcagcagaagaccatctgcctctgctaccacctcggcgtccgcaacggcgacgtctgcagctgcaaggcggccgcgccatcgccggccggcccacgcgcgttccggtttctcaggccactggaggagggccagtacatatag

SEQ ID NO: 21904 - DNA, 1951 bp, Oryza sativa
  Clone ID: TF_OsC8573_1
tttcctctcgaatccacgggtcaaaaattgcctccactcgcgcccattttcccaaaccctagccggacccggctcgccgccgcccgccgcccgccggctgcctacctcggcctgtcgggatccgtgcgcggaacatgcgggatcccggaccatggcgaccggacccgatctgaccccacccgccgccgccgcctccgccgaagcgccgtcggcgtcggcggccaagaaggaccgccacatcgtgagttggagcaccgaggaggatgatgtgcttcgtactcaaattgcgcttcatggaactgataagtatgaattcttcccacttcccatctcaattgactttttttttctagatttaatcaccatattttacactgtttttccttttcctttcggtagctggacaattatagcggcacaattcaaggacaagacggccagacagtgcaggagaagatggtacaattatttgaactcggagtgcaagaaaggagggtggtccagagaagaggacttgctattgtgtgagatttctgaattggcaaatatgcggtcggttacttcctcagtgagacaacaggccaggcatattgctatgcccatggaattgagcatgtacgctcaaaaagttcttgggaacaaatggactgaaatagcaaaggttgtctcaggcagaactgataatgcagtgaagaatcggttttctactctatgcaaaaggcgggccaaggatgacgagctattcaaggaaaatggatcattatgttccagtacaagttcaaagagggcattggtacaaactgggtgtctcacatctggtgcaagtggctctgcaccacctattaagcagatgaggccatgtaattctgatttcaaagagaatatgacaccaaatatgagattagttggacaagacaagagcacacaagattctcgacagcctcttgcaattgtttatcaaaacaatcaagataatatgaatacaatggatacccaaaatcttgttgctaaaactgcagcaaaacaattatttgcgggggaacagaattgcgttaagcatgagggtaattttttgaacaaggatgatccaaaaattgctactttattgcagcgagccgacttgctttgctccctagcaacgaaaataaatactgaaaatacaagccaaagcatggacgaagcctggcagcaactacagcatcatttggataagaaagatgataatgacatgtcagagagcagtatgtcgggaatggcttcactcctagaggatcttgacgatttaattgtagacccctatgagaatgaagaggaagaagaccaggatttaagggagcagaccgaacagattgatgtggagaacaagcaaaattcttcacaaactagcatggaagttacatcacaaatggttcctgacaataaaatggaggactgcccaaatgataagagcacagaagacaataatatggaaccgtgccctggtgaagacataccaacatctgaaaacttgactgaggctgctatcgaagatagcttgcttcaatgtgtggaatacagctctcctgtacacacagttattcaagctaaaacagatgcagaaatagcagcatcggagaatcttagcgaggttctcgaacataacaggcttcagtgtattcaattagcctcccctgctcagacaactaccccagttgaagcaaatgcagaaacaccagcttctgagaagttacgcgaggttgtcaaatgtaacaatccttcatgtatcgaattcacttcgcctgctcatacagtcccaacattcctgccgtacgcagatgacatgccgactccaaaatttactgctagtgagaggaattttttgctgtctgtgcttgagttgacctcgccagggtcgaggccagacacttctcagcagccttcttgcaaaagggctctccttaatagcctatga

SEQ ID NO: 21905 - DNA, 924 bp, Oryza sativa; identical to SEQ ID NO: 12441
  Clone ID: TF_OsC207688_1

SEQ ID NO: 21906 - DNA, 1355 bp, Oryza sativa
  Clone ID: TF_OsC808_1
tccgtctcctgctcccgccgctcttcacacggctaacgcctgcttggctgcgagacaaaccgaaccttttgctcttgcaccgcctgctagcgaactacgtgtgctcccgtgatcgatggggcgggcgccgtgctgcgagaagagcgggctgaagaaggggccgtggacgcccgaggaggacgagaagctcatcgcctacatcaaggagcacggccagggcaactggcgcacgctccccaagaatgccgggctctcgaggtgcgggaagagctgccggctgcggtggacgaactaccttaggccggacatcaagcgtggtcgcttctccttcgaggaggaggaggccatcatccagctccacagcatcctcggcaacaagtggtcagcgatcgcggcgcggctgccgggccggacggacaacgagatcaagaactactggaacacgcacatccgcaagcgcctcctccgcatgggcatagaccccgtgacccacgcgccgcgtctcgacctcctcgatctcacctccctcctcaagcccgccgccgccgccgcgtactaccccacgcaggccgacctcgacacgctccgcgcgctcgagccgctcgccggctacccggacctgctccgcctcgcctccgccatcctccccgccgccacgacgaccggcgcagccgccgccgccgccgccgagcaggcgcagcttctcctgccgtggctgcttcaggcgcagatggcgcagcagcaacagcaggtgacgccgccgccgccgccgccgccgcaggccgcggcgaccgaacagttcttgcaggccaccagcaccgcctgccaccaaatgccaggcctggttcacgccagcccgacgcagcagctggcgcagcaaccgcaggatcacatggcggcggcgacctgccaccgccgcggcgccgtgcagcacccgagctacgacaaccagctcgactacgtgccggcgctgatgcagatggcgtccgacgcgtccaacctgcagcagtggagcagcacggtctcgagtagcaacaaccacaacgtcaactccggcgtgtccacgccgtcgtcgagcccagcagccgccggacagatcaactcatcctctacgacgacgacgacgacgtatggcttgaacgcgagcggtgacgtcgacgacgctgggctgctcatcaacatgcacctatccgagctcctcgacgtgagcgactacatgtaataagatttttccttgcgtggaaacagagccgaatcgaacactccacgccatgtaccaaaggggcaaaacatgatcatcacaagaggcaatttttgtacaggattgtaccaaaaaaaaaaaaaaaaaaaaaaaa

SEQ ID NO: 21907 - DNA, 2918 bp, Oryza sativa
  Clone ID: TF_OsC9889_1
gatcgctccccccctaattcccgccttgccccctcctgggcatgtcgccgccggtggccggcgccgcctcctccggcgacgggccgccggggcgcccgccgcgcgagctctacaccatccctgcctcctcgggttggttccagtgggatgagatccacgagacggagcggcgggcgctgccggagttcttcggcggcgccggggggagcgggttcgggacggcgtcgcggaacccgcggatctacagggagtaccgcgactacatcatcagcaggtaccgcgaggacacctcccgccgcctcaccttcaccgaggtccgcaaggcgctcgtcggcgacgtcacgctcctccggaagctcttcgccttcctcgactcctcgggcctcatcaacttctccgcctccccctcccgccccgaggcgcagcagcagcagcggcagacggaggcggaggcccggagggaggcgcccggggggctgcaggtgaggccaaggccgctcctggagtcctccgcggaggagaagggggggcggggcaaggagaactggttctgtttgccgccgctgacctcgtatagtgatgtatttggagagtgggcgcctgggatggcgcctatatgtgggctctgtggcatggagtgcagagacgggaatgcccaaatattgaaggatggttttaaagtatgctcaaaatgttatgccaataatgataataagggtgaagcaaatatacatccaggtgacaaaaaggagcggatcgacaatcattcttctagtgcatggacagatgcagaaactctccttctcttggaaggtgtactaaaacatggagatgactgggatctcatcgcccagcatgtccgcacaaagaataaatcagaatgcattgcaaggctaattcagttgccttttggtgaacatatgctgggcacagtaaatggtaaattggataacagactccataaaatccaaacaaccgatggaaaagtgaacaagtccactgtgaaggagtcttcaagtcaaccaactgaaacagttgatgacatgcagattgatggaaatgaagatggcgctgataaatctgttgaagaacatcctacaaaacatagacggttgttttcttcaatagatatcactgtctcattaatggagcagttagcgcatcttaccacatcgacaagcccagatgttgttgctgcagctgctgatgccgcaattaaagcactgggtaatgaaaacccccaagcaaggagagcttttcaactcagtgagaaagagtaccaaaccagggcattctcttctaaccatgcccggcagagggattattgcagtgatgatgttggtggtggtgatcgggatgtagaaatgcacgggcacccagaccaggaagaacgggaaatggagctcctaatggcgtccataatagaaactcagctaaaaaagatccaatacaagatcaaacactttgaggagctagagttgatcatggatcaggaatacgctactctacagcaaatgaagtcttcccttgtcgatgaatggcaaaagcaaagccagcaattcggtgtttggagaattggagccatcctgaaccgtttagggtttgatcggacggctggtatggaatctcacagaagggcaccaccatttttccccaacgcggagcggcggaggcggcagccaaaaacccctccctcctcccctcctggactctcggtttcccctaacctcgcgcgccacctctcctctcctcgtcctccgcctccggacgcgcagttcacgggcgccctaatggcgaaaaagggcaaggcggcggcggcggaggccgcggcgcccgacgcgggggtatccggcccgcagggcggcggcggggagaaggagggcagcttcctgctgggctcgccgacctgggaggacgccgggggcgggcggtggcggtgcaaggagacggggcacgagctgccggagcgggagaaggaggcgtacgggcggtcccgcgcgtgcaggctcgcgctcatcgaccaagccgtcgcgcgcaagaagccgccgctcaacgccttcaagcctcaccccgagcacaagtcgaagcttatatgcaatattactggggacattataaacaagtcggaggaacacatctggaagcacatcaatgggaagaggttcctcaacaaactagaaaaactagaagaaaagatggcatcaggtgaaatggccgaaggtgaagctgaacagtcaaatgaaggggaaaataaaaccaagtcaaggaagaagaaggacaagaagaaagctgctgttgttaacccttctttgccacgagaacctaaaccagagattgatgattcagataattctgatgatccagatttctgggtgcctcctgttggaagtcgttgggatgatgatgatggaaaagaccgatggacctcctctccagtgaaggataaggatgatgcagcagaggatgaagatggtgatgacgatggtgatgacatggctgacaaggatgacaaggagacaagagaaattgcttcaaggacaaagcgactgtcagtagaagcagttggcccaagtagcttcgcttcaaggaagaaaaaaaccaaaaaggagcagtaaaggttggtccacagcttatcatcgagttcaatgaagaacttatttgatctttctgtgtggacgaacaaagtccatctttgattcctcttggctggctagtcaggtgcgggttttgtattaattggtttgcttttagttagtgcttctctgtgtagccctatcgctgcacctttcagtggtatactattgcatgacaattctctatacttgcattagttaattcctgtgattttgatgtgagaatgaactgtgctacttgtcctatatttattcttgctatataacttcatatgtttcttttgt

SEQ ID NO: 21908 - DNA, 1217 bp, Oryza sativa
  Clone ID: TF_4138298
ccagatcgctcagtctcacaccgcacagagacagagaagagctctagagagaacgagagagagagacagagagagagagagagagggagaatggggaggagagcttgctgcgcaaaggaagggatgaagagaggggcatggacgagcaaggaggacgacgtgcttgcctcctacatcaagtcccatggcgaaggcaagtggcgcgaggtcccccaacgagctggtttgaggcggtgcggcaagagctgcaggctccggtggctcaactatctccggcctaacatcaagcgcggcaacatcgacgacgacgaggaggagctcatcgtcaggctccacaccctcctcggcaacaggtggtctctcattgcaggcaggctgccgggccgaacagacaatgaaatcaagaactactggaacagcacgctcagccgcaagatcggcaccgccgccaccgccgccgccggcagccgcggtggcagcacgccggacaccgccagagcgacggacgcggcgtcgtccagctccgtcgtgccgccgggccagcagcagcagccagcctcccgcgccgacaccgacacagcaacggcagcggcggcggcggcggcgacgacgaccaccgtgtgggcgcccaaggccgtgcggtgcacgcgcgggttcttcttccacgaccgtgaaacggcgccgctcgccgcggcggcgccggcgccggcaggggaattaggagacggcgatgacgtcgactgcgactactactgcagcggcagcagctcggcggcgacgacgacgtcgtcgagctcattaccggcggtcgtcgagccgtgcttctccgccggcgacgactggatggacgacgtgagagccttggcgtcgtttcttgacaccgacgacgcctggaacttgtgtgcgtgacattagttcgtcgtccgtacgtacctacgtatatgcatgtgtgcgtctcatagaatgaatataaaataatattttctccatctattttaagtgcagttgcgggtttccgtatataaaattaacgattttgctatatatttgtcgataaattttctcctaaaaatttgacagatgtaattacagtacaatcgtagtataattacactgtaactttcatgtaattacactgtaactatagtgtaacttgtatgtaactttcaaaaatctctttgtaatatgttatttcggtaaaaaaaaaaaaaaaaaaa

SEQ ID NO: 21909 - DNA, 1212 bp, Oryza sativa; identical to SEQ ID NO: 12437
  Clone ID: TF_OsC373_1

SEQ ID NO: 21910 - DNA, 1461 bp, Oryza sativa
  Clone ID: TF_OsC490_1
taacgcaaaagcctagtcgtctcatactcttcttgttcagttcttctcctcccaaatctttctgctataaaaggcattcgggtctctctctccgaatcccagctgcacacttgcatcttctctctctctctcttcttcttcttcttcttctccatatctcctactcctcgtgaagatcgatcgaccatcggcaatttcattcggtaatagttaagctaagatcaaatcaagatcggcgaaacgatggagatggtgctgcagaggacgagccaccacccggtgcccggggagcagcaggaggcggcggcggagctgtcgtcggctgagctccggcgagggccgtggaccgtcgacgaggacctcaccctcatcaattacatctctgatcacggcgagggccgctggaacgcactcgcacgcgccgccggtctgaagaggactgggaagagctgccggctccggtggctgaactatctccggccggatgtgaagcgcggcaacttcaccgcagaggagcagctgctcatcctcgacctccactcccgatggggcaaccggtggtccaagatagcacagcatttgcctgggaggaccgacaacgagatcaagaactactggaggaccagagtgcaaaagcatgccaagcaactcaattgtgatgtcaacagcaagaggttcaaggatgccatgaagtacctatggatgcctcgccttgccgagcgcatccatgccagggctggcgctgttgatgatagcggagactacagcaacaacgacttatcatgtgtatctggtgtaacaatggccactgttgctaattgttttgatggctctccgagcatggtgactagctcatcttccgattcgttcacgtcggagtcacaagatttgaagaagattaacttacatgtgcatggtgatgatgagaagatgaactctgaagactggatgcaggaggtggaccatgagttttggtctacagagattcagcctaataatgaacagtttcaggaccaacagcttaacggttgggtgcaaggtttttctgagggtttgtccgaaactctatggagtctagaggacatatggaagatgcaataaattttacatttacaaaggacatatttgtaaaatagaatagagagacatcaaggaaggcaaagagaaaaagttctttagttcatatactgtacgttgagacacttaagttctttgccaacttcaatgttttttttcttttatttttgctgcctctttcgatccctgaaggggtttttgccttctagatgtctaggggttcaaagaggaccagaggagatatatatgtgtttggatatgttgatatatgagctgatatatgccttactatatatatactccagaattgcactgaggattacatatccaattcagacatgcaaaccttaccagttgcaatattgtaaaaaaaaaaaaaaaaaa

SEQ ID NO: 21911 - DNA, 228 bp, Oryza sativa; identical to SEQ ID NO: 12449
  Clone ID: TF_OsC411024_1

SEQ ID NO: 21912 - DNA, 1276 bp, Oryza sativa
  Clone ID: TF_OsC6000_3
atggggatgggcaggggaggtgcagttcagtgcaccgcgcgcgcgggagccgccacgacgacgacgacgatgggggagtggatcgtgccgggcccacatgtcaatgacgaggaagaaaacgacaacggccccgggatcagggggccgtggagccccgaggaggacgaggcgctgcggcggctggtggagcggcacggcgcgaggaactggacggcgatcgggcgggagatccccgggaggtcggggaagtcgtgccggctgcggtggtgcaaccagctctcgccgcaggtggagcggcggccgttcaccgccgaggaggacgccaccatcctccgcgcacacgcgcggctcgggaacaggtgggccgccatcgcgcgcctcctccagggccgcaccgacaacgccgtgaagaaccactggaactgctccctcaagcgcaagctcgccgtcgccaccaccaccaccaccaccaccaccggcgccgccgccgcgccgggagtggtcgccgatgccgccgagctcgtcgagcggccgtgcaagcggttcagccccacgccggacagcccgtcggggtctggttccgggtcggaccgcagcgacctcagccacggcggcgggttcgggcagattttccggccggtggcgaggaccggcgcgttcgagcccgtcgactgcgccatcagccggcggcaggaggaggatcccttcacctcgctctccctctcgctccctgggacggatcagcggttcaaccacgacagcgcccacagccacttccaagaactcccgtcctccccctcgccgccaccaccacctccccccgccgccgccgcctcgacgacacagtacccgttcaccccggagttcgccgccgcgatgcaggagatgatccgcgccgaggtgcacaagtacatggcgagcgtcggcgtccgcgccgggtgcggcgacgccggcggtgccgacctccacatgccgcagctggtggagggcgtcatgcgcgccgccgcggagcgcgtcgggaggatgcactgatcaaaaacctagcgtccattagaatctctactatcgtttcaactttttttttccttaaaaatttgtttccaaaactgctgtgaaaaccgaaacagcagtccgaaacggaagaaccaaaaaaaaatgcgaggagagatgggaaagaaatgtttcgagctacgaaaaaaaaccgaaaagctcggctacctatgtacaggaaatggaaatggaaatgcaaatgggggaagtgagtggtgaatcatgc

SEQ ID NO: 21913 - DNA, 2407 bp, Oryza sativa
  Clone ID: TF_OsC9332_1
atggcgagagcacctggtggcgttcgccgaaggagcgggaggaggggcgcgggcggcggcggcgccggaggcggaggcgaggcgctgcggaagggcccgtggatggcggaggaggacgaggttctgctggagcacgtccgcacccacggccccatggactggagctccattcgatccaaaggcctcttgccgcgcaccggcaagtcctgccgcctccgctgggtgaacaagctcaggccaaacctcaagagcggttgcaagtttactgccgaggaagagagggtggtgatcgagttgcaggcgcagttcgggaacaagtgggcgaggatcgcgacctacttgcagggcaggacggacaacgacgtgaagaatttctggagcactcggcagaagcggctcgccaggctcctccgcgggcctctccctgctgcacggcccaacaagcacaacagcggcaagggcaaagcgccctcgtcatcttctctcgactcccaaacagccacgttccaccagagctcggcctccctggatcaagcttcattggagggcaactccctcggctggcaatgccgcgaggctgcaccgttcatgggatatgatcaggcatgctccgggttcttcgctttcgaggggccactgccgctgcagctactaccacccgccgacggcgaggcgagctcgtccaatgcagctcagtcggcgccaccaccgctgctgttcgaccagcctccgtaccctctgatcaacttccccgtggcttgagcggtggtgacaccgctcgcctccgtccgcctcgcctccaccgagaggttctctctgccgccgattcagatttacagggagattatcttgtgatctgtaaacatgtttgggcgtgtaccgaggagtaacaacaccaagtactatgaggttcttggagttcctaaaactgcaagcaaggatgagctaaagaaggcataccggaaggctgccataaaaaaccatcctgacaagggaggggatccagaaaagtttaaagaattatcacaagcgtatgaggttctcactgatcctgagaagagagacatatatgaccaatatggggaggatgctcttaaggatggaatgggaggaggcagtgacttccataatccatttgacatatttgagcagtttttcgggggtggtgcctttggggggagtagctcaagagtacgcagacagagacgtggtgaagatgtggcgcatactttgaaggtgtctttagaagatgtgtataatggatctatgaagaaactatcattatcacgaaatattctgtgcccaaagtgcaaaggaaaagggaccaaatctgaggctccagcaacatgctatggttgtcatggtgtaggaatgaggaatataatgcgacagataggactaggcatgattcaacatatgcagactgtctgtcctgaatgcagaggatcaggtgagatcataagtgacagggataaatgcacaaactgcagagctagcaaagttattcaggagaaaaaggtgcttgaggttcatattgagaagggaatgcaacatggccaaaaaattgtattccaaggtgaagctgatgaagctcctgatacagtgacaggagatatagtatttatcttgcaagttaaggtacatccaagatttaagaggaaatatgatgacctgttcattgagcgcacaatctctttaactgaggcattgtgtgggttccaattcatcctcactcatctggacagtaggcagctcctaatcaaggcaaatcctggcgaaattattaaacctggtcaacacaaggccataaatgatgagggaatgccacaccatggccggcctttcatgaagggccgtctctttgtggaattcaatgttgagttccctgaatctggtgtactctcccgtgaccaatgccgggcacttgagatgatcctaccacctaaacctgggcaccaattatcagatatggacctggatcaatgtgaggaaactaccatgcatgatgtgaacatagaagaggagatgaggcgcaagcagtatcaaaggaagcaggaagcgtacgacgaagatgaggaggaggatgctccaagagtacagtgtgctcaacagtaagaagtgtcactttctggcgcaagtgatgatactccatgtaaactaagtagtttttggtgagactgttcattttagtgtattttgtactagttaaattaaatagtgaatgtctaagttgtgtcgtttgatatataagcttgtgctaacaacataaggctttcttggccttcataagatatactcctacctaggagaaagtggtggatgagcattcgtttctgtttttattggtaatgaacatatttacatgttgtattgaaaaaaaaaaaaaaaaattcctgcgcccggggga

SEQ ID NO: 21914 - DNA, 556 bp, Oryza sativa
  Clone ID: TF_OsC358016_1
tcaccagtaaggcatgccaaatacaagttgctgctgctgcacaccagtttgtaatttgccttgcaaatattgtagctggttttggtggttgtgccaattcatcatcatcatcagcgcgtcgtccgtgctccggtccggcggcgaagacgtcgtcgtagccgcgtccttcttctccgactccgacgtgcatgccgccgctactggtgctagcaacgtgcagctggtgggcggcgaggaggaggaccggcctggtgccgacggcggcgtggagggcgaggatgaggcggtcgtcgtggtcggagaaggcgccgtggcggatgccggggcggaggtagttgagccagcggaggcggcagctcttgccgcagcggcggaggccatccagttgccgccggtgccgtgctgctggatgtacgaccgcagccgctcgtcgtcctccgccgtccatgccccgcgcttcggcttcaccgccgccttgtcgcagcacgccgacgacctccccatcgctcgctcgctcgatcgaaagggagatgcgagagtggccaggataatataa

SEQ ID NO: 21915 - DNA, 767 bp, Oryza sativa
  unsure (1)..(767): unsure at all n locations
  Clone ID: TF_OsC351_17
gggggggcgggggggcgtccgcccacgcgtccgtgaccggctcattgcctacatcaaggcgcacggcgaangttgctgggtatcggtgcccaagggcggcgggcgtcctccgctgtggcaagagctgccgcctccggtggatcaactacctccggcctggcctcaagcgcggcaacttcaccgaggaggaggatgagctgatcatcaagcttcacaggcttttaggcaacaaggacgtggggtcatctcaatgatactaggatttggatgcatgaatatgagcgttctctatatatagttttataacaataatttttttttctttgactggaaaataggcaccatgcagtcatgtatgatggtcaaggaggtactgttcagtgcactagcaagcccaaactaggagatattagacgttaaagtgggaaagtaatggaaattctgtggccagatgtgcaacatcttctatcccacctgaagactgatccaaactcttcagtttacgcagctactcaccccaagttagttcaaaacccatcttagtattacaaggccatggaggagaactgacatatttcagtcggaaagatgggaggttgttcgaatgtgtttctagaaagcgagattctaattgccgctgcttgttaaatagaaaatttgcttgctccttatggccatcacaaattcatgaatgaaaattagcctgttaaatgaaaattacaagttcatgaatgttgtaaaatagaccagacctcatcccctagatc

SEQ ID NO: 21916 - DNA, 1170 bp, Oryza sativa
  Clone ID: TF_OsC2658_1
ccgcgcttcctcccttccgcgctcccccctctcccggcgcgctcccgtactcgtgcggccatgggcaacctcgccgccgccgccgccgcctcctccgccgcagccggcggcggcggcgccggggacgccgggcaatgcccgtcaccgggcgtcccatcgccggtgggggtgcgccttcttctcaacccccgtgttaccgcccccctgcctcacaccttcggcttcaccccatatcctccccaggcctcacgctggatcgggcgacgggtacccctccgacggtgggctgctgctgtcctccggcaagcggcggcgcgcgcaggagaggaagaaagctgtcccttggactgaagaagagcaccgaacatttcttgctggtcttgaaaagctaggaaagggggactggaggggtatatctaagaactcggttacccacgcgtccccaactcaagtggctagtcatgctcagaaatattttcttagacaaactaatccaaacaagaagaagcgcagatcaagcctttttgatatgatggcaactgatatgtcaccagcaccaaactgccctgtcttgccaccatcaatgggaaaattacatgatatggtagctatgactaaacaactccagaacagcagtttggaaggagtctcatcttcaagcacagttaatctagcaccacaagttgcaagagatcttcctcccccaattccatcttttaaagcaacaaatgtagattcaagtctcagcaaaatgaaccacatggacggtttcttgagggcgcccatgctgttcagaccaattccaagaatcgctgaaggggcatcttcatcgactcctgcaactgcaagcatagctgatctggaatttcaagctaacctgactgcatgttctaatgcattattcgcgagtccgagaagaaagccaaagaaggcagatcctccagcagagaaggatctggatctgacagttgccccaccctcccaacaaaccagggccagtatttcttcccagaacgcagtaggcgtaattcaagtcgtatagactgataattttttttggggagttttaactatgttgttgaatgtttacaaaaataaacattaacattatattagcgatacaccaataaaagaaggaattaaagataaaaaaaaaaaacacaccccccc

SEQ ID NO: 21917 - DNA, 1411 bp, Oryza sativa
  Clone ID: TF_OsC351_5
atgaggaagccggattgcggcggcgggggaggggcggcgaagggcggcggcgttctgggtgtggcgggagggaacaatgcggcggtggtgggggggaaggttcggaaggggctgtggtcgccggaggaggacgagaagctggtggcgtacatgctgcggagcgggcaggggtcgtggagcgacgtggcgaggaacgccgggctgcagcgctgcggcaagagctgccgcctccggtggatcaactacctccgccccgacctcaagcgcggcgccttctcgccgcaggaggaggacctcatcgtcaacctccacgccatcctcggcaacaggtggtctcagatcgctgcccggctaccggggcgcaccgacaacgagatcaagaacttctggaactccaccatcaagaagcgcctcaagatctcctcctcctcggcgtctccggccaccaccaccgactgcgcctccccgccggagcacaagctcggcgccgtcgtcgacctcgccggcggcggcggcgccacggacgacgtcgttgtcgggacagctaatgctgccatgaagagcatgtgggtggattcctcgtcgtcgtcgtcgtcgtcttcctcgtcgatgcagagccggccgtcgataatggcggcggcggcggcggggaggagctacggcggcctcctcccactccccgaccaggtctgcggcgtcgacacctcgccgccaccgccgttcttccacgaccactccatctccatcaagcaagcatactacggatcaaccggcgcccaccaccaccaccacgcgatcgccaccatggacggatcaagcttaataggagatcatcaccatcacagcagcagcatcctctttggcggcgcatcagtgccacctctcctagaccaccaaaccattctcgacgacgacgacgaccaccctaacaaaaccggcagcaacacgaccgcggccacactgagcagcaacatcacagacaacagcaacagcaacaagaacaacagtgataataacaacaacatcagcagcagctgctgcattagcctaatgaacagcagcagcaacatgatctattgggagggtcaccaccaacaacagcagcagcagcatcagatgctgcagcagcagcagcagcacatgagcaggaatgtcatgggagagtgggacttggaggagctgatgaaagatgtgtcatccttgcctttccttgatttccaagttgaatgattgagagggaggggccccatctatagctgccaaaggagtacattgcatatatatccaattatacatatatatacatacatacacattgaaggtagtatttttttccattgacacatatattctctcttccaaatgtacaagatttctcacaccaactccacccccgatcttgcatatatat

SEQ ID NO: 21918 - DNA, 1578 bp, Oryza sativa
  Clone ID: TF_OsC2381_1
ttttttttttttttttttttgaaaataactcttgggtcaatgttccaatttttttcctttacaaatatacaactgcactttgtcggcaacttctcaaaagaaataaaaatacaacatgcaataattaatttgcatgtacgtgcatggtagcagttgaaaagcttgggactacttgtatggtttgtgagagctaccgacacatgttttgcccatgcgtgtctatatttatttgataaacagagtgaaccaaaactcaagtatccaaaagttgagttgtcgtgtacaaaaaacagcaaatttcaagagaaaagagggagactctagaacgtacttttctatcccttcttctgctactcgtaaggccagagctgtcttttccatgacactgtaggatctttaagtgaggagaaagtgttgaggtcgattctgtgtcaaaacatcaaacacttcagtgttttgcctgccaatcaatatgcgagagttacaagtttctgcttcttctgatctctgctctgttccatgcatggcgtagcattgcacctagatatgttcaaaagacaagggcaatctttgcaagtctttatcatacatgtctgatgctgcttgcagctgttgttgtggttgctgattctggaaccaagaggcacatatcccttccatgttgaattggctctctgccttgatcacatcatcgtataatgattggctctggttctgcatggctgtcgtcgcctcagcaaaggttccatggagcaaatcaggccacttgagttcctccactaagtgaactctggtatctttctcttgtccgatatctgtccatgggaatacactgttctccaaaattgaggttgtgctctgtggctcgaatcccatactgttgcttccgctgctcccagtactgccgctgctgctaggattggaaccatcccagtagaacggggtgttgccaatgccagtgcctccgtgacgaggattttctgggggaagattcagccccattgatgttgagagggctgatggtgaaactggtggcatcacggtggagattgtgctgcagttgaaatcattctggttgaaccagagtgaattcatactcgcaccatccccagtgccacattcattactgtagcctaatggttgctggaaaggaaaatacagggttggacctgatgagcggcaacttgatgggctctcgtgaccggcagtaagctggtcaagaaacaactcctttggtggcaccttagggcgtggcaagcttgcagtttcagggtgattcttatcatacaccggcagcagcattgatgattgtgctgtctcgctgaggaggtggctcaagttccctagagcacccgcacttgacgggttgacgtcgctggaccctgaggtcctctcggtgctgactgtgggtgctgctcccctgcgatcagcctcggtgaggggcttgtgggtgttgggatcaatgcctttctgccggagcttcttcttgatgcaagaattccagcgattcttgatctcgttgtcagtcctcccaggcagctgagctgcaatctgagaccaccttctcatggaaaaatc

SEQ ID NO: 21919 - DNA, 813 bp, Oryza sativa
  Clone ID: TF_OsC257872_1
gcacgagggtagccatcttgtgtatcgaatagctatagctctccagcagattgatcagtgacgacgacgacgatggcggcaatggcggcggcggcggcggggacgaagaagaaggcgaggaagccgtacacgatcacgaggccgcgggagaggtggtccgccgaggagcacgagcgcttccttgacgccctgattctgttcggccgtgactggaagaggatcgaagcgttcgtcgccaccaagacggccatccagattcgcagccatgcccagaagcattttctgaaggcccgcaagttcggcctcgccggtgggctcccgccgccgcttcaccctcgccgtgccacgctgctccgggccaacgccgcggcggcggacatgatgccgcccccgtggctgccatcggccggcggcggctccatcggttgctcggcgccaccgtccggcgtgcagcagagcatggccggcaggtcgccggcgtgctactcaactgatgaagcttctttccggccattgattcatagcaatgacaatgactgttcattcatcgagacaccaagctgcatcggatcaggtggcgaatcatggatcggtgatgatgccttcttcatgcaggatgaaacaattcggctcccaatttctccagatgacctgggattcgctcaggtgtacaagttcgtcggcgacatgttcggctccggcgagcggcggccggtggaggctcacctgcggaggctgcagggcatggaccctgccatctcggagacgatcttgctggtgcttaagaatctcgaagctaatctatctgcttaa

SEQ ID NO: 21920 - DNA, 797 bp, Oryza sativa
  unsure (1)..(797): unsure at all n locations
  Clone ID: TF_LIB4371-008-R1-K1-H5
gatatattactgggcattcaagcttagattttcagaggattgatggggataacgatagatcagaaaatgatggggatagttggactgatcaagaaacgttattgctgttggagggcatagagaagtacaatgacaactggaataacattgcagagcatgttggaacaaagtcaaaagcacaatgtatgtaccattttattcgtcttcctgttgaagatggtttgttagagaatattgaggtgccagatgcatctgtgccatttagagcagaaaccaatggatacccacatttagattgcaatggcagtacttcaggttgggtttttggcttctgctatgggaccaagagttgcagcatcatgtgcaagtgctgctttatcagttttgacagtagatgatgattccagggtgaattcagaaggcatttgctctgattctaggggccaaggtccgcatccgaattttcgtgatcataatggtggtgtatcttcatccatctctccagaaaaggtgaagcatgctgccatgtgtggtttgtcggcagcagctacgaaggctaaactttttgcagatcaagaggaacgtgaaatccaaagactaactgctactgtaataaaccatcagttaaaaaggttggaactgaagctgaagcagtttgccgaagtcgagaccttgcttttgaaagatgcgagcaagtggagagaataaggcagaggattgcatctgaccgtgtccgaatcgtgtncacccgcttggcctcgcctggaaatagcctacctggggggtagtactagcac

SEQ ID NO: 21921 - DNA, 2091 bp, Oryza sativa
  Clone ID: TF_OsC13695_1
tttttttttttttttttttttgcatccaacatttcctcgtctttccattgcattttgtggagagatacaagcctagattacatgtagttagcctatggcaacccctgtccgagattcaggttgataaaaggcaacattgacagccactcaactctgaacgtattcgagttggggataaaattacaggcaaagtaaaaaaaaaagtacaaaagttgttatcttacagattatacaatactatatcgacgagtaaaaaccagaattgctcttccattttctggaaaactaaagtggtctcgagcaacatcctaacagcaggacatgcctcttcttcccgccttaatctcatgtcagatttgttatttgtcacctacgaatagtagtactgtggcgtgacgtgtccgtgcgacgagtcagttgtcacaagcacagccttgtcagctcaccgtcggcgacggcctcctctcctccggcggcctccgatcgcagcagctcgctctccgccgcgcacctcttgtacggcatgaagcccctctgcagcagggtgacggacgccgagctctcgcacttggtcagccgtggcgaggccgccgcctccctgctgttcccttggccacgggactccgcgacgtccgaattctgagccgccgccgccgccgccggtaccgccgccgacgatccaagcacgacgctggaggccgtgttcgagcccgtcagcgatccttccctctgcgagactctgaactctacgccctctgaatcacggtggcactgctggttcgcagccgccgccgccgccgggtagaacagcgcgcatggaaggctcccgttgtagctcaaccatggcatgacaggttgcgcggcgaaaccatccgatcgaggaaggaagtagagaaactgttgcatgctgctcggccatggattcgacgagctcccttctggggcagcagcaaaagaaggtactagtatgtttctggttgctctctcaactgaaccactcgttgcaatgttactgccattaagcaggtgcagctggtctgaatccttaaccactacgctctttccgaatagcctgaagactgatgcttctgaggatgcttctttggcatccgtggttgcaattgacatcttagtatttggcgcctgcatagccaactcagcagtcgggatgctcggtgagaggcacccgtcctctctgtccaccgacgacgccggcgagccgccaccgtcgacatgctcatccgtaccggcggctgacggagccagcgacccgctgccgctcgagttattcgagaacccaccgcccagggcctcggtgcctatctgcgccgccgtcagcaccgacgtcggcgagccctcctcctgctcggacagggactgcatccacaacggcggcttctccagctgcctgagcgccgggacgtgcttcttggccgcgccgtccaccttgcgcgggtacgggtgcgccggcttcctcttcggccgcggcggagggatctggatggccgccgccgccgccgcggcggacgcgccgcccgagccggtgttactccccgaagattctctgacgaccttagagaagaacttctgcgcgtggctacggatttgcacggcagtcttggtacctatgtgctcttgtatacggcgccatgcgcggccgtgcagctgcagggcttccaagaacagcctgtgctcctcgtccgtccacttctcgcgctgcttcgtgatcgtgtacggctttcgcgcctttggcacgtgctcttcccctgacaaatccatgtcgccgtagttcatatggctcctgagatgatccacggtgctctcgccgccggcgcgatcgtcggcaccgttttcgtcggttgccatggcgtttcccggcaaacaggccatctccattctgaaaaaaccgaactcctcccaaaccaaaccacactccacaggatcgccacaccaaagccaaaaaatcagcgcctcccaaaccccgcaatctttgcgagttttctcctcgatgttgttgatgaggacgacgagatggggggagatgaggaggagaagggaacgaggaggcaaagaagcgagcgttacgtaggc

SEQ ID NO: 21922 - DNA, 1363 bp, Oryza sativa
  Clone ID: TF_OsC351_6
cgccatggcgccaccatgcatataaactcgagctccctctcctcctcttcttcctcctctccactctccaccatcgtcttcgtcgtcgtcttcctcagctcggagcgatggggaggtcgccgtgctgcgagaaggcgcacacgaacaagggcgcgtggaccaaggaggaggaccagcgcctcatcgcccacatcaaccagcacggcgagggctgctggaggtcgctccccaaggccgccgggttgctgcgttgcgggaagagctgccgcctccggtggatcaactacctccgccccgacctcaagcgcggcaacttcaccgacgaggaagacgagctcatcatcaagctccacgagctcctcggcaacaagtggtcgctgatcgccgggaggctgccggggaggacggacaacgagatcaagaactactggaacacccacatcaagcgcaagctcctcgcccgcggcctcgacccgctcacgcaccgcccgctcaatgccgccgccgccgtcgccggccaccaccacctcgccgccggcggctccagctgctcgcccgacgcaacaagcggccacagcagctgcagcgacggcgacgagtaccgcggcggcatcgacctcaacctgtccataagcccgccgtcgtcgtcgtcccagccgtcttccccgccgccgccgccgcacgaagcagaggcgagacgcgccggagcgacggcgagctacacctaccaccaccactactcggagacgagggagaagatatgcctgtgcttgaaccacctcgggctgcacggcggcgacgagtgcagctgcggcggctcgtcggcctcttcctcctcctcgccgccgccggcgacggcgagctcgcgagcgttcacattcgccaatgcatcgtcgtcaacagtgtaaaacacagagaaattcagcgattttcagactaagagaattaatgagaggtagagcacatgcatgctgaattaattgaattaactcaatccaagcttgagctaggcatctagctaactttgtgatttgatcatgatcagctagcaaaatcatcataatcatcatcctaggcatggccggccaagatcggagggtgatcccaagtcgaggcctttgctcttcggaaaaccaatcaacggttgggattgatgcatttgaaagagggtatgcgtaaatggtgcatgttgttgtgaattttccccttaagattaattcgggggtttgtgccattaactagaagtgttattacttctccaaatggaaatacttagatctttgttttttttttggagaaatagaactatttgttggtgtagtacctatacatgttttcaataaaagatgtgggtgggtaatgt

SEQ ID NO: 21923 - DNA, 1262 bp, Oryza sativa
  Clone ID: TF_OsC2008_2
ttagagcccaacaataataatccccccttttcatcgcggcgacgatacccgccattttcatctcattctcaccaccaaaagcgaccacgcagcgaccggccaccgatcgagatggagcagcatgaggaggcagcggagaggaagccttcgccgccggtgatattccggctgttcggcgtcgaggtccgcggcggcggcggcggagttgacgaggaggagtacgaggaggaggaggtggagggtggattgttcatcaagaagagctccagtatgcccaacctcacctccatcgacccgctgccggtgccggccgacggcggcaaacggcgcgcctccgacgactccgagctcgcctccggccagcagaagcgccgccgccgcaaggtgcaggagaggaagaaaggggtaccatggactgaggaggagcacaagaaattcctggaagggctgaggcagctggggaaaggggactggagaggcatctccaagaactttgtgaccagcaggacggcgactcaggtggccagccacgcccagaagtacttcctccggcagaccaaccctggcaaaaagaagcgccgggccagcctctttgatgttgttgctgagtgcagtgatgatcagcttccaagtcctcagagtgttggaactaagcctcctacccaggatataattcatacagatcgcggcgatgtcccgatactaagctatccagttgctagaggctttagaggcgatagcgtgcaggttgatgaactaactgaatatgtgaagagattaaaggccgccgaggacatgtcgctctccatgatctctggactggaaatggcatcatcatccatcagcagtctagagctcagtatcgcgcctcctcattgcgcgatcgaggcggccatcaaggtgctgtgatccagacgcaattctccaccgaaggaatctggatcggcttcagctactgttcttcgtcgccgctgttgttgtttgttgttgttgttttttttttttttttgcgggggttgtttgttgttgttgttgttgtagttgtcatgctaactttgtatttgggtcatgtggcgtttctttcagcagtcttatataatacagtgagaatgtcagtaccttccgagacatgtttaattaagccttggttggttggtataagttggtgaaaagaaaaccagatagtagcctgtctgtattgtacggttgcaaaattggagtatattgatgcagagatcatgaagggtctccatcttgttcat

SEQ ID NO: 21924 - DNA, 804 bp, Oryza sativa; identical to SEQ ID NO: 12467
  Clone ID: TF_OsC806_2

SEQ ID NO: 21925 - DNA, 1720 bp, Oryza sativa
  Clone ID: TF_OsC17430_1
atggcttccatgccgcagctggaggaaaaggattcatccgatttggcaatcaacaaaggcccgtcgctggatcttgtcaaatctcccttgatgatgaatgatgcatctgcaactgtaactgcaatgcagcccaacgaggggatggaggagttccctgtcaaggttcggaagccttacacgatcaccaagcagcgggagaagtggacggaagaagagcacgacaagttccttgaggcattgaagctgtatggtcgctcttggcgtcagatacaagagcacattggcacaaagactgctgtccaaattcggagccatgcccagaagtttttctcaaaggtggtgcgtgagcccggttccaataatgcgattgagatccctccacctaggccaaagagaaaaccacttcatccgtaccctcgaaagtgtgcgaattctggatcggacgcaaatccagcaacagcgcaattgaagcttgctcctggctcatcttcatctggctctgatcaagagaatggttctcctatatcggtgctatctgcgatgcagtcagatgcttttggatcgtcagtatccaatccatcaaccagatgtacctccccagcgtcatctgacgatggaaataacattcccacattcacgagtggggaagataataatgtgccttgtgaaccaacagtgatagatccgtcccagtcccacaaggaaatagaccaagatagaaaagacgtgaataatatgtctgaagaggattcttcagaagaagaggtgcaagaaacaagcttgaagctatttgggaggacagttgtcatcccagatccaaggaagagaagctcctcagatccgaagcatgaaagtgaggagcagatatcacagccttccaatgaagaaatgttgcaggcttcttcatcggttggggagattccagcggcatattgtgcaccaaatggttggtttatgtcatacaattctttcccattccaattcggtgaatcagcggcagatgctagaattccccctttacacgtgtggtggccttactacggttttgctcccattagccatcctagaggactaagcacagtgatgcagcagactgaaggtagtgacgagagtgacggtgtgaagagccactcatccgaatcaagttcggactccggggaaaatgtgcagatgaccgctccccagagctcgagaatagtggaatcacttggagcgatttacgtccgagactcaggttcaagttttgagctaaaaccgagcgcaaattcagcgtttgtaagagtgaagccaagcaacagcggagatgaagaggtaataaggggatttgtgccttataaaagatgcaaatttcaataacgcaggcaagcgggtattttcttgaaagctgctaatttaacagagaagagtaggagcacgaacgttgcttgcatcactgtatttttttttgtttgtttgcggggattggtggtgcattaatgaattgtttgctgcttgcaccttaaaaaggatagagatggtgtaagcagtttgttgctgtaagaatgttacatgtagactagtacttaaaattataggggatgccaatctctgccctgatgatgttgtaaaagcagtacgcaccatgttttacctctggttgaaagctaagctgttaatggaaattgatctctatggactgtttggttaaaaaaaaaaaaaaaaaaactcgagactagttctc

SEQ ID NO: 21926 - DNA, 1202 bp, Oryza sativa
  Clone ID: TF_OsC161464_2
atggggcgcgcgccgtgctgcgacaaggcgagcgtgaagcgggggccgtggtcgccggaggaggacgagcagctgcggagctacgtccagagccacggcatcggcggcaactggatcgcgctcccgcagaaagcagggctcaaccgctgcggcaagagctgcaggctccggtggctcaactacctgaggccggacatcaagcacggcggctacaccgagcaggaggaccacatcatctgctcgctctacaactcgattggaagcaggtggtccatcatcgcgtcgaagctccccggccggactgacaacgacgtcaagaactactggaacaccaagctcaagaagaaagccatgggcgccgtgcagccgcgcgccgccgcctcggcgccgagccaatgcacgtcgtcagcgatggcgccggcgctctcgccggcctcctcgtccgtcaccagctcgagcggcgacgcctgcttcgccgccgccgccaccaccaccaccaccatgtacccgccaccgacgacgccgccgcagcagcagttcatccgcttcgacgcaccacccgcggcggcggcggcggcatccccgaccgacctcgcgcccgtgccaccaccggccaccgtcacggcggacggcgacggcggctgggcgtccgacgccttgtccctcgacgacgtgttcctcggcgagctcacggccggcgagccgctgttcccttacgccgagctgttcagcggcttcgccggcgcggcgccggacagcaaggccaccttggagctctcggcgtgctacttcccgaacatggcggagatgtgggcggcctccgaccacgcctacgccaagccacagggtctctgcaacaccctgacatagtacttccccaacgccgcggcggcggagatgtggccggcggccacggacatcgtcaagccggccgggctgtgccacagcctgacatgacaagtcagacactaatgatccatccatccaacgagagtgctcgagtgatccatgacgactagtctcaagttgttgcgtggctagcttcttcttgattgattacctgatcatctttttctcccccttcttcccgacgagattattacatgtacattatcctatctgtactacggctgttccacagacaggttaattagatgttgattgccaattagcaactgttcaaaaaaaaaaaaaaaaaaaaa

SEQ ID NO: 21927 - DNA, 963 bp, Oryza sativa
  Clone ID: TF_OsC24389_2
ggaaagaaaggtttgtttgcttcgcggccatagatagctatagctgctatcttaatctagctcgcctttaatttggcccccggcctctctctctctgcctgtgtcctaccagctgcacaaaaatctcccagaaaacaggcagaggggagagagacagatacgcatcaattaagctcattttcttcgatctgctggtgaaagaagaactgaagaagagaggtagctggactgaagaggccggcaatggcggcggcggaagtgcagtcggctgccgggtgggggaggcagctgcagcaggacggcggcgggtggaggaaagggccgtggacgagccaggaggacgcgctgctcgtcgagcatgtcaggcagcacggcgaaggccggtggaattctgtctccaagcttacaggtctgaagagaagcggcaagagctgcaggctacgatgggttaactacctgaggcctgatctgaagagaggcaagatcactccccaggaggagagcatcatcgtccagctccatgccttgtggggcaacaggtggtcgacgatcgcgcgtagcctcccgggcaggacggacaacgagatcaagaactactggaggacgcacttcaagaagggcaagccgtccaagaacatcgagcgcgccagggccaggttcctgaagcagcgccgcgagatgcagcagagccagcagctgcagcagccgacgctaatgccgacgccgacgccgcagagcaaggacatcatcgttgccgagaccggtgacgcgcgcaccgacgacgacgcgggcggcgccgcagcggctgtggcgccgtcgtcgtcgtcggcgtctttgtcgatggcgggccgagaggcggaggacttgatcatgcaccaggacgcgatggacgacctcatgatgtgccccgccatgtctaccacctcatcctccacggcgccgccgtcgccggccatcagctga

SEQ ID NO: 21928 - DNA, 2718 bp, Oryza sativa
  Clone ID: TF_OsC50674_1
gaggtcttttgaaagcatcatcctctctctctcctcccccatcgacttccccccacacccaacggaagccgtaggagagagaggggaaaagcttgctcttttataccctcatctagggttccgagcccaccggctctctccccccttgcgggcccggcgccatctctcccgccaccgcctccccccctccccccctccgcctccgatagattcgcgctcgccctcctgacccacggattcggttcccacgaaaccgctcgatctgggggatctgctagattcgtaaggcggcgtttcgatcgatctgttcgggggtttctgccgtggggaattttgatctataaagttagttttttgattttgtttcttttttgctttttggtggcggtttcgctgtgttaggtttgtggtggtggtggtggtggtgaggatgtgcttgtgccgttagatgggggccatggcgatggtggagcaggaggggtgcgtcgagaaccggcagcccctggcggcgccgagccgtccggtttccgacggaagcagctatggcggcggcggcggcgggctcgcgcagatgtcgccgccggtgtctagctcggcgaattccatctccggtcttaggcggacaagcgggccaataaggagagcaaagggtggctggacaccagaggaggacgagacattgaggaaggcagttgaggcttataagggtagaaactggaagaaaatagccgaatgttttccatacagaacagaggtacaatgcttgcatcgatggcaaaaggttcttaatcctgaacttatcaaaggtccttggactcaagaggaagatgatcaaattattgatcttgtaaagaagtatggaccaacaaaatggtctgtcatagctaaggcattacctggccgtatagggaagcaatgtcgagagaggtggcacaatcatctaaatccagaaataaggaaagatgcttggactactgaggaggaacaggcactcataaatgctcatcggatttatgggaataaatgggcagagatagcaaaagttcttcctggaaggactgataattctataaagaatcattggaatagttctctcagaaagaagcaagatatgtacaataccagcaataatatggtagttccgaaactgcttgtgcatgataagttcaaggataaaccaaagctgatggctatggagggtcatcttgatttgaacaaggcacccattatcaattcaaaagaccaacctggaacagctcatcggtctaattgctcagggtttctatctcgttcctcattaccaactgctcagccacttacttcccgtgaggcatctgtagttgatggttccgctgtcactttagtggcgcaagctctggaaagtgattctgtccgtggtaagggcttggaaattgattctgttcatgagaaaggtcttgaggttaactcggcacctgatcataccgggaactcttggaccattcaactagaagctgcaccatccaaaggtgaagcagaattatctttgaagaatgaggcacgctctcttggtccactttgttaccagatccctaacatggaagatgtagtccctgtgagttcctcactcttttctgaccatcttactgggaaccatacatctgaacattgtggggatgatatattgtcacctgctggctgcactactccccctccaacaaagggaaaattaacaagccagcttagtgttgattcaattttgaagagtgctgctaacagttttccaggtactccttcaatattaaaaagaagaaaacgggataaatcaacacctgtttcagctagtgagatgaagatcagtggatcaaatactgatagattttacactcccatggggatggaacctgctacagctacaccagagtcattcaaaactacatcttttttgtcattgggttctcttgatggttctgtaaagagctttgatgtttcaccacaataccgggcaaggtcaaaaagaatggctctcacgaagacagttgagaaacaactggatttttcatcagatggattagatacttgtggttctgagattctgaactcttcctgcaataattcccaaagcacactttctattaccgaagccccaaaactgaaagaaaaggaacatgctgttcaattggaaaatggaaccaagaactttgcgcatacaaccaatttggatgtaacctaatcttggaaaatgcaggaactgacatcaatctgatgaagtaggacagatgagctgaagtgtctttctgagctgatgagctttttctcaaagtatcacgattaaaccacaacaagatcaaacaaaaccggtggagaagaattccagaattgaagctttgtactgagtacagaaggtccaccaatcattctcccatctcttctaaccaaggtgtacaaaagatgagcgacactctgtagaagaatacattgctcgctgcactttgtgaatttacagttagaaaattcagattgtagaagccacaggtgtgtacaaaacaacaacgaaaaaaaattatagtgttagaacgtcattatagctgaataagagtattcctcattggattgtcagatttattttgtcttgtgctttccctttgtcgcgaaacagccagggtctgctctgtgtaacaataataaaacccgtttttgcaaaatcattgccagagatagtcaagaaaccattttgac

SEQ ID NO: 21929 - DNA, 1702 bp, Oryza sativa
  Clone ID: TF_OsC3094_1
ggctggactgcaaagagtttaatcaaacaccattcatacaatcatactacagctaatcacagtttttgaatattctactacctaaagctggcaaaaaggcgggctacatcacaggattgcattggatcatactaatgccatggcaattgacgaagctcggctaaaatcaacttatgctgataacgggcttcggtttctcatcgtccttgctctctgtggtgacagccgggggcctgcgttggtgctgcacaacagctagctgatcagaaaagagcaattccttcaagcagtggagttgcttcctctctttctccatcagcagctccttctgctcgaaacgacgtattttatcctggatttccttcatctgaacacccactatgtcagataaagactgctctatagccttccgttccttttcaagttgtacttgtgcgttggcagacgcctctttgagcaaatcattggctgaaagaccatttgtgcaagaagattcttcttccttgctgatgttgatagaagaatcagtctcgctggcacttatatcaacctgggactgtgcagaaatagctgcttgccctgcagctacagcaacatctgaaccaacaatggctgacaagaacgcaacctgggccatgattggattgctagcatcagccagtggcgtgaggcgtagtcgttttgagatatgtgatccagattcttcattgagatcacaatcattcccaaactgaattttgtcctccttgggtcccatgaactgttccccaaaaggtaatcgggtgaatctagcaatgcagtccttttctgatcgactaccaacatgatgagaaacctttttccagtcttccccataatgcaggacggcctcaagaaggtgaagagtttctttatctgtccaatctgattttgcgtcctcagtaatttcaattcgcttgaagtctgccgaagtaagacctggccggtaattggcacggacatagcatctagcacagaggcttatatctgccttctcacaagagaaataagcaagcccgcacacggtgcggcacccggtgcaaagcttactgggcattgttgccccaatcggcaaagaggactgcgataacgctgcctcctctttcttatctctcccctgcttcgctcccgacggcgaagctccatagtttatcagcccccattcctcaaggaagtcgaacacgcgacgcacggagccgacatctccgacgagcccacgcctggcctcggtgagcgtcagccgccgccccggccgcgcccggaacctcctcacgagggtgtcacggtagtacttgtaagcctccgggcccctggacccggacgccgccgccgcctccccttcgaagaactccggcatgaggcggcgctcggtctcgtggatggagtcgtaggagaaccacgctgaatagctcgggatggtgatggtgcagggcgactcctcggccgcggcggcggcggcggcggcggcaggggcgggggcggcggcggaggcggctgaggaagccgaggtggatggcggcggaggggcctccgtcttgacggtgcctgccgtcgaggggggctgggagaacggcgcccccgaggacggcggctgcggcggagcgagaggcatggagttcgccgtcgccgtagtcgccgccgccgccgcctcggccgccggcgctggcatcgacggcgtggccat

SEQ ID NO: 21930 - DNA, 1317 bp, Oryza sativa
  Clone ID: TF_OsC1713_4582
aattgcgataccgaagtacgtactaggacaaaacctggcgatggcggtaattagtttcttattaaaggaattgtctagagttcgaaaattttgatttgaaggatgaaaacctatggtctggcttttgcttctatcgatagaaaatccatcttcaaatcttacagattttggaccactgaatgagctttgtgattcatgctccaggccttctcctccaactccggcgacctcctcttcttctccggcattggcgacaccctcgctaccggagacggggaagacggcggcacagggatagctcatcgccattggcgtggactcctttcggctagccagcgaggcaggtggtgtcacagcggggccgtggcggcggaatgcacgaggtgacgagggcgagggaaacaggaggaggagaggagttagggttatgggatccgcacgaatcttaaagtatatccaatggtcttggcattgtcgagctcccaaggtgtcgactgacaagtattgatttcttatagcacgcaaccagccaaaaagccattgttgttcgtcaacatctacttcaccttcaccaatatgtcgaacactggagacaacggcaacactggatacaagaagaaggaggctcccgtcaacaccaacggaggcaatactacctcaaactccagcggaggaccattcttggggctgaggtggatgaactacctgaggcctgacctgaagaaggagcccatctccgatcgagaggcggagaccatcctctccctgcagaaactcctcggcaacaggtggtcggtgatcgcggcgaagatgccgggcaggacggacaacgagatcaagaactactggaattcccgcatcaggaagcgtcagtccgccgccgccggagctaaaggcgagccggcgccggccacggtcatggagaaagaaccgacggccaatgcggccaccgtggcggcggcgccggaggcggcatctcctcctcctcctcctatcccggcgcggctcccgatgttctcctgccaactgctcgacggaggcggcagcggcggcgccaccgccaccacacagtcgccgccgaacgccggttcatcggatatcagcgaggtgagcgcctgcggcggcaacggcggcggcgaggactcctcccgtgactactgcttctccggcggcgacgtcgacggcgacggcgacatggtccacctcctcgcgctcgatgacctcgacttgctcgtcgatgtccccggattgctcgacgttgatgcgtgggattgcgagctgtaccgtgcagattattcgacgagtagagctcgatga

SEQ ID NO: 21931 - DNA, 1523 bp, Oryza sativa
  Clone ID: TF_OsC75714_2
ttcctcaattatatcgtccatttgcagaatctgaatatttgcacgaaggcgagggcggacatgacgccccaacagcgcaatggcggcgatggcgctctttcgttcacaaccattgaataggatagggtcactgctgtaaaaaacaggaccactactagaacacgaattcctttcaacatcatcagaacataagaagcccgatctaaatataaagggaccgggtgttcctgatcaattcatttcccgtttagggtctcgtaattaacccagaggccggttcagatgcgggttccacgactctggccctattcatatatacgtacacccgagttgcgcgccgatgtggtcttttcggtacccacagacacgtcagcaagtagatcatggaagtatgcagtaggctgtgtcaagcactgactatggatttctatctctcggaatgccctggtgttcctgatcaaaacagtaaccggttagtggcccttccgtccagtacttcgcgatcctgagacggatgaagcaactctacaaccaactggcgtgccaatcagacgcggacacgggcgggcggcttggccggggcctggtggttgctgtttctatcagctgggccgtggctatgtcgtcgtcgctggacggtcccccgccgttgccacccgccgtcacgagggtcagcattgcctcggcgccggccgacaccgtggcgtcggcgtccgggctcgtcacgaagtagcgcgagatgttcctccagtctcccctcccgtacgtcttcagccccatcaagaaccgactagtgctcgtcgtggggccacgggacgcctgtccacgaggcaggcgagggggtctgaggcggtggtgagcacggacggcggcgatggggaggggttgctggtgtcttcttctggcaggttgaccgtggtgatgtcgtggatgctagaccggcgcttgtccttgccgccggagttgaggcggatgaagtacttctgcgcgtggctggccacctgcgtcggcgtccggctcgtcacgaagtagcgcgagatgttcctccagtctcccctcccgtacttcttcagccccatcaagaacgacttgtgctcctcctccgtccacgggacgcctttcttcctctcctggtccggggcgcggccgcgtttgaggtagcagccgcgcctgaacccgccgtcgctgccgtcccagtcctgcagggtgaacccggaggacgccggggacaagctgctgctgtagtgagggaacggcaccagccctgcctcgatggagccgacgtcgttctcgaggtccctgtagtggttcatcacgtctatgaccgtcttcctgggcagcatcgcggcgaccatctcccacctgttcggcgagtccaggtcgacctgtgcgagggccctctcgaacaccttgttctcctctgccgaccacgcctccgcacctcgccgctcctgcaagtaccagcacggctgcccggggaagtagggcagcggtagcacctcccgaagcgcctctgccatcat

SEQ ID NO: 21932 - DNA, 1308 bp, Oryza sativa
  Clone ID: TF_OsC805_1
gagagagacgaccgatcgatcgatcagctagctgcagcttccagaaagagtagttagctcgatcgatcgatccgggaaggatcagagttaattagtgagtgaggaattgtagccatgggccggccgccgtgctgcgacaaggaggggatcaagaaggggccatggacgcccgaggaggacatcatcctcgtctcctacatccaagaacacggccccggcaactggagatcggttcccatcaacacagggctgatgaggtgcagcaagagctgcaggctgcggtggacgaactacctgcggccggggataaagcgcggcaacttcacggcgcacgaggaggggatcatcgtccacctccagtcgcttctcggcaaccgctgggccgccatcgcctcctacctcccccagcgcaccgacaacgacatcaagaactactggaacacccacctcaagaagaagctcgccgccgccgccaactccacttcatcctccaaccgccaccccatcttcgccgacgccaccttcccctccgccgccggcggtagctacacggtgagcagcaactccgatgtcacccagatggcagccattgctaggcgctcccccttcgccgactgcccatcctcctcatacgcctccagcatggacaacatctccaagctgctcgacggcttcatgaagaccaactccccgtcgccgccgccgccgccgctgcagcactatgacggcggctattacgacgacgtcaagcccgccgtcgatgtcggcggcaaccccttgctgtcgtccttcgactgcatgtccggcgccgacctggactgctgcttcgacgttcatcagcagcaccagcagcagccgccggcgtcgttcatggagtacggcggctatggcggcggctacggcgacgagagcaagcagcagctgatgaaccaggcggcgccgccgctgtcttcgatcgagaagtggctgttcgacgaggcggcggcggagcaggtcgccgacctcatggacctctccgacggttgctgctccgtcccaatgatgttttaattagctcaagtaatgaaagaaaacactgtcacattcgatacgtatactgtgcacatcaataattaattttacattaattagctagatgcatgtttaggttaaactattgttgttactatacttgaagctagaagatttgttttatttgtagttttggatgtgtgaccggttgtacgtgtgtcactggcatcaaacgtcagcacaagaataagagatatcaacaggaattaaaaaaaaaaaaaaaaaaaaaaaaaaaaa

SEQ ID NO: 21933 - DNA, 1113 bp, Oryza sativa
  Clone ID: TF_OsC75714_1
tatgcggtgtgaaataccgcacagatgcctaaggagaaaatacccgatcaaggcgcctttcgccattcaggctgcgcaactgttgggaagggcgatcggtgcgggcctcttcgctattacgccagctggcgaaaggggtgtatttgctggctgcactagtggtgcaccggtgctgagcgctgacacggtttttctgttctctttgctttgaggctggccgcattgcatctgcaccagaacggagtcgtcgaggcggccgccgccggcgacgtgcgaattgccggcctcgatcttcacctgggcgtagggatggggcatgaagtggtggtgcccggcgccacggccgagcggcggcggcggaggcttgccgtcgacgagcacgccgaactgctccgacgcggtgagcacggacggcggcggcgacggcgaggggttgccgtggtcgtcgtcggggaggttgacggtggtgatgtcgtggatgctggagcggcgcttgtccttgccgccggagttgagccggatgaagtacttctgcgcgtggctggccacctgcgtcggcgtccggctcgtcacgaagttgcgggagatgttcctccagtcacctctgccgtacttcttcagccccatcaagaacaacttgtgctcctcctctgtccacggcacgcccttcttgcgctcctggtcagggccgcgcgcgcgcttgccgccgaccatgtagcaggagcgcttgaacccaaggccggcggggtcatcgccgccgtcccagtcaagagtgaacccggagccgccgccgccgccggcggcgccgtagtgggggaaggggacgaggccggcctcgatgaagcagacgtcgttctcgaggtcgtcgtagtgcgtcatgacgtcggccaccgtcttgccgggcagcagcagcgccacccgctcccacctctccgggtcgttccggtcgagcgccgccagcgcctgctcgaacaccttgttctcctcctgcgaccacgctccgccgccgccgcgccggtccggcaagaaccacccgcccgccgccgcagcctggccgacgaagtagtgcgccggcgccggcgggagcacctccatgtacgactccttcatcat

SEQ ID NO: 21934 - DNA, 948 bp, Oryza sativa
  Clone ID: TF_OsC75714_3
tcaaccgagaggctgcatcagctggccgcattgcatctgcaccagaacggagtcgtcgaggcggccgccgccggcgacgtgcgaattgccggcctcgatcttcacctgggcgtagggatggggcatgaagtggtggtgcccggcgccacggccgagcggcggcggcggaggcttgccgtcgacgagcacgccgaactgctccgagacggcggcggcggaggaggaggagtgcgcggtgagcacggacggcggcggcgacggcgaggggttgccgtggtcgtcgtcggggaggttgacggtggtgatgtcgtggatgctggagcggcgcttgtccttgccgccggagttgagccggatgaagtacttctgcgcgtggctggccacctgcgtcggcgtccggctcgtcacgaagttgcgggagatgttcctccagtcacctctgccgtacttcttcagccccatcaagaacaacttgtgctcctcctctgtccacggcacgcccttcttgcgctcctggtcagggccgcgcgcgcgcttgccgccgaccatgtagcaggagcgcttgaacccaaggccggcggggtcatcgccgccgtcccagtcaagagtgaacccggagccgccgccgccgccggcggcgccgtagtgggggaaggggacgaggccggcctcgatgaagcagacgtcgttctcgaggtcgtcgtagtgcgtcatgacgtcggccaccgtcttgccgggcagcagcagcgccacccgctcccacctctccgggtcgttccggtcgagcgccgccagcgcctgctcgaacaccttgttctcctcctgcgaccacgctccgccgccgccgcgccggtccggcaagaaccacccgcccgccgccgcagcctggccgacgaagtagtgcgccggcgccggcgggagcacctccatgtacgactccttcatcat

SEQ ID NO: 21935 - DNA, 1313 bp, Oryza sativa
  Clone ID: TF_OsC6000_2
caccttttggctcctccactagtagcaactactcgttgtcgtcgtcgtcgtcgactcgtcgtggtagtacgagtcttcttcgcgtccgcgccatgagcagctcgaggaaggaggaggaggaggttgattcgatggggatggaggcggagtgcgataggataaaggggccatggagccctgaggaggacgaggcgctgcggcggctggtggagcggcacggggcgaggaactggacggcgatcgggagggggatcccggggaggtcggggaagtcgtgcaggctgcggtggtgcaaccagctgtcgccgcaggtggagcgccgcccgttcacggcggaggaggacgccgcgatactccgggcgcacgcccgcctcggcaaccgctgggccgccatcgcgcgcctcctccccggccgcaccgacaacgccgtcaagaaccactggaactcctccctcaagcgcaagctcgccaccgccacggacggcggcgagatcgaccggccgtgtaagcgcgtgagccccgggccggggagcccgacgggatcggagcgcagcgagctcagccacggcggctgcggaagcggaagcggcggcgggcaggtgttccgccccgtgccgcgccccggcggcttcgacgccatcagcgcggcggacgtcgtgcggccgccgcggcggcgggacgacaacgacgacgacggcgacgacgacccgctcacctcgctgtccctctccctctccctcccggggttccaccacgacagcgcgcggagccacttccaggagctcccctccccctcccgctccccttcgccgccgccgtcggccgccgcagcatcgccatccgcgtacccgttcaccgccgagttcgtctccgcgatgcaggagatgatccgcgccgaggtccgcaagtacatggcgagcgtcggcgtccgcgccgggtgcggccacgccgccggtgccgacctccacatgccgcagctggtggagggcgtcatgcgcgccgccgcggagcgcgtcgggaggatgcactgatcaaaaacctagcgtccattagaatctctactatcgtttcaactttttttttccttaaaaatttgtttccaaaactgctgtgaaaaccgaaacagcagtccgaaacggaagaaccaaaaaaaaatgcgaggagagatgggaaagaaatgtttcgagctacgaaaaaaaaccgaaaagctcggctacctatgtacaggaaatggaaatggaaatgcaaatgggggaagtgagtggtgaatcatgcaaaaaaaaaaaaaatcagaattcaccatttttgctaac

SEQ ID NO: 21936 - DNA, 1270 bp, Oryza sativa
  Clone ID: TF_OsC43020_1
agaaagggtatcctatttttttttgaatttttaagcttataatctggtacttgatcaataaactataccattcatacaaagtggtattgtgttccatactgtcaaaggtaagtcacacaagctatgttgcacattagattctacatacatacatacataatacatacatcatgagcacaccaataatgttatagtagatctgtaaatattgagacccatagtaacacaaatataaccacataagtactgcaaatctggaaagcacatatgtagcttagaaacctggcctatatcttgatgtatggctttatccttcaatagcatggccctcattttccataaccagattgtgtagccaacatccttgtttcttcattgtcaatcttccagaatacctcagggcagctgtagtctgacatggtagatgtcagaagtggacatgggagattgctgcatgctttgtctttcccttcatctatacccagcaaggaaggtgcccctggcgcctcaatttctttccatatctgatccatggtatatccatccatgacactctgagtgcttttgaggactcttgccatgcagctgcgatcatcatgaatgtctcctccatccatactgatgattggcacagtatctaggaggcaggattggtataccagtgacgacgaggaggacgagggtgacatgtcaccccttctctcctgggctttcttcctcatgtgtgtcctccagtagttcttgatctcattgtctgtgcgccctggcagcctccgtgctatcctagaccacctgttaccccaacgagcatggagctcaataataagatgttcctcttttggtgacatgcgcccatgcttgaggccagggtggaggtagttcacccaacggaggcggcagctcttgcctgtcctattgagccctaatttgcgggtccccacccctcaaacctgatactttggcaacgaaatcccaacggcggtcaccgaacaggcggacagtgcataccagttgcaggtcctcctgctctgtccatggtcccttgcgcatctcctctctcactgtcaccatattggtgaccctagtatatgatgacagtgttgcaccaacgctgctcgcgcctaccttggatcggctcggagccggtcttcttgctcttcttccactcgtgtcgagctttgcgcgccgcctcttgagcatgtccccccctgatggacggccgcctctgcagcagcggaggactaccagctatctagagagagcactgcag

SEQ ID NO: 21937 - DNA, 1452 bp, Oryza sativa
  Clone ID: TF_OsC52907_1
gcgacgcccaatccgatcgatgcctccgtcgtctccgccgccgccgccgtcgcgggcggcgggggaggtggggatgggggagggggaggaggagggaaggagaaggagaagcaggtggtggctgcgccgctgcagccgccgatggccgtgcctgcaccggcggcggcggtgggggaggaggcgaggaaggtgaggaagccgtacaccatcaccaagtcgagggagagctggacggagcccgagcacgacaagttcctcgaggcgctgcagctgttcgatcgtgattggaaaaagattgaagcatacgttggctcaaaaactgtgatacagataaggagccatgcacaaaaatactttttgaaggttcagaaaaatggtacaggtgaacatctgcctccacccaggccaaagcggaaggcagctcatccatatccacagaaggcctctaaaaatgtttcgccagctgctatatcacaaccccctcctctgggggagcaaggttgtgttatgtccatggatacatctcctgtcatcagaaatacaaatgccagtgctgtagtaccctcctgggacaattctattgctcaacctttaagtgcaagtcgcacgcaaggtacaggtgctgttgctacaaataactgctctagtagcatagagagtccttctactacttggccaacttctgaagcagttgaacaagaaaatatgcttcgaccactacgtgctatgccagattttgcacaagtatacagctttctgggaagcatatttgatccagatactagtgggcatttgcagactttaaaggcgatggatccaattgatgttgaaacggtactactgctgatgagaaatctgtccatgaacttaactagccccaactttgcggcacatctgagcttgctgtcatcatgtaattctggtggggacccaattaagtctgaaggcatggaaaatcttggatctccacagagttgccatctcccgttcatggaaacaagtgagtgagggagaactgcttgtatgcggacgaagcttcagttgtttccacaagacgttcttgtgttctctttgtactggagttgtggacggctgatccggcagtttaccaacgctagcacgtgttgtggccgtggcatctgtatagcttccaataatgctctaaccctaggctagttttgctcatcaatcatgttcatgtagatagccagttttgtgtgctcagcaattctttttccctcggggtggggcatggctcgaaatgtttttgtatgtgtacatctttgtatacatgtatgtaaatatgtgtgatcatgtaatgcttaaagatactgttgactgatttgaggtaataatacaataaaccagtggggcactcgggtgtagtctctagggcgccccactgttgtgaaatgtgagctctgaagttgtggactatcttcgccgaattcc

SEQ ID NO: 21938 - DNA, 734 bp, Oryza sativa
  unsure (1)..(734): unsure at all n locations
  Clone ID: TF_LIB4830-029-R1-N1-B12
ccggccgggaaaccaaaggaaaggccttcttgtcatccttccttcctttatatagaggccccttcttctccccctcctctcccctgacttaatttagctccgcctccattcacgcattcacactagcatagcatataagatagcacttgtagagaggagatactagtacacatagagaagaggagaggagattgatcggtgagggaggatgatggcgtcttgtcggagaggagggggaggggatgtggataggataaaggggccgtggagtccggaggaggacgaggcgctgcagcggctggtggggcggcacggggcgcgcaactggtcgctgataagcaagtccatcccggggaggtcggggaagtcgtgccggctgcggtggtgcaaccagctgtcgccgcaggtggagcaccggcccttcactcccgaggaggacgacaccatcctccgcgcccacgcccgcttcggcaacaagtgggccaccatcgccaggctcctcgccggccgcaccgacaacgccatcaagaaccactggaactccaccctcaagcgcaagcaccactcttctctcctcgccgacgacctccgccctctcaagcggacaaccagcgacggncacccgacgctctcctccgccgccgcccccgggagcccctccggctccgacctcagcgactcagnccaccatagcctccccctcccagatggccctctcacccccacacctcctc

SEQ ID NO: 21939 - DNA, 1569 bp, Oryza sativa; identical to SEQ ID NO: 12344
  Clone ID: TF_OsC351_2

SEQ ID NO: 21940 - DNA, 1455 bp, Oryza sativa
  Clone ID: TF_OsC344203_2
atgccgtgcacgtcggcggcgtggatgttgcacgtgggtggtgcggcggcggagcaggcgtcgtcgtcgtcgtcgtccaagggaggggggagggtggtgacggcggggacgacgacgatggacacgggcgggtacaataatggaggtggtggtgggggtgggggtggcaatggcggcggcggcggcgaccaccaggagagcagcagcagcggcggcggcggcgggcagtcatccaggctcgcggcgcgcggccactggcgccccgccgaggacgccaagctccgcgagctcgtcgcgctctacggcccccagaactggaacctcatcgccgacaagctcgacggcagatccgggaagagctgcaggctgaggtggttcaaccagctggacccgaggatcagcaagaggccgttcagcgacgaggaggaggagaggctgatggcggcgcacaggttctacggcaacaagtgggcgatgatcgcgcgcctcttccccggccggaccgacaacgccgtcaagaaccactggcacgtcatcatggcgcgcaagtacagggagcagtccaccgcctaccgacgccgcaagctcaaccaggccgtccagcgcaagctcgacgccaccaccgcctccgacgtcgtcgtcgcccaccaccacccctacgccgccgcccacgacccctacgccttcaccttccgccactactgcttcccttttccggccgcctcccccgccgccgccgacgagccgcccttcacctgcttgttccccgggacggcggcgacggccgggcgcggcggcggcggtggcatgacatggccggacgccatggccgctggcgaggtcatcgacgacggcgccggcggcggccggtacgtcgtggccgagccgccgccgccgttcctggtgccggcggcgccgcacgggtggctcggaggccacgagatgatggtgatggtgaacgacggcggcgacgtcgccgccggcgtggcgtcgtcgtacgacgggatgataggcagggatcagggcggcggcggctcacacttcgaggcggctgcggcggcagcggcggcgccggcattcatagacttcctcggggttggcgcctccccccattttcctaacccacctatctcgtttttcgcgcgcacgcttttcaaactgataaacgggcgcctccggccaccagatctggccatcgtgaggccaccgatgatggaggatgactcgaggtgtgcggcgccgatcccgttgccgtcgctctcgccgccactactagcaattcatggttgtcatcctggggcctcctctgttagatctggccatcgcgaggctgcagacgttggaggagctgaggcacgtggcagctgctcccgtcgccgtatgttgccacattcaagaagtgaaggagaagtgaagagggagaaggagaggatgcagagaaaagatgtgaagtga

SEQ ID NO: 21941 - DNA, 2727 bp, Oryza sativa; identical to SEQ ID NO: 12314
  Clone ID: TF_OsC359_7176

SEQ ID NO: 21942 - DNA, 1380 bp, Oryza sativa
  Clone ID: TF_OsC351_8
atggggaggcagccgtgctgcgacaagctgggggtgaagagggggccgtggacggcggaggaggacaagaagctgatgagcttcatcctgaccaacggccattgctgctggcgcgccgtgccgaagctcgccgggctgctccgctgcggcaagagctgccgcctccggtggacaaactacctccgccccgacctcaagcgcggcctcctcaccgacgccgaggagcagctcgtcatcgacctccacgccaagctcggcaacagagcgctggctcccactagcttgatttctgtggctaagagaaccctacacgttgattcagaaatagaaagcatcctcttaggtccagttgcctcattggaaaatggaagaaagctttttaaaaaatggtccaagattgctgccaagctaccgggcaggacggacaacgagatcaagaaccactggaacacgcacatcaagaagaagctcatcaagatgggcatcgacccggtgacgcacgagcccctcgaccggaagcaggagagcccggccaccacctcgcagtccaccgtcacggcggagtcgtccaagtccggcgaggcgaccaggcagcaaagccggcagcttgacgacgccgtcgtcagggacatgtccgtgtctgccggtggcgacagcccgccggagtcgagcactaacaccgccagcaccgccggtggcagtagcagcagcagcagtagccatcaccaggaccctctggtgaagtggctgctggaagaggacctgctgcccaccggtgacgagccatggctcaatttcacggccagcaacgacgtcgacgagttcagtagcatcgccgccaccggcgccacgccggcgctgccgtgggacgtcggcatgacgacggactggctgctcgactaccaagattttgggatgggagactcgagcttggtggtcgatgcctccatggtcaacagctcaaatgggtccaacttctagctagaagatgtcagcagcttacttaattgtgttgctatcagtgtagataatcaagtgaagtgtataattaataaaagcatcaagattgtgaaagcagctaggcatggccggccaagatcggagggtgatcacaagtcgaggcctttgctcttcggaaaaccaatcaacggttgggattgatgcatttgagagagggtatgcgtagatggtgcatgttgttgtgtattttccccttgagattgattcgggggtttgtgccattaactagaagtgttattacttctcaaatggagatacttagatctttgttttttttttggagagatagaactatttgttggtgtagtacctatacatgttttcaataccccatgtgggtgggtaatgtactataatatt

SEQ ID NO: 21943 - DNA, 1017 bp, Oryza sativa; identical to SEQ ID NO: 12319
  Clone ID: TF_OsC344203_1

SEQ ID NO: 21944 - DNA, 463 bp, Oryza sativa
  Clone ID: TF_rsicek_6331.y1.abd
tcatggattcttctgaagtttctggtgctagtggtactagttggactgacgaagagacattgcttcttttagaagctttggaaatttttggtggaaaatggactgagatagctgaacatgttgctacaaaaacaaaagctcagtgcatgctgcacttccttcaaatgcaaattgaggaccgctttcatggcgatgaagatattaatcaaaatatccaggaaaacacagagcaagcttcagcagaaaaaggcgctgctgaaatacctgataaaatggaagttgaagagaaagcagaaggaaaagatactgcaggtgagaaaactccagagaaagcagagggcaatagtgtagaagcacaaacggaagatggaaatgctattgaaaataaagatgccaataattcaggtggcacagattcagttaaatctctaaacactgatgagccaaaaaaatcttctgatgc

SEQ ID NO: 21945 - DNA, 1659 bp, Oryza sativa; identical to SEQ ID NO: 12324
  Clone ID: TF_OsC331108_1

SEQ ID NO: 21946 - DNA, 1305 bp, Oryza sativa
  Clone ID: TF_OsC351_9
cccacgcgtccgctctgatcgcggtgaggctgccggggaggacggacaacgagatcaagaactactggaacacgcacatccgccggaagcttctcggcagggggatcgaccccgtcacgcaccgtcccgtcaacgccgccgtcgccaccatctccttccatccccagccgtcgccaacgacgaaggaggagcagctcatactcagcaagccgtccaagtgccccgacctcaacctggacctctgcatcagcccgccgtcgtgccatgatggggcgatcgccgtgctgcgagaaggaggggctcaagaaggggccatggacgccggaggaggaccagaagctgctggcctacatcgagcagcacggccacggctgctggcgctcgctaccctccaaggccgggctgcagcggtgcggcaagagctgccgactccggtggacgaactacctccggccggacatcaagaggggcaagttcagcctgcaggaggagcagaccatcatccagctccacgcccttctcggcaacaggtggtcggcgatcgcgacgcacctgccgaagcgcacggacaacgagatcaagaactactggaacacgcacctaaagaagcggctggccaagatggggatcgacccggtcacgcacaagccgcgctccgacgtggccggcgcgggcggcggcggcggaggtgcggccggcggcgcggcgggcgcgcagcacgccaaggccgcggcgcacctcagccacacggcgcagtgggagagcgcgcggctcgaggcggaggcgcgcttggctcgggaggccaagctgcgcgcgctcgcggcctccgcgaccccgggcgcgccgcacctcccggcaccccccgcgtcggcggcggcggcggcggcggctcacggcctcgactcgccgacgtccacgctgagcttctcggagagcgcggtgctcgccaccgtgctggaggcgcacggcgccgccgccgcggcggccgcgcgcgccgccatgcagcccatgcaggcgtacgacgaggcgtgcaaggaccagcactggggcgacgtcgacgccgccgacgtgggcttccccggcgccggagcggggttcacgggcctactcctcgaaggctccttgaaccagatcccgaggccggcggggagagacgcggaagccgacggcgagttccaggagaccgaggaggagaagaactactggaacagcatactgaacctggtgaactcctcgtcggcacctatgtcgacggccgtggttgtgcccgcctcccacgcgtactcgccggcgccggacttctga

SEQ ID NO: 21947 - DNA, 1615 bp, Oryza sativa
  Clone ID: TF_OsC424_1
cccacgtgtccgtcaatgggtcctttcatccgtcacatactagcttgcttgttcaattcaatcgagcagtagctaattgcatagtgatcgatcgatctgtatagatggtggtggccggcaagaagcagggacggcattctttttctgcatcatcatcgtcgtcttcgtcttcttcttgttcagtagtgcagctgggtcatcatcagcgcccacagggtgaggaccctctcatcggcatcaaagcagcagcagcaggaggaggaggaataatgagaaagggcccgtggacggagcaggaggacgtgcagttggtttggttcgtgcggctgctgggcgaacggcggtgggatttcttagcaaaggtgtcaggtttgcgcggcggcgggtgatgagcatatgcgtgcgtgcatctaatctatcgattaattgttgatgatgtcgatcagatggatggatgcatgcatatgccgtacatagtagatttgatgatagtaactgacataaatataatgtatgcgtgcgatcaacgctggttgttggatcgtccgtcgtgtgtatgggtggtgtgtggctgatgcaggtttgcagcgcagcgggaagagctgccgtctccggtgggtgaactacctgcatccagggctgaagcgagggaggatgagccccgaggaggagaggatggtggtgcagctccacgccaagctcggcaacaggtggtctcgcatcgccaagagcattcctggccgcaccgacaacgagatcaagaactactggcgcacccacctgcgcaagctcaagctcaaacagcaaaagcagcagcagtccgacgaccaccacaacgacaacgacgacgacgacgaccgcaactcctcctcctcttcgtcctcctccaacagcaacagcaacctgcagcagcagccgcagccagaggatgagtcgtcggccagtggcagcctgcaggcccaacatcatgaggaccagcaccaactgttccttcatcctctctggaacgacgacatcatcgtcgacgtcgactgctggagcagcagcaccaacgtcgtcgctccgccgccgatgcccgcctcgccgctctgggatatcgatgacgccttcttctgctcggattattcgctacctctctggggatagtatatatcatccatcagccgccaagacgatgacgactacatcaactcgatcgatcgatgcctcctaatcatgtgggagtactcagctcatctcaattgttacatccttgctacagctgctaattactgtaattactagcttgcatatagggatcgacggaggaattaatatatacatgttagtaactcgttctatagcgcaacttgcagttgcatctcaatctctgatcagtactatataaatatatatatatgtaacagctgctagctatagctagctgcgtacacatccatatgaatgtgtgtgtgttcatgcttgtactgcctcttgtagtatatgcacatatacgtgcaagtgcaacagacggctgctggctgatatattttgatcagcgcgccacgtgcacgtgcatacgtttcttcatttctggcaaattcatatgtatcatgttatacactgaactgacccc

SEQ ID NO: 21948 - DNA, 936 bp, Oryza sativa
  Clone ID: TF_OsC76813_1
tttattagaagaagaagactatcatcttgagcttattcttccatttgctccatcttgaaatcatcagtaaccatggctaggaagtgctctagctgtgggaacaatggccacaactccaggacttgcagtggccaaagagttcttgatcacagcatcagcagcagcaacagtggtagtactactgctgctgctgctactgcctgtggtggcttgaggttgtttggggtgcagctgcaggtaggaggaggctcatctcctctgaagaagtgcctcagcatggagtgcttggcatcaccagcatactatggagcttctgcctcgccgtcggtttcgtcgtcgtcatcttcgcttgtttcgattgaggagaacactgagagggtctccaatgggtacctctctgatgggctcatgggaagggttcaggagaggaagaaaggagttccatggactgaggaagaacaccagatgttcctcgccggccttgacaagctcggaaaaggcgactggcggggcatttctcggcacttcgtcactacccggactccaacgcaggtcgccagccatgcccagaagtacttcctgaggcagaacagtatgacacagaagaagaggaggtccagcctctttgatgtggttgaaggtatcaagagggcagcagcaatgcccatttcaggatctgcatctgaactgcagatccccggcatgtcgatcggtgtcggcgtggtgaaggaggaggttgtcctgcctccatgtctgaacctgatgagtaacagttcatcagcatcacagcactcaccttccctgacattgctggcaaatcctcaggtgcagctccagatgcctgacctggagctaaagatgtccacatcccggttatctgaccaatccggtccgtcgccgagcacgcctttcttcgggaccatcagagttacctga

SEQ ID NO: 21949 - DNA, 921 bp, Oryza sativa; identical to SEQ ID NO: 12481
  Clone ID: TF_OsC100249_2

SEQ ID NO: 21950 - DNA, 1228 bp, Oryza sativa
  Clone ID: TF_OsC729_1
gctgcaggagtgcacgagcggagcagccgcctcccttccaagaacacacaacgcaagaggagcagagcagttcagatcagagcagggaaggagcaagcacaatggggagggctccgtgctgcgagaagatggggctcaagaagggtccatggacgccggaggaggacaaggtcctcgtcgcccacatccagcgccacggccacggcaactggcgcgccctgcccaagcaagccgggctgctgcgttgcggcaagagctgccggctccggtggatcaactacctgcggccggacatcaagcggggcaacttctccaaggaggaggaggacaccatcatccatctccacgagctgcttggcaacaggtggtccgcaattgccgccaggttgcccgggaggacggacaacgagatcaagaacgtgtggcacacccacctcaagaagcgcctcgatgcgccggctcagggcggtcatgtcgcggcgagcggcggcaagaagcacaagaagccgaagagcgcgaagaagccagccgccgccgccgccgcgccgccggcgtcgcccgagcggtccgcctcgtcgtcggtgacggagtcctcgatggcctcgtcggtggcggaggagcacggcaacgccgggatcagctcggcgtccgcgtccgtgtgcgccaaggaggagagctccttcacctcggcttccgaggagttccagatcgacgacagcttctggtcggagacgctgtcgatgccgctggacgggtacgacgtgtccatggagcccggcgacgcgttcgtcgcgccgccatccgccgacgacatggactactggctcggagtgttcatggagtccggcgaagcgcaagacttgccgcagatctagagaaagagagagaattttaccgtttcttcggttaattgatttgttttttctctctctgccgccatcttgcaccggagggacatagctaacagacaagagtgtccatgagcgaatcatcaagcaggaagaacgcgaatcatgcgatgcgatgcgatgagatgcacccagtagctttgatagttaattttctttttttacctccttcctgtatgtatagaaacagaagagatcagtgatcgaaacctgagatcctttctcacaatgtgcaaactggatcatcagaaaacgggctctgcgtttctcatttgattaattaaattcaacttgcacgctaaaaaaaaaaaaaaaaaaaa

SEQ ID NO: 21951 - DNA, 1363 bp, Oryza sativa
  Clone ID: TF_OsC1121_1
gacgctgccgccattggcattgtttgtaggcgatcgatcgagcaatcgtggatggggaggaagccgtgctgctccaaggaggggctgaacaggggggcatggacggcaatggaggacgacatcctggtgtcctacatcgccaagcacggggagggcaaatggggagccctccccaagagagccgggctgaagcggtgcgggaagagctgccggctgcggtggctcaactacctgcggccggggatcaagaggggcaacatctccggcgacgaggaggagctcatcctcaggctccacactctcctcggcaacagatggtcgctgatagccgggaggctgccggggcgaacagacaatgaaatcaagaactactggaacagcaccctcagcaagcgggtcgccatgcaacggaccgccgccgccaccagcatgccggcggcggccaccaccagcagcaatgccgacgccgccggcgctgctgcacgacgccggcgatcgccggagccccgcacggtcgtcgtcagcccaatccggaccaaggcgctgcggtgcaacaacaacagcagcagcgggatagtggtggtgcagcaggcaggcgcctgcagccacggcggccgtccgccggagagcggcgcgccgggagacgcggcggctgataaggtggccacgccgcaggcggtgcagcagcagcagcagcaagagctggccggagcggaggatgacgacgacctgccggtgccggccgtctgtatcgaccttgacttggacgacatcgagctgggaggactcgacggcttcctgatcagcccgtggcgcggcggcggccacgacgacggtaacgccgccgccggagcggtgccgaatctgccgatgccgattggctatgagctcggcggcgccggtggcggtggcgaggctggagctgttgacctggaggcgttgctggggcagctggaagcagaggaagacgacgacggtgaccaccaccaccaccaccaccaccaccaccaccagtaggaggaggaggtgccttcttcgcttggggacgaagacgacgactacttggagttcgcgccatggctcctctgatagcggcatccatccatggatcattgtggaatcgaatcagtcgagctgagagttgagagttgagaaagatcgatgattgctttgctggtcgtgtgttcctgcgagtcggatcatcggcacgaagagagatctcatcgattaagtaggcgcagaaggcgtacgttgaagcttagctgctgaagaattactgacgtagtcagatgaccatttccttatatattgtacagattataatggagcagattaaataaatctaaacacaccgcatttgatc

SEQ ID NO: 21952 - DNA, 1232 bp, Oryza sativa
  Clone ID: TF_OsC43020_2
aataacaatattatattaaacttgattgatagaaaagtcgctaaggagatagctggttgtattgtgaatacagagtgccttgcccacttgcattgcatacatcaaggaccaagtggcaaaagctatcttgcacactagctagatacatgaaacatgagcacacttgcaatgttacatagctgtaaatatttagatccatgctaatgattcttctacaaaagcacttcacttctgctaggtggataattaacttgggtaacctagttcaatatattgcttcaataacatgggcccacccctttaccataaccaaattgtggtgctaccttgatctcatcatccatcctcaagcatgtttctgggcaatagtaatcccacataggatatggcaatagaggaccagataggctattggatgcactatcctttgcttcatcaaaacatggccctgggagcacatttggtgcctcaatttccatccatatctgatccatgggataaccatccatgtcaacaggggtgcttttcatgatgcttgtgatgcagccactgccgccatgaagttcctgctcctcaattccaatgatcattgacggggtctctgtttccccaccgagcatggagctcaaggatgaggcgctcttcatgcggagacatgcgcccacgcttgaggccagggtggaggtagttgacccaccggaggcggcagctcttgcctgtgcgattaaggccagttgcaggtcctcctgctctgtccatggccctttgcgtatctcttctctcactgtcaccatattgattacccttgtatcggctcggagccggtcttcttgctcttcttccacctctgtgtgcttgttggctccagcttcaggatgtgatccttgatgaactccagccattggaaatggtatcttcgaaaagtctctatctggtttcttccaaatatttttccctgtccgtctgatatgaaaagcactagcctttttgtcagccattatcattggcacagaggactccatccctccttttctgggaggagatgttgagcccctgcctctgcttcttcttcctctggcagtggcagcatgcactagcttcaggatttgtcggtcatcatcggcgccacgacgagatgtatgaagctctcgttccagtgcccaatcgagtgccctgttgaaaatctccatgcaggtgaggtgtgcagctgcaatccttcttgacttcgccat

SEQ ID NO: 21953 - DNA, 237 bp, Oryza sativa
  Clone ID: TF_LIB3431-001-P1-K1-G9
cccacgcgttcggcaagcaggccaccggcggcggcggttgtggtaggcccagccgtaccaccgagcgctgcttttggaaggccaccggatgcgaccgatccatccgatgaagaggctaccctaatcgcatgatcgggctcaataagacgctcggatactacgagggccgagcccctaccggcaccaagaccgactgggtcatgaacgaagtctgcctttgcgaatgcgacaccatta

SEQ ID NO: 21954 - DNA, 516 bp, Oryza sativa
  Clone ID: TF_jC-osleLIB3474001h09a1
ggtggcgtcgtccatcgattctgatattgggcaccatcatcgcctgcgccggcggcggcgcaagctggaacgccgggaacgagtgcagctccgggaaggggtcgctgtccacgatctccgactccagagtgcgcgtctcgccccaccgagttggtgtgcctagtgcacactgcatacgtacccatgtcggacgcctgctccttcacctccttcccttgctgcatcttatcccactcgttcttgttgatgtacatgcgacacagcaacccaatcatgcaacctgagagatcctttcttggcgcccgtggaggcgcggccatcattggcgagccgggactcatgcatgatccactcagtgttgacccctcctggcgccttgccggcgtataacacgagcgctttcttgatcccaagcgtgcgcccacgaggtgcgacgggcttgttggtgcctggggcctttcagtaccagatgccggcagcgcgtgtggggcgtgacccattaggatacttgcgatc

SEQ ID NO: 21955 - DNA, 464 bp, Oryza sativa
  unsure (1)..(464): unsure at all n locations
  Clone ID: TF_OsC1517_1194
gctttctggctcgctctctctgcacgatctctcgtcttgttggattatacagccatgacatggtgcaacagcttcaacgacgtgcgcgccgtggagaacaacctggccaccgccgccgccgtggccgcggccaagaagcagcagcagcagcagcaggtctcccagcacgtcaacctcatcaagacctgcccctcctgcggccaccgcgcgcagtatgagcaggcagcggcggcggcgacgatccaggacctgccggggctgccggccggggtgaagttcgacccgacggaccaggagctgctggagcacctggaagggaaggcgaggcctgacgcgcggaantccaacccctcatcgacgagttcatccccaacatcganggcgagaacggcatctgctanaaccattccgagagctttcaggagtnggcaaagacggctgattcggaattttttaacgccgtt

SEQ ID NO: 21956 - DNA, 1053 bp, Oryza sativa; identical to SEQ ID NO: 12599
  Clone ID: TF_OsC359885_1

SEQ ID NO: 21957 - DNA, 1677 bp, Oryza sativa
  Clone ID: TF_OsC342748_1
atggcgacggcggcggagtcgcaggggctctccccggggttcaagttcaatccgtccgtcgagcagcttctctgcttcttcctcctgccctacttgcagcaccgacgcctcctcgtcgacggcgtcgtcttcctcgacgacccggcgagcgcgccgccgtgggcgctgctccaccgccacggccggggcggcgaggacgaggcctacttcatcgggccggtgcccgcaggtgacggccatggtggccggcggcagcagcaggtgagccgcaccgtcaccggcggcggcggcggcaagtggataaagcagaggacggagcggccgagaggggaggaggagccggtggtggtgttcggcggcgagacgttccggtgggaggagttcagcctcaacttccacgccgacgagcggtgccggagcggcagcaccgggtgggtgatgcacgagttcgccgtcgtgccccccgccggctcccgcgtcgccgccacccacaccgcctgccgcatcgccttcaccggccacggccagaagcgcaagcgcgtgcccgacggctacgtcttcgtcgacgtccatgtccagaccgccgccgccgccgccgccgtcgctcctccgttgccgatgttgtcctcgtacggcgaaccaccgcacgaacacttctctgacgatcatccgccgccgcattcttacacttattacacccaaggataccagcagttcttgccgccggcggagcagagcgatcaagaacaggaatactgtgcaccggaccagcagaatttccaagattatcacctcgcggcggcggagcagaccgaccaagattacttctatacggaaatgatcaaccaagaacaggattacgcataccagcagcagcaacagcatctcttccatggagatttcctcgcgacttcgcagcagtttcttggtcaggatcacgaggtgatgttcactggcctcggtggtggtctcgtcgtctccgacaacggcgagcacgcctccgccgccgcgccggctacagagccgccggtgcacgacgtgttcttggaaactttggtgcctgagccacctgaaaatgcatatgttgacggagcaggggagtccgccatggcatcggctagctccgctggtggcgcgccattattggaacaaccctttgcgacgccgccgcagcagtttcttgatcaggagccggcgccggctggcctcaacgacggcggcgcgatgatctataacaacaacggtgacggcgagcacgacgccgcgccggctgcgcagccgccggcccggtactacagcgggccagttccggcagtggacagcgtgttcttggacaagatgcgggaatatttgatggctgatgcgaagggattatgccgaattgatgcgcccatcaacaatggcgaacacgccgccgccccagcgccggctgcggatgatccgttggctgctcagcacggccacggcgacgcgccgccgctgccggtgccgcccgacgcggcggagctagagcgggtggtcggacatttgttgagagaagtggaggatataatcaaggttgcggcggccggtggctatggaggctcgtcggacaagccgctctccgaatttgacaaagcacaaaaccaaattctggccaagttgatggcagtatttaatcaagtagccgaaagttaa

SEQ ID NO: 21958 - DNA, 849 bp, Oryza sativa; identical to SEQ ID NO: 12488
  Clone ID: TF_OsC330475_1

SEQ ID NO: 21959 - DNA, 305 bp, Oryza sativa
  Clone ID: TF_uC-osflcyp108a02b1
gcttccagtggtagttagtctactgaacttttaggagctgaagatactcggagctaggtaagatgtcatccagaacgggcaggctgggacgtgtgagcctagcgagtctgagcgtgctagtgatccatggttactgaaaggggcagcctgtgaactacaactgctccgacagctagctaactgagcagaagagctttagcaatggcgacgccggggcagcagctgccgccggggttcaggttccacccgacggacgaggtggtggtgtgaccattctttactgatgaccgttcttcttttattca

SEQ ID NO: 21960 - DNA, 2303 bp, Oryza sativa
  Clone ID: TF_OsC49175_1
atgagccaatcgccgccggactacgccagttattaaaaactgaaattgtactgtcaatactcaacacctataatgaaaactagaggatgccaggaatccatggaattacctttaactgaaaacattctatgtgactatatcagtgaatacaggataacgatagctgaaacaactaagtagactatgcatttgccatcatggttgaagagttcttttctttaatataaggttttgcatgtttctattccctgttactgttctgacaaaattttaaaatagaataattcttgctggattttatctcttcatatttttttcctcgataatatatttattgctccctcctatcaagtgctctgtgacaagctcgtcgggatgaagaagacgctcgtcttccactccggtagggcgcccaagggccagaggaccaactgggtcatgcacgagtaccgcctcctcgacgccgacggcacccaggatctgcatgtggtgtgtagaatcttccagaaaaatggatctgggccacaaaatggtgcacagtacggtgcgccatacttggaggaagattgggaagaggaggatgatgcaattgagaacatgcctgccagtggcgctttcgctgaaatggctgcagtcacagatactgcagatgagtcgactgaggaagatgggaatttctcccttaaaactaatgatgagcctttacaaacccaagaataccagccagagataactcctgtgaaagctcaaggttcaaatgaggagaccaatggcggtggttacagttgtgatgttttttctctggatgagattttgcaggaacctgaaaatgtctgcaaaaatgaagagcagaatgccattgatgacaagttcactatcgcagagttatctggatacccaaggcaagatgatggctatgtaggcgagaatggtcctgtgaattggattgacccttcaaatggtgataatacaaactggcctttgagagcatatagtactcagaaccatgtcaatggaacacttagcgctgatggtttctttgacacggtgaatggtaccaactcatattcaggtccttcagataaccagaacctgtatttgcaagatgatggcttgacttcttctcatcaagtgggcgataacatgccattttatgacgcatcatctaatcacaaatgggtagatggaaaggatgattatttgaatttgaatgacctcctctacccgccagcagaaaatcaacccctgtttgatgctggggatgacctgatggcttacttcgatgccacggaggatgatttcaaatttgatattatgggcacagaagattctaattctcaacttccagacatgtcgaactttgtccaaaaggatgataacaacaataagtttacattagatgggatctctaataccgctttgtatggtgcttcttcatctggatcccatggcaatatgtatccagacactgcagtaccagatatgccgatggatgacactgttgacaaaagtttcggaaagcgccttgccagcatgctgggttcaattccagctccacccgcaatggcttcagagttcccgccgagcacaggaaaatctgttgtcccacttagtgctgtcaacccgagtagctctatccgtgtcactgcaggcattatccaactcggtggtatcacttttactggtagcaccgagcacctgcagaagaatggagatttcaatttgctcctctctttcactgtcgagggcgacgtctcaaccaaatccattggttttgaaccggatacgcagatgagcaccacgccaatggtgttgcgcagcggcatgtatcttttcttcgtatcggcgatgattctcatgttgagctacaaagttgggctgtgtatctacagcaggtaagttatagtagtttttgttgccccaggctgtttattaaattgaaggagtcatacagagtccactcgacgtagagggaactgcctgcgatttggacagtttggttctttacattgttatagttggtataccgttctgacagttgaaagatacatagcaataaactctggaattggagaaactagagttacacgaatttggtgctgaaacttttgttggtggcatgtactgtataatttactctatttatttatttcacccaattctgggaggctgtaagcgttccccgatcgatgtaagctgatctgaaacctgaatacgcgctcttcatttttcatacccaaagggccgagaggcacagtttgcagttaaaaaaaaaaaaaaaaaaaaaaaaaagggcggaccga

SEQ ID NO: 21961 - DNA, 1596 bp, Oryza sativa; identical to SEQ ID NO: 12489
  Clone ID: TF_OsC277393_1

SEQ ID NO: 21962 - DNA, 171 bp, Oryza sativa
  unsure (1)..(171): unsure at all n locations
  Clone ID: TF_LIB4370-024-R1-K1-D2
cttcctagctgacacntcctatattttcattcatggcgatgacaccgcagctagcattttctcgcatgcctcagggtttcggttccagccgacggacgagcagcttgtcgtcgactacttgcagaggcgtaccgcttgcgcagccatggcgttactcccgacatcacccga

SEQ ID NO: 21963 - DNA, 2933 bp, Oryza sativa
  Clone ID: TF_OsC13359_1
ctttttttttttttatagataaccaaatcaagaaatattattcaataacatttcagtttacaatttcactgttttacacgcaaagtttagacctgagctaaaaaaagcttcctgacactatcaaggtatattctaccgaatccgtcatgtccccaggaagtcccatatgaatttagatagatcagataacattcaccgtcccgaatcccaaaaccaacaacaacgacacaatgagaacagggattaccttttttattcaattcatattggggatcttcttctggaattttgtagatttgatgaggtagcaacctgaagtaaccagttgttacccggaaactagcaatgagcacctttccatccattatatggctctcaataactttctttatcttcgtcagaaatatgtgctccttcattctcatcttttttctgaacctcctttttttcttctttcctatacacttcttgtcaacaatgcttacttcttccttatcacgttccctcatcgcaatctcaagattgagctcttcgtattgtttgattttgtatctttctgtggactgagcctgagggttcatatatgattcttccgaaataacgccttcatttttcatcttatctaaacaaacattcaaccttttcgaacccttgactttatgcctggtataaaaatcttctactatatcttccaactgagctcttgacagattaaccagaaattcatcaggctgtccaatcttatcttttaagatagtagggtatgatgcatattctcttttatacaaggactcaactgatgatagtgtcgcgtaatatgatctcgtcccagaagtttgttgcctcactggagggagaattaatctgttatgaaacttccttgttctccaactaaaacagagatcagtgctgtgctctttcaaactctcaaaagcatatgcatcggcattgaagctcccctctataaactggtttgagacaatgggcacaacttcagatagaccatacatttgagtcattttgtcaactttagcacggatgtcaccaaggaaattgattatctggaacaaatttatctgtgtagacttctccataatagtttgttgatatctagcaaagcgaacaaggcatctcactttgccattaaagatacttccaaactctctcatttcagaattaattccatcgataagtttcaaatgtctggtggaattattcatgaacagttcaacaatttgaagtgtcttgatcatttcatatactgcacaactggttacttcacctggagcaaactcagctatatcgaccttcagctgcaaaacttcatcttctaattttcctatttctgaggaggtatccatgatttttctgaatgaagcctgcaaatttgagcctaactgtgacacccagacttcttcatcttgtactcttaaatttaacttctgaagcatctggtgcaaactggatgataaatccatcgcagacgtgttctccttatcgagtttcttgacttgtgaatccagacgaacataggcaattgaactaaaccgtggttcctcaatcatcaactccaaataattattaagacacctcaaagcacagttattatgttcagcagtttcaactgattgtcgaatagatggtccatatttgttgttgaagtctgtcagatgttgaatctgagccttttccaatttgccttccatcttccaaattcgttttttacctttgtttattttttgtctcacagtggccaaatcaagtaatactgactcaagcaattttgccaacttatcaataactctgaacattgattcacgaaaccatttcctagacacactgtgacgtagacaccaaatatgaggaatcttttgtcggtagagccttgtgcttgacctggttatcttggtggaacatttcttgctttttcgttcatccaattctctgatgaagatactttttttgtctgaagacacagcctgggaattcattaccatattttgcctttgtatttctgcaagatattgagagtaggatcccagaaaattatgatgaacacctaaattcaaggagatatgttcatcttcaacaatctttctgtctttctgaaggaacattctacatagagacttgtaggcctgtggtaaattcagttcatcattctgttctatcaaatattcgtacatcatcaacccacttcttgtaccgcatggtgtttggccttcatgaaactctaaacagagtttcacgcccaagatagatgtgcctgtctgtattctgcaagcatcaacgcacttccaatatccattctttgcctttctgaaaacattgttctcgtcatcatagcatagctggttatcaggccaattcaagaaccaaagggttccaggggagtcccgtggatcaatcatagtaaggtcaacccccaccagtatgttctgtggaagaggatcccatgtttttctctcagccaagaacatgatgatttcagtatcagaccaagagtcccccatagcaatgccaagtggtggtagtaccctagaaaataactccattttcagcaatgcactgcgataagatgcaatggtgtttctcacgtcctccctgccgcgcttgtacacctcctgcgccttctccgctagcgcgcctgccgccgccgccgccgccactgcctttgtcttggcgagctcgagctcggccttcacgctccacagctcctcccgcaacgcgtccgcctccgcgccagcatcgcgctctcgcgccctcatgtagtaggttgaggcgatcacgtccacctccaccccgctgtcatgcttgcccgtcgctgctctgccgctgccctctacctgcttcgccttccgctcgctttgaagaggaagagaagagagaaaagagaagagaaggagaagaaaagaggagagggtggctgacat

SEQ ID NO: 21964 - DNA, 732 bp, Oryza sativa
  Clone ID: TF_OsC13359_2
gcctgtggtaaattcagttcatcatctggttctatcaaatattcgtacatcatcaacccacttcttgtaccgcatggtgtttggccttcatgaaactctaaacagagtttcacgcccaagatagatgtgcctgtctgtattctgcaagcatcaacgcacttccaatatccattctttgcctttctgaaaacattgttctcgtcatcatagcatagctggttatcaggccaattcaagaaccaaagggttccaggggagtcccgtggatcaatcatagtaaggtcaacccccaccagtatgttctgtggaagaggatcccatgtttttctctcagccaagaacatgatgatttcagtatcagaccaagagtcccccatagcaatgccaagtggtggtagtacccggagaggcataatctgcgaagaagccgaggctcgatgtcgacgacgaaactgacgaacaccctggggtcgccgtcggagcagaggaaggaggtgcagtagggtaaccaagcacagaaatccacgtactctacggcggcggtgatccttcgccctagggaggccagaaatggaggagcggcgcggtgccggcggcggtgcccggatgcagaggatcgagtggattgggaaggtcgcgggtcgccggtggcctccggcgatgacttcccgcggcctcctcgccgcgccttggcggagaagggagaggaggggacacaaaccggacgcgtgg

SEQ ID NO: 21965 - DNA, 481 bp, Oryza sativa
  Clone ID: TF_uC-osflM202051g08a1
ggtggcgtcgtccatcgattctttcttgggcaccatcatcgccgtcgccggcggcggcgcaggctggaacgccgggaacgagtccagctccgggaaggggtcgttgtccacgatctccgactccggcgtgcgcgtctcgccccacgagtgggtgtgcgagtgcgactgcgacgtaaccatgtcggacgcctcctccttcacctccttcccctgctgcatcttctcccactcgttcttcttgttgtacagccgacacagcacccaatcatccaactgcacaaacaattcacaccagatcagatcagaccacgatccaattatcgatcatcactcccaccgaataatcttcgatcgaagcaaggatcattgctagtaattcggatgaatctgagctaagcttaccctgagagatcccttcttggcgcccgcggcggcgcggcccgcatcggcgagccggtactcatgcatgatccaatcagtc

SEQ ID NO: 21966 - DNA, 406 bp, Oryza sativa
  Clone ID: TF_uC-osflcyp108a03b1
gctgtctgtctctctctctctctctgactatctggggctgtgaaaactctgagcatgtgaagaactcatacgttacctgtgatctgagaagcttgagctgaagctgtgacagcgtctcactgatcgatgatcactcaacttggctgctactgcgcattcactgcgtggttagctagctaactgagcacaagagctttagcaatggcgacgcctgggcagcagctgccgccggggttcaggttccacccgacggacgaggagctggtggtgcagtacctccggcggagggcgctgtgccggccgctccccgccgacgtgatcgaggacgtccactacgccggcgtgcttgacccctgggacctccccggcgcccgcgatggcgaggcctacttgttcagtttccggc

SEQ ID NO: 21967 - DNA, 1395 bp, Oryza sativa
  Clone ID: TF_OsC114295_1
ctattgcacatgactgtaggagttgggagttaaggggtattctcagtgcatataaatattactagtgcagttgactgaagaatcaccaaataactcacatgaaaactttattgtctgccggattcaacattaactgcctgtactgtataaaatacaagttaatctatatgtattctcatcaatattttaaaaacctcctattgtacctgcaacccaatgaacgtcatacacattacacggtccagacggtccaaaacgttcgtttggagagtcttcttgtatgctattaattattcacagggatatgccgagaaggtgccaaatggcatctgatataggctgcaggtatagggttttgagttgtaaggagacgaaaaacttaaggttgtctttgtcgtatagacaagtgtaggaaattgtccacgtgtaagatgagactaggcaagaagagcagcactgactagtgtgcagcctgggctaccacccctgctagtaatgcagactattcaacagagttaacggaatttctacttcttatgtgcaagaggaactccctgaagcaaattgcgagcttgttgttgcagttgattgaggaccccaggggtgagataacgctctttgtgccatagagttaggctttttaaatatcttacaaatagcccagatatctttggctggttttttatctattggtattttagaaagtgaaggctccgtgagtgaaggaagtctgaactcatgcatcatccaatcagtcttgaacccttttgctgctctccctttgtaaaagacaagagacttcttcaggcttatgcatttggttccctcggaagagtagatgggcctctgaagaaaggttaacagtaatattactcccgagttccaaaatgcatgtattgtgataggagttagaagattatgggtttgagcatatgaaaaacccaacgcaacaccaagtataaacaactgtgggaattgtccaggtgtcagatgagcaaaggcaaatagagcagcactgacaagtatgcaaactggagtaggaaaccacttagtcaaggacaccattaaaaatcctcgaaacacagtctcctccagaattggtgctagaactccagtaatgcccaccagaaaagcagtgctggcacttgatgagccgattaatggcaataaaagaactaacgagtcagtctctctttctggaggttcaccattcagataagtcatagcaaccccaactaaagcaatagaaattatagcgccaaagagaccaactccagcccacagaagccagccattttgaagcttgaatggttctttaatattccacagcccaccatggtgagcaccaccgtctgccactcccacggcacatcccatcggcgaaggattggccat

SEQ ID NO: 21968 - DNA, 346 bp, Oryza sativa
  Clone ID: TF_jC-osleLIB3474001h09b1
tggactcatgggcggacgcgtggttatttttatacaacgcatagtattagctgcaactagacgcaagcatgaagcgatggggatggtgatgaggagggagaggtatctggaggcggagcttaacctgcctcctgggttcaggctccaccccacggacgactagctggtggagcactatctgtgcaggatggctgcggtgcatcgcctgccgcagccgatcatgggctaggtggatctctactagttcgactcatggaatctgaccaatcgctctctgtacggccccagagagtggctcttcttcatctcgcgcgatcgcaagtatactactgggtaacgctccaac

SEQ ID NO: 21969 - DNA, 376 bp, Oryza sativa
  Clone ID: TF_LIB3434-009-P1-K1-B11
cccacgcgtccggagatcgatatcagcagctagctaagcttcttccatagttagctagctagctcgcttctgcgtgtgagatcgatcgatttgtcgatcgcctagctaggacgacgagatggcactgagggagatcgagtcgacgctgccgccggggtttaggttcttcccgagcgacgaggagttggtctgccactacctccacaagaaggtggccaacgagcggatcgcgcagggctcgacgctggtggaggtcgacctccatgcccgcgaaccgtgggagctcccagaggtggcgaaactgacggcgagcgagtggtacttcttcagcttccgcgaccgcaagtacgcgacggggtcgcgcaccaaccgggcc

SEQ ID NO: 21970 - DNA, 2037 bp, Oryza sativa; identical to SEQ ID NO: 12535
  Clone ID: TF_OsC33185_2

SEQ ID NO: 21971 - DNA, 2121 bp, Oryza sativa; identical to SEQ ID NO: 12536
  Clone ID: TF_OsC33185_3

SEQ ID NO: 21972 - DNA, 1076 bp, Oryza sativa
  Clone ID: TF_OsC2923_1
ttttttttttttttttttttgaagagattgaaaacaaggataattgattatcttcggagttcggagtgagctcaaacaaagatgagaattttcttttctttttttttctcttctttgtttgagctcgattctgattctctcttgctaggaattacaactagttaattaattaaaagacattagtagagcaaaagaagggcgctgattaggacatgaaagcatggtaattaacggcctagtcaaacactaacacggtaaaacctctccctctctcatctgatcatctcatggacaattagaagcgacgacgctgcagctgctgctctcttctccctcctcccccgcgtcgccgccgtccgtcacgcaggacgacggcgaggacggcatgtcgtcgtcgtcggcggcggcggctcgccggcgtggcgcgccacggatggacggcggcgaacggcggtgagccagcgtggtggtcttcttgaatacgcggcagaccacccagacgtcgttggcctccggcggatggtcgtcggcggggaggaggcggtactcgtgcatggcccagtcggtgcgggcgccgccgcggcggaagaagacgagcgtccgcttggcgccgacgggccgcttgccgcagcgcggcgcgacgacgagcttctccttcccggacgccctccacgcgccgccgccgccgcccgccctgctcccgccgccgcccctccgccagcagctcgtcgccggcaggtggaagaagtacctctcgccgtctccctcgcctggaaggtcccatggatggaggcgggcgaggtcggcgacggggatgacgtcggcggggagggggcgcgacatgaccttgcggcggaggtagtggagcaggagctcctcgtcggtgggtcggaaccggaaaccgatcggcaaccccgcctgcggcagcatccggtacccaccaccgccaccggaggccgcctccgccgccatgaatgagagcttagacgccggcgacgacctcgctggcgggcggcggcgcgggtcggggttgggtttgttggtcagctcgcttattacatgtcaggtaagagctc

SEQ ID NO: 21973 - DNA, 1718 bp, Oryza sativa
  Clone ID: TF_OsC5734_7
atggagcgacggtgtggcacgtcggcgccggcgatcgaagacatgtcgccgcacagccggagcacggccggaaaatacatagctggctacatagtgaaaaaaaaaatgcatcctaatggcgcgccgctggccgtgccaccgggtttccggttccatccgacggacgaggaattgctctactactacctgaggaagaaggttgcttatgaggccatagatctcgacgtcatcagggagattgacctcaacaagcttgagccttgggatctcaaagatcgatgcaggattgggacgggggcgcaggaggagtggtacttcttcagccacaaggacaagaagtacccgacggggacgaggaccaaccgcgccacggtggccggcttctggaaggccaccggccgtgacaaggccatcttcctcggcagcggcggcggcacgaggattggcctgaggaagacgctggtgttctacaccggaagggccccgcacggcaagaagaccgactggatcatgcacgagtaccgcctcgacgacgacaatgtcgacgtcccggaggaaggatgggtggtgtgtagggtattcaagaagaagagcatccatcagaggggcttcgaccagccggacatggcggcggcggccgacgaggacgagctccggtaccagctgctccacggcgcgggcatgtcgtcgtcgccggtcgaccagaagcacgtgctcctccaagagcagctcgtcgcgcacggcgcccatggcggcggcttcgtcgtcccggcgttcgaagcctccatgcacctcccgcagctcgccagcgccgacgcggcgccgtgcggcggcggcggcggcggccatgtcgcgttcgcctccatgaacccgctcgacgccgccggctgcggctcgcagaacatgatgacgatgaagatggcagcgacatccggtggcgagatgctgctgatgagcggcggcggcgtcgacggcggccgcttcggcgccgccgccgactggtcgatccttgacaagctcctggcgtcgcaccagaacctcgaccagctcttccatggcaaggtcgccggagcgcatcagcagcagcagcagatggccatggacgccgcctcgtcgttgcagaggttgccgttccaccattacctcgggttggaagctgcagatcttctcaaatccagtccactcccagtctcccaccgtccagtcccagacagagtcccacaggcgcacgattcctcacctcctcatcggccggcgccgccgtggggccaagccgtcgtcgcctcctcgctgcggggccaagccgccgccgccgccgggaccaatcgcctcctcgcccagtcgccacatcgccgccatcggagcaacccacgccggctctgccgcgccccattgcctcctcgcgccgtcacgcgccacatcgccgccgccgggccaagccaaccaacgccgccgccgcggcgccccatcgcctcctcgcctgccgcaccgtcaagccccaagatttggtatgacttgtagtggcttgccacatcgccgccgcaggggcaaggcgacgccgccgccgggccaagccaacgtcgccgccgtttgtgttaatgattgtgtattcatgtgtgattatatcataaataggcttgtgccttgcggtagtttgttctgcaggctgcagctgtggctttaccatgctctatgaattttacatgtgttttcagttg

SEQ ID NO: 21974 - DNA, 1067 bp, Oryza sativa
  Clone ID: TF_OsC225972_1
agcccagctatttcattcacacctcgatcaatctcgatcgtctctctcgtctactactagtactagcttcttctcctccatttctgacctgagctagctcagaacagagagctgagaatcatcagctagctagctaggcgtctggggagagagcaggagccatgtcggagtcggaggtgtcggtgatcaaccagctggaggaggaggagactcggctggagctgccgccggggttccggttccaccccaccgacgaggaggtggtgacccactacctcacccgcaaggcccaggaccggagcttctcctgcgtcgtcatcgccgacgtgaacctcaacaactgcgagccatgggacctcccaagcaaggcgaagatgggggagaaggagtggttcttcttctgccacaaggaccgcaagtacccgacggggatgaggacgaaccgggcgacggccagcgggtactggaaggccaccgggaaggacaaggagatcttccgcggccgcggcctcctcgtcggcatgaagaagacgctcgtcttctacatgggccgcgccccccgcggcgagaagaccccctgggtcatgcacgaataccgcctcgacggcaagcttccccccaacctcccccgctccgcaaaggaggaatgggcggtttgccgggtgttcaacaaagacttggcggcaaagattgcccaaatgccgccgcctcccttcccgcgcaacgactccttcgacctcgacctcgacgacttcctccacctcgacgccgacctgccgccgctcatcgacgaccccttcgcctccacctccacgctcaagacggagccacctccgccggccaacctgatgcacaaccactacggctacttctccctcccggcgtcagcgaccaattataaccacagctccggcgccatggcggaccaggcgattcggaggttctgcaaggcggaggcgtcgacggcgtgcttctccggcgccgacgctgacgtggatccggtggtggacgagctgctctccttcccggactccatcacggactactcctacatatggaaggcctga

SEQ ID NO: 21975 - DNA, 1131 bp, Oryza sativa; identical to SEQ ID NO: 12567
  Clone ID: TF_OsC256659_1

SEQ ID NO: 21976 - DNA, 354 bp, Oryza sativa
  Clone ID: TF_uC-osroM202005c08b1
tcgttcctcttcccaacactagtaggataaagccgcagagagagcagtagtagtagcgagctcgccggagaacggacgatcaccggagaagggggagagagatgagcggcggtcaggacctgcagctgccgccggggttccggttccacccgacggacgaggagctggtgatgcactacctctgccgccgctgcgccggcctccccatcgccgtccccatcatcgccgagatcgacctctacaagttcgatccatggcagcttccccgtacgataatcctcctcctccatcctcccaatcatcaccaccatcaacgccgtcgtgaattgattgattgatttggtttgatttgtt

SEQ ID NO: 21977 - DNA, 1343 bp, Oryza sativa
  Clone ID: TF_OsC1780_1
cccgcggcgtcgccacggaagcgcagcatagacagaggcagcagcagcagcagcagcagcgttggtggtggtggtgtgtcatcaccaacattttcacgagaggagaaggatggaaatggcggcggcggttgggggcagcgggaggagggacgcggaggcggagctgaacctgccgccgggcttccgtttccacccgaccgacgaggagctcgtggtgcactacctctgccgcaaggttgcccggcagccgctccccgtcccaatcatcgccgaggtcgacctctacaagctcgacccctgggatctccctgagaaggcgttgttcgggaggaaagagtggtacttcttcacgccgagggaccggaagtacccgaacgggtcgaggccgaaccgcgcagcggggagagggtactggaaggcgacgggagccgacaagccggtggcgcccaaggggagcgcgaggacggtggggatcaagaaggcgctcgtgttctactccgggaaggcgccgaggggggtcaagacggactggatcatgcacgagtaccgcctcgccgacgccgaccgcgccccgggcggcaagaagggctcacagaagctggacgagtgggtgctgtgccggctgtacaacaagaagaacaactgggagaaggtgaagctggagcagcaggacgtggcctccgtggcggcggcggcgccgcgcaaccaccaccatcagaacggcgaggtcatggacgcggcggcggctgacaccatgtccgacagcttccagacgcacgactccgacatcgacaacgcctccgccggcctgcggcacggtggctgcggcggcggcggcttcggcgacgtggcgccgccgaggaatgggttcgtgacggtgaaggaggacaacgactggttcaccggcctcaacttcgacgagctgcagccgccgtacatgatgaacctgcagcacatgcagatgcagatggtgaatccggcggcgccagggcacgacggcggctacttgcagtccatcagctcgccgcagatgaagatgtggcagacaatcctgccaccattctgagatggatggagcaagaaaaaggttgctgtagataaagggcggaaataggagtgatggctagaaaattattagatttactagaacgaaaatgattagaaatctggcaagcatgattctgcaaatgtggtggtagatgcttgcagtatgtaattcatttgttcagtatatgcatttggtaatctgcaaaacaaaaaaaaaaaaaaaaaaaaaaaaaacaaaacatatatgattttatccttcattagtctgaattctgaaatatatgcttgatggtttt

SEQ ID NO: 21978 - DNA, 1829 bp, Oryza sativa
  Clone ID: TF_OsC311999_1
gggctgcaggaattcggcacgagggttcttcctctctcatgtgccattagccaatagcatcaaggttttggtacattgtagctgattataattcattcatatagctattcaaacaagttcggtggctgtccacattttagctttggatagccggcttgccagctgcctgcctagctctaagcatctcttgctgttggagtttggagaggaaggctagaggaagcatatggcgcccgtgagtttgcctccaggtttcaggttccaccccaccgatgaagaactaatcatctactaccttaagcggaagatcaacggaagacagatagaactcgaaatcattccagaggttgatctttacaagtgtgagccttgggatctgcctgaaaaatcctttcttccgagtaaagatctcgaatggtacttcttcagccctagagaccgcaagtacccaaatggatcaaggacgaaccgtgcaacaaaagccggatactggaaggcaactgggaaagatcgaaaagtgaactcacagaggcgtgcagttggtatgaagaagactcttgtgtactaccgtggtcgagctccacatggttctcgcaccgattgggtcatgcacgagtaccgcctcgatgagagggaatgcgagactgacactggcttacaggatgcatatgctttatgccgggtgttcaagaagacagcgcccgggccaaagatcatagagcattatggtgtggtgcaccaccatgtcgagcaacctcaatggatgacgagcagtatcgatcgctccccaacgttggacgtgtcgtgtgatggaagaggtgatgactttgagagcagcagcttctctttcccaacagagacgccaatggactccatgcacggtgggtttggaatgcagatgagtgcacctcacgaggatggcaaatggatgcagtttctgagtgaagatgccttcaacgccaccaatccattcttgacgaacccagtttctgccaacttctcatgccttccatccaaggtggatgttgcactggaatgtgcgaggctgcagcacaggctcaccttgcctcccttggaggtggaggatttcccacaggacgtcagccttgacacgaagattggcatacttcgcagtaaccccaacgaagttgacattctccaagaattcctgtcagttgcgactgcctctcaggagctaattaatggctccaccagtagctaccctgaaatgtggttaggagctagcacaagcagtgctagctacgtcaatgaactgtcctctctagttgagatgggcggcgttggcacttctaaccaccacgaatccgcaaggctacaggtcgagatcgctgacatggaggtgttcaaggacgagaagaagcgggtggagaaccttagaggagtcaagttggtgaacacagtattccatattcgatacagactgtatacagatacagttcttgcatgcactaactcagagctagattgcaggagaagccggtcatcgcatgaccgatcccactgacgtaggcggcatcgacactgccccgatcttctcgcaatctcaacctgacgactttgctgctggtttcgacgacgtcaaccctaatgcatctttcgatctgtacgagaaggttgacgtcaaccacaggctattcgtttcaagggtcgctgcggcgaagacattcttccaccgcattgagccatcgaagaaggtcagcttccactcgaacccggcagcaaccgccgtcagtaaggcgaccgagaagttccatttccccgttacgaccaaagttagtggtaggataatgggcattgccctctctgcc

SEQ ID NO: 21979 - DNA, 1770 bp, Oryza sativa
  Clone ID: TF_OsC652_3
agtgctaatattacggagtatttttgcaaagggagtaatcaaagttccaatacgaaatcgcggtcgtagtagtacaatacaaagacgagttcacggagcgcgtaaactaataaggaaaaattaaacgtcgcggagaaataatagccgaactggatgaagatgagcagcactgcctcttgcctagcctagcccatcatggcgaggccgacggccccgaccagcaggcccatcaccgaacgggcctcgctgccgctggccccgccggtgctgcccgtcgacttcgtcgtcgtcggccggccgccgggatcacaaaacacataaaactatatcatcatcttccatagctgtacacatcctatattttcattcatggcgatgacaccgcagctagcattttctcgcatgcctccagggtttcggttccagccgacggacgagcagcttgtcgtcgactacttgcagaggcgtaccgctgcgcagccatgcgttactcccgacatcaccgatatcgacgtttacaacgtcgacccgtggcagcttccagccatggcgatgtatggatcggatcatgaccggtacttcttcacgatggcggcccgagaggcgcaggccagacgaacgacaccgtcgggtttctggaagcccaccggcacaaagaagacgatcttcgtcgtcgccggtgggcatgaggtgcccaccgccgtcaagaggaggttcgtcttctacctcggccaccaccaaccatcgggcagcaacaacaacaacaaaacatcatggatcatgcatgagtaccgtctcatgaactctccaagagcggcagtgccgtcgtcttcttcggtgaatcgtcttcccactgatgatctcacggaagagatggtgctgtgtaggatctccaacaaggacctgcctaaaccacccttcatccacaacagcttgttgcagttctcttcagtggggttgaatggtgatgggtataattacttgatccttgatcaccttgagcctccagcaatggagtatcctaatgttggcattggtaatgttgatgatgctgctgctggtactgatgatccgggtgaccttgatgaggagattgatgatagcatgcaaagaaaccatggtggctagaattaaccagtagcatcatgagtgaatggttttgcgggaaatttgagttaaatatcagataataaaataataatcggaaaaaaaaaaaaaaaaaacccgcggcccggaagagatggtgctgtgtaggatctccaacaaggacctgcctaaaccacccttcatccacaacagcttgttgcagttctcttcagtggggttgaatggtgatgggtataattacttgatccttgatcaccttgagcctccagcaatggagtatcctaatgttggcattggtaatgttgatgatgctgctgctggtactgatgatccgggtgaccttgatgaggagattgatgatagcatgcaaagaaaccatggtggctagaattaaccagtagcatcatgagtgaatggttttgcgggagatttgagttaaatatcagataataaaataataatacaaagaataaaaagaaaaacaaacctgtatagttagcaggttttgattcatttcgttgaactttgtgtgcttgttagctagcctatataccaaacatgccttggcgaggctttctatttgtatatagctttttttcttttttctattgtaaggttcgaactctattgagttgattgaataaacattatgcaatttatgta

SEQ ID NO: 21980 - DNA, 1422 bp, Oryza sativa
  Clone ID: TF_OsC1517_1609
tctctccctcctcccgcgcgcggggtctcgccttaacgtttgccgcatatgggggcgacgagcaaagcgtaggccggagggagggacagggagagagagagagagaggctttctggctcgctctctctgcacgatctctcgtcttgttggattatacagccatgacatggtgcaacagcttcaacgacgtgcgcgccgtggagaacaacctggccaccgccgccgccgtggccgcggccaagaagcagcagcagcagcagcaggtctcccagcacgtcaacctcatcaagacctgcccctcctgcggccaccgcgcgcagtatgagcagagtcagttgcaggcagcggcggcggcgacgatccaggacctgccggggctgccggccggggtgaagttcgacccgacggaccaggagctgctggagcacctggaagggaaggcgaggcctgacgcgcggaagctccaccccctcatcgacgagttcatccccaccatcgagggcgagaacggcatctgctacacccatcccgagaggcttccaggcacccgtcagccgtcaggacattggaactggtcaactggatactacgattacgaagccactcttgttgtgttgctgacctgctgttgcatgcatgcacgagtcggcaaggacggcctgatccggcacttcttccaccgcccgtcgaaggcgtacacgacggggacgcggaagcggcggaaggtgcacaccgacgagcagggcggcgagacgcggtggcacaagaccggcaagacgcggccggtgttcaccggcggcaagctgaaggggtacaagaagatcctggtgctctacaccaactacggcaagcagcgcaagccggagaagaccaactgggtgatgcaccagtaccacctgggctccgacgaggaggagaaggacggcgagctcgtcgtgtccaaggtgttctaccagacgcagccgaggcagtgcggcggcggctcggcagcgacggccaaggacctctccgtcgacctcgtcgccggtaacaacatcaaggctagcaatgctgctgctgaacaccaccataacgacggcgtcggcggcggcggccacggtggcaacaacagcagcatgctgaaggaagctgcaggcattgtagatttctacaacccagcggcggcgctaatcggctacagccaggcggctcctaacaacagggcggctgcttctgctcatttgacgatgcctaactttgaggtgcacacaggaggtgcaggctttggcccctgatggatggaagaaaacaaagcaaattaaacatatttgactgatgatatatataggttagatggagagggcagggcaggtatatgatggcaaatgtgcatcatgcatgctagcatggtgtaatttgcatcgagtgaaaaaaaaaaaaaaa

SEQ ID NO: 21981 - DNA, 1518 bp, Oryza sativa
  Clone ID: TF_OsC1517_1495
atgtacacctctcccacactccttgctctctcgtttgctcttctactgctcatcctcctcttctactactcgtcctctttgctctattcacagctagcaacaagaaggaggcttacacatgcatgtgcacggtctctgccggacgcatatgaatcaggcatgaatagggggcacatcagcagctcggagctcatcgacgccaagctcgaggaacgccggatctccacggccaagcactgccccagctgcggcaacaagctcgactgcaaaccggattgggtggggctaccggcaggagtcaagttcgatccgacggaccaggagttgatcgagcacctcgaggccaaagtgagggaagaaggctcaagatctcatcctctcatcgatgagttcatacccacgatagaaggggaggacggcatatgctacacccaccctgagaaacttccaggtgtgacaagggacggcctgagcaagcacttcttccaccggccgtcgaaggcgtacacgacggggacgaggaagcggcggaagatccagacggagtgcgacgtgcagaagggggagacgaggtggcacaagaccggcaagacccggccggtgatggtgagcggccggcagaaggggtgcaagaagatactggtcctctacaccaacttcggcaagcaccgcaagccggagaagaccaactgggtgatgcaccagtaccacctcggcgacctcgaggaggagaaggaaggggagctcgtcgtctgcaagatcttctaccagacgcagcctcggcagtgcagctggtcctccgaccgcggcggcggcgccgccgccaccgcatccgccgtgacgacggcggcggtgcagcaggatcagcagcgcaggagggacagcggcagcggcagctgctcgtcgacgagggaccacgaggtgtcggcgacgtcctactcgacggccgggtacgccgtcgccgccgccgtcgagatgcagcatttgaagcatgccgccgaccatttcagcttcgcgcctttcaggaagagtttcgaggaggttggtataagtggtgatcaggtacactccaatcagcttgggaggtcggagcagcagcatgctggccaggaacaacagccgcaccggccgttgcttgcaaccacgacggcggtgcctgccacggccttcctgatcagccggccgacgaaccctgtatcaaatatagtgccaccagcaatgcagcatgcatctgtcgttcttgatcatgatcagttccacgtgccagcaatccttctccaccacgacaaatttcagcagcagcagcaacaaaagcttgacaggaggtctgccggcttggaggaactgataatgggctgcacgtcttcgagcacaaaaggagtagtatatacatgcacgttcaggaagcttcaattcctcactcccaagagacagaatggccttaccagccatactggactcctgacaaccaggatcatcatggatagtagcaacaaggctgcttttgatatgcattag

SEQ ID NO: 21982 - DNA, 1002 bp, Oryza sativa; identical to SEQ ID NO: 12547
  Clone ID: TF_OsC267092_1

SEQ ID NO: 21983 - DNA, 1447 bp, Oryza sativa
  Clone ID: TF_OsC153799_2
atggagatgacgatgtcgtcggcggcgacgtcgctgccgccggggttccggttccacccgacggacgaggagctgatcctgcactacctccgcagccgcgccaccgccgggcagtgccccgtccccatcatcgccgacgtcgacatctacaagttcgatccatgggacctgccatcgaaggcggtgtacggggagagtgagtggtatttcttcagcccgcgagaccgcaagtaccccaacggaatccggccgaaccgcgccgccgggtcggggtactggaaggcgacgggaaccgacaagcccatccacgacagcgccaccggcgagagcgtcggcgtcaagaaggccctcgtcttctaccgcggccgccctcccaagggcaccaagaccagctggatcatgcacgagtaccgcctcgccgccgaccctctcgccgccgccgcaaacacctacaagccctcctcctcctcccgattccgcaacgtctccatgaggctggacgactgggtgctctgccggatctacaagaagtccggccaggcgtcgccgatgatgccgccgctcgccgccgactacgaccacgacgagccgtccggagtccttgacgacgcctacagcttctacgcgccgccgatgatcagcaccacgctcatccccaagctccccaagatcccctccatctccgagctcttcgacgagcacgcgctcgcccagatcttcgacgccgccgccgacccgccggccgaccaccatcagcatgccctcgccgtccacccctccctgaaccagctcctcggcgtcggcgacaacttcctcgcggagtgctacccgtcgacggcgtccacggccaccgttgccggcggcaagcgcaaggcgagcccggccggagactacgccggcggcggccacacgccggcgaagaggctcaacggctcatgcttcgacgtggcgccgcagtccgtggtgggcggcttgcaagcgacgccgtcgtcagtcctcgccggactcaaccaccagatgcttcctcctcagctattctgaatatattcttaactagcttaattaatggccatggaaatcgatcaaacgcagtcgatcgaatttacggatgctacgtactggcatgaacaatcttgccgacgatattaagatcggatggaagcatggacgacgatgatgattggggtacggtatagaattattgtagtattgaacaattaggcatttgtatgcgattttttctcctacgtattcatttcaggcacagtgcaaaagcaagctggagccttgatagtactttacaccgtagagagggaatgttgtacaattaaagattactagatatacagaacaataatactttactgtagccaaaaaaaaaaaaactagtatacaggattgtagaagatatcaaatgcaatagattctggctctgatctgggaaaaa

SEQ ID NO: 21984 - DNA, 1823 bp, Oryza sativa
  Clone ID: TF_OsC148618_1
ttttttttttttttttttttgaaaaaaatgagtggctgccattaaagaatcacttattgattgatttacatgaatatgagctataaatccggctttatgatcttgacatcattctccttgatctcatgttccagacttctagtgggtctatctcaaagtcttatcaacccctatctagcttaattaatctttagtactgagctagcttgagtacacagtagtatagtaccatgagaaaaaatgtatacacaccacaaactatatagctatgcatgatcggacgacctagctagtccacacaagtacaaattaagtacaatttctttcccaatatatttactatttaaatctatcgttttggacctatttgctttcgaaatagacctcactgttcaaatcatcaattcgccatgtgcaattatgttcagtgtttaatcaggctgtggtattatgtacgaagaacgagctatcagttcatccccatgttagagtggagcagcatctggtggctcagtcccagtgacgatccctgcaaggcgctgcctatttggaaagttgcaccaacgcatgaaccgttcggcttcttgcccgccgcggcagcaggaggcagcgcctggatcgtcggctcgcctccgtccgatgatctcttgcgcttcccggtgacggccggcggctcgacgacggcgcctgccgacgtcgaggcggccgcagaggaggacgggtccaggtgcgcgagctgaaccatgctgttgttcgcgatgaaatggttcatgacggggtggccaaagagggcgtgttgttgttgttggtggtggtggtggtcgggctgcctcgccatctcctgcaggggggcggcggcggcggcgccgccgtcgtcgaagagctgcgacagcgagtactcgttgagcaggtcggaaatggaagggatcttctgcatcgccgtcctctgcgtagcggcggcggcggcggcgtgcagcgacgggaaggcgccggcggcagcgccctgcaagatcatggatgcggcgctcgacgacgacggcgcgtacagcggcgcgttctcctccagggcgcacggctcgtcctgctcgtggtcggagagcggcggcacggccagcggcgacgcgtggctgctcttcttgtagatccggcacagcacccagtcatccagcctcacgcgggccgtgccctgcttcatggggcggtaggtgttggcggcgtgggcgtctgcggcggcgaggcggtactcgtgcatgatccagttggtcttggtgcccttgggcgggcggcccttgtagaagacgagcgccttcttgacgccgacgctctcgttggtcgccgcgccgccgctgctgtggatgggcttgtcggtgccggtggccttccagtagccggagcccgcggcgcggttcggccggatcccgttcgggtacttgcggtccctcgggctgaagaagtaccactccctgtccccgtaattcgccttggctgggaggtcccacggatcgaacttgtagatgtcgacgtcggcgatgatggagacggggcacggcgaggaggcggcccggttgcggaggtagtgcacgatcagctcctcgtccgtcgggtggaaccggaaccccggcggcagcatcgccgggttcgacagaaccatcgtctccggcagtcacccacacacaacacacacctccctgcacaagcaaaacctatctagctatagctgctcacttccaagatcaagccactcgatcccctctcagctatgatctatgagatctatcagggtcgagcttgtatcaagaggaggcgagagatggacctcgtgc

SEQ ID NO: 21985 - DNA, 1433 bp, Oryza sativa
  Clone ID: TF_OsC272662_1
atgaacaggtacgacaacaacgggcatgcggcagcggcggcggcggctgcggtggcgggaggaggaggaggaggaggagggaataaggcggcgggggaggtagatgggcatgaggatgacctggtgatgcccgggttcaggttccacccgacggaggaggagctgatcgagttctacctccggcggaaggtggagggcaagcgcttcaacgtcgagctcatcaccttcctcgacctctaccgctacgacccctgggagctccccggaattgagcatctaattaacaagctcgatgggggtgcagcaatggcggcgataggggagaaggagtggttcttctacgtgcctcgggacaggaagtacaggaacggggaccggccgaaccgggtgacggcgtcggggtactggaaggcgacgggggccgaccggatgatccgagccgagaacaaccgccccatcgggctcaagaagacgcttgtcttctactccggcaaggcccccaagggcgtccgcagcagctggatcatgaacgagtatcgccttccccccgccgacaccgaccgctaccacaagactgaaatctcactatgccgcgtgtacaagcgcaccggcatcgacgacggccatggccaggtatccacggcgcggtcgtcggcgcactcccgcggcggcggcgcggcaccggtacaggacaacaagcaaggctcctcgtcgacgtccacgccgacgccgcctccaactccgtccaagctccacctcctcagcagcgagtgcacgtcgccgcccgccatcgtcacggaccacgccgccatggtggcgcacaaggcaccgtcgccgcggcaccatcagcagcagcagcagctccacgctgccaagccttgcggcggctacctgcagaattcctcgatggcttccgctgccggcggcgatcagcagcagcaatttcagcaagacttcgcggcggcattgtaccagcagtactccaagaacacgagcggtgccttcgcctccacgtactcgctgctcaacctcgtcaacgcggcatccatgggcagctccgccgctgccattgatgagctgagctcgctggtgggccacggcacgccgtcctacattaaccccgcggccggcagccacaactatagtcaattccttcacctgcctacgacgccgtcgtcgcatcaaccaacgccggcgccgctcgggacgacgacggcggcagcggcggcgacgctgccgatgtcgctcgccgccttctccgacaggatctgggactggaataatccgatccccgaggccggaggtagggattacagcaccagtactggattcaagtgaatcagcaatagctacagttcatgcacgcgtgcatggcattctgatcagatggtaccaccatgtactacctctgtctctctctctctctctctctg

SEQ ID NO: 21986 - DNA, 968 bp, Oryza sativa
  Clone ID: TF_OsC272918_1
gcacgagggcgttcctcccctctcctctccccttccctccatcgcatcttctcccgctccttcgatcccaaatcggccgccgccgccgctccgccatgtccccctcccgccccgacgaggcggaccccgccgccgacttcggctcccaccccaccgaccaagagctcgtcaccaaatacctacgccgccacgtcgactccggcgggaacccgtggcggtacgtccacgaggccgacgtgtacgccgccgatcccgacgacctcaccggcaagtactccccggccgtcgccagcgacgggtccagggcgtggtacttcttcaccaccgtgcggtccaagagcaccggcgggcagaggagggcgcgggccgtgggcgacggcgggtgctggcactccgaggccggcgccaaggacgtcgtcggaggcatccgcagcccccgcccgatagggcggcgccagttcttctcgttcgtcaacaaggagggcccccggcgggtgcggtcggggtggatcatggtcgagatcggcctcaaatacgcccagcagaacgcctcctccgacgagcttgttctgtgtaaggtgtaccggagcccgcgggcgccaccggctgccgccgccgccaacaaatccatggccgccccacctcccaccgccacgaaatccaagacggaggaggctacaccacctcccgatgacgtgaaaccggtggtggcggctgcgcagactcccgacaccaaaatactcagggcggcgaaggaggcggccgcgactggatgcaagaggaaggccgacgtgaagagctctggtgcaagaaggggcaagcggctctgctcccgctgccgggcggagacatcggaatcggacagcgagacggcggtacttgacaggtcgccgtccatcgaagacgaaacggcggactcttcagaaatccatggaagcagtgatggcaaattcatcaggttcttgtga

SEQ ID NO: 21987 - DNA, 1144 bp, Oryza sativa
  Clone ID: TF_OsC24651_1
atgcacctccccgctgtgggcatgtcacaccccaccgagggtgagcttgtcttccactacctctatcgtcgtgccgttaacatgccgctgccctctgaattcatttgtgatgtcaacgttcttcctcataacccatgggacatcgtcccaggctcagaaaagccagtctactacaaccagggaggtggcagcgactgcatgctggtgggaatgaggcgcaccctaacattttactttgggaattcacggaccgcagagcgcacaaaatggggtatgcaagaatttcgccttgctggcaatggtctttcgccttaccctgcgatgaagcatgccaccggggatggctcaaaaccaccctgcaactgtgccgaaacaaccatcgccaagagaaatgatggtctctctgcagttcttcgtaatgtgctcgccgtcaccccccttgtggaaaccgttgtcgaacctgatggatcatggctgatctgccgcatctacaggacaaggcagcgtgcattgcctgttatcactcctcctgccatagaaaatgcaagggaaatcattatccctcctgccaatggcaatgcaagggaggctcaagtccgctttattgacttcctgcagcagggatcgcacattgagtcatcctccccctgtagttgtatagttggcccctctttggcagagggaagtgatgaatctgctggtagtgttgaccaaaaggattgagcgcaatggagggagcaactaatcgataaaagcatgtcaactagtaaggaataaaaattgtgagtgaggtgacctagtgcaagtatgacctgcaagttatataagtactgttggagactgtgttctgtttaagttggggaactgtatgttctgtttaagttggattgtaagctttgttcaatagtttcaaggaattaaagcgtgtttgggttctaggaggaaaacaaatggtcattccagatgaagaagtctgagtaagcaacttttctaaaaaccgtttggtctgtccttcttcaatatattgtgttctgtattatctcatgcctttgtgtgagactactagctatctattaatatctatatgctttatcttccaccgtatatatagcttcttcagtattcctgtcaaaaaaaaaaaaaa

SEQ ID NO: 21988 - DNA, 651 bp, Oryza sativa
  unsure (1)..(651): unsure at all n locations
  Clone ID: TF_LIB4506-013-R1-K1-B12
ccacgcgtccggtggaatctgaaactgcgggatgcgatactccttcatcctccagtgcgtcgccttccctctcggctgatggccgagcgcgagcgtgaggctgttcaccctgccgatcacctcgccgtcgtcgtcgacgacgtcggcctccgcgctgttagacttccagtaccccaccgccgtcgtcttgatccccctcgccggccggacgccgcgctccttgtaccggctcctcggcgagaacacgtaccacgccccgtccaagctcttcccgaggccaagatctcctgaaaagaaaacaagaactaagaagttataatcgtgttcgtcatcaagaacattacgatggagtgatcataggatcgatcgatccatctgaccatggagttcgtctaggttcaacttgcagacgtccaattgcttgatgacgatgatgttggtcggcatggcgtcgcggaggttgtattttggtttgaggaagtggatgatgagttcttggtcggtcggcgtgaaccgcactccggngatatcggagtacggggacaccggccgatccgcatcgccgacatcgccgtgtcggggaacaatggcgagagcggatgtagctgcaggtggctcaccaccgtcgaccaccaccgcttcctccgcgct

SEQ ID NO: 21989 - DNA, 490 bp, Oryza sativa
  unsure (1)..(490): unsure at all n locations
  Clone ID: TF_OsC58633_1
cggacgcgtggggtgccagtcaccaacccattccggcggcggcgggggaggagaccgagatggggatggagaacccgccgctccggtggccgccggggttccgcttcagcccgaccgacgaggagctcgtcctctacttcctcaagcgccggatcgccaccggccgccccaccccctacatcgccgacgtcgacgtctacaagtcccacccctcccacctccctgagaggtcggcgctgcggacgggggacaagcagtggttcttcttcagccggatggaccgcaagtaccccaacggctcgcgggcgagccgcaccaccggcgagggctactggaaggccaccgggaaggaccgctccatctgcaacggcggnggcggcggcaccgcctcggggcgcgcggtggggagcaagaagaccctcgtgtaccaccacggccgcgccccgcgcggggagcgctcggactgtgtcatgcacgagtacaccctcct

SEQ ID NO: 21990 - DNA, 1515 bp, Oryza sativa
  Clone ID: TF_OsC83405_3
atggaggaggagaagaggttggaaaggattattaaggagattgacagtccaattagcccaggaggaggagcagctttattagcagaagatgatgatctggtgtttccagggtttcgatttcatccgacggatcaagagctcgtggggttttatctgacaaggaaggtggagaagaagcctttcagtattgacatcatcaaggagatcgatatctacaagcatgatccctgggatcttccaaaggtgagccatggcgcggtggcgctgcagggctcgtcgtcgtcgtcgtcgttgtcgacggcggcggcggcggagaaggagtgcggctatttcttctgccttcgagggaggaagtacaggaacagcatccgccccaaccgcgtcaccggctccggcttctggaaggccaccggcatcgacaagccaatctactcttcctcactcgccgccgccgccgccgccgccggtgccggcgactgcattggcctcaagaagtctctcgtctactaccgcggcagcgccggtaaaggcaccaagacagattggatgatgcacgagttccgactcccctcctccatctccgactccgatcacctccaagacgcatcagagacatggacgatttgccggatcttcaagaggagcatgacctacaccaagggcagggcggcggcggcagcagcatccatgaacaagcgaattagccatgagcttcagcacattcatcatcatcagcagcagcaattctactaccacgaggtagtccatgacggccatggccaccaccatcgtcgccacctgcagcactacgccggcagcgcttccatggcagcggcggcggccaacatcgtcgacgtcatcgatcactcgtcggacgccgagacgacgacgaggtctcactctcactctcagtctcacctcgtcgctgacattcgtcatcgtcagtcgccgttcatgctcgacttccatgctgggacggcgtcgtcgtcgtcgtcgacggcggcggggtggagcgaggtgatgagcttcagtagggatggcgggagcagcagcggcagtagctgggacgagctggggaggatcatggatatctctaccaattctgctaataataattactacttcgcgccgccgccttctcccgccggagccgctcgactcctcctagagcgcgccagcccgctgccgccgcctcccgccggagctgctcgcctcctcctcgcgcgcacccgccggagccgcctcaccctacccgccgctgcctgcttccctgctcgcgccgcgccgcgccgcaggtgacggggagtcgtgccaggaggagagggggccattggaggagggctggaggtcgctgcgcatggcccgtcagcatcggcgaggttggctgggcaagaggcgagcgccaacagaggtgccggggaggagcaggccgccggcgcggtcgtaggagagggggcccgctggagcgagggcacaggactagggccgttggacatcattcatgctagcagataa

SEQ ID NO: 21991 - DNA, 2621 bp, Oryza sativa
  unsure (1)..(2621): unsure at all n locations
  Clone ID: TF_OsC18626_3
tcacaacccaaaccagcccttaaaatcattttctaaaagatcaaaatcagctttggcccataatccactaggcagcaggtgaccatcctcacgtttgcatgaagcttttttcaactttcgctcaactctctctttcaaagtatcaactgctgaacaactagggtatgtggctactaacatatgtgaagcaagaacaccctcctcttcctcctgcttgttctccttgtcgcttccctctgctgtcttccgcagcctcagaacagatttagcatttgctgctgaagcatcatgctccttctggtcatcctcatggcaagtcccaccttcagccaaggtacttcctgcattctcttcaatctcaggtttctccatggtgcgttcactttcaccttcatttatgatgcaacttgatgaaccatcaacgctagaacacggtgctgcatcaaggtttgattgtagccgcaccctttgcactgcagcaccctgttgagtaaatgaactagctgagctagcagttggagcttggcgtcgtcttaggatagtgatacccgttgactcagcatcatctccatcagaaagcaagcttgcatttggagcttggtgctgtcttaggatggtaatacccgttgactcagcatcatctccatcagaaaacgaacttgcagttggagcatggcgtcgcctcaggatagtaatacccgttggctcagcatcatctccatcagaaggcatatccttttctgcagttgactcctcaggagcttcattcacatacttcgaagttacaacaatacctggttcctcatcttcacactcatctctagtcatgctcacatcaaaatcaggagataatgattctgatagctgtagcatgagcctcctatttgcagtgccctggtttggaaatgcggagttcggctgtaacggccaagacatgggaaatccagtcccctggaggaatggttcgttgccccatacattattcctcgcgtttgaatcgtccatgctgttgaatagatcttgcaaggattcagcaccagagtccatggagagcacatcctggtcggtgctatcataaggcagcaatggtgtgtcctcatacagtgcactcaactggggatttcggtcatctggccagaaatctaaattttccaacccactcagatcatccatgaattcaccctgcatcaccccatggttctcaaactcagttggtatgattccagtgtccgaatcatactgagcctttgatgttgttgatgaatgctcatctggatcagcaatggttcttcgaagttacaacaatacctggttcctcatcttcacactcatctctagtcatgctcgcatcaaaatcaggagataatgattctgatagttgtagcatgagcctcctacttgcagtgctaattcattattatcatggatattctgttgtgaaccaatcagctgagggaaagcaccagctgaagggctagccttagccccacacattattcctcgcgtttgaatcgtcgagacgtttacttcaatcgttgtcgcgttatcagttctgtctgcaagccaccttgtaattggcgcagcttgagcctcagttagagcaggcaaatcaattgggctttcatgcagagcagattctggagattccctgtttaatggtgtatttccgtcttcaattggttccatgttatcaggagttgaacgagaaggagtgggtgagtatccacttctatccacttcatccggactgggtcgctcaattttctcctcttgctttcggaacagccggtagagaacgtaacctccctgctcaccggactcaaactccggctcggtggtgcggtactcatgcatgatccacccagtccgctcacccttcggcgcacgcccccggtggaacacgagcgtcttcttcatgccaattacttgctgcttcttcttgtcacccttggacctgatcaccctgtccttcccggtggccttccagtacccggcctccgtcgccctgttcgacctgctcccattgggatacttcctatccttcggcgcgaagaagaaccactccggatcatcggagcggatcagagacttatcagggagatcccacggctcgcacttgcagacatcgatctcggggatgacatcggcctcgctcctgatctgccccgtgatcttccccttgaggtagtgcctgacgagctcctcgtcggtggggtggaacctgaacccgagcggcagcttcttgagctccatcaccgtcatgctgttgaatagatcttgcaaggattcagcaccagagtccatggagagcacatcctggtcggtgctatcataaggcagcaatggtgtgtcctcatacagtgcactcaactggggatttcggtcatctggccagaaatctaaattttccaacccactcagatcatccatgaattcaccctgcatcaccccatggttctcaaactcagttggtatgattccagtgtccgaatcatactgagcctttgatgttgttgatgaatgctcatctggatcagcaatggtttgattcaagaactcctccactggatctcgaggattcatattgccatcanaattaccaatggctcttagagggaaat

SEQ ID NO: 21992 - DNA, 505 bp, Oryza sativa
  Clone ID: TF_15856347
cccccgaacgccgaggacctgtttcaggagggttggacgcgagggcatgctgatgtggtcgcccgcgggtcgcgcggtccgtcgaagattctgggcgagcgcgtgctcgtcgaagagtctcggagatggaggggatcttggggacttggggatgagctggtcctgatcatcgcggcgcgtagaactgtaggcgtctcaaggactccggacggctcgtcgtggtcgtatcgcggcgacggcggcatcatcggcgacgcctggccggacttcttgtagatccggcagagcacccagtcgtccagcctcatggagacgttgcggaatcgggaggaggaggagggcttgtaggtgtttgcggcggcggcgagagggtcggcggcgaggcggtactcgtgcatgatccagctggtcttggtgcccttgggagggcgccgctctagaggatccaagcttacgtacgcgtgcatgcgacgtcatagctcttctatagtgtcacctaatcatc

SEQ ID NO: 21993 - DNA, 743 bp, Oryza sativa
  unsure (1)..(743): unsure at all n locations
  Clone ID: TF_OsC53655_2
ngctctctctgctataatttgccgtggagatcagggggttgggtactggaaggtgatgagagtactcaagttgatcgccggagcagcatcagcatcagcatcagcttcaccatgcggggatcagatcatcatcaggatgtcgtcgcggcaccgcggggcggtggcggtggaggagacgacgggcaggcgcacgacatggtgatgccggggttccggttccacccgacggaggaggagctcatcgagttctacctccggcgaaaggtggaggggaagcggttcaacatcgagctcatcgccttcgtcgacctctaccgctatgacccgtgggatcttcccgctctggcctcaattggggacaaggagtggttcttctatgtgccaagggaccgcaagtaccgaaacggcgatcggcccaaccgagtgacgccatcggggtactggaaggccacaggggcggataggatggtgaaggtggagggtgaccgtcctatcggcctcaagaagacgctcgtcttctacgtcggcaaggcgcccaaggggcttcgcagcagctggatcatgaacgagtatcgtctccctcatggcgacgctgaccgctaccaaaaggtagaaatttcgctgtgtcgagtctacaaacgcccaggaatcgaagacaactgtagtgcgatcgaatctcgatctacccgtcacttggccatttgcagattaattactagttctgcactactttaattgccctg

SEQ ID NO: 21994 - DNA, 1485 bp, Oryza sativa; identical to SEQ ID NO: 12527
  Clone ID: TF_OsC422472_1

SEQ ID NO: 21995 - DNA, 703 bp, Oryza sativa
  unsure (1)..(703): unsure at all n locations
  Clone ID: TF_jC-osflLIB3477P002f12a1
attcggctcgaggtttaagtgttcaccaaaaaacttttggatgtttatanagnaagactcggntnncgnccagcagaacatgagctagtcaactattacctcaaacacaagttgctcggcgatgatccccgtgtccacgtcatccctgtcattgatctttgcgatgaggaaccttggaatgtaccagtgatattagcatcgtcatcagctatacgatttggagacccagattggtttttcttcagccctggtgatttcaagtacttgaaaagcaaaaggtttaacaggacaaccaagtgtggattctggaaagccactgggaaagaccgtgacattaggacaggggacactgataacactgtcattgggactaagaagactcttgtttactatcaaggccgagtttcctgaggagtcaagtccaactgggttattcacgaatatcatgctgttacctttcatgaaaaccagaggacttttgttntatgttgcttgatgaagaaacctgngaaaacaactgaaggcggaactgatcccctgatctgtgatgaaggggagcccagcagaagcatgatttctgactatgaaaatcagccaacagcagaaggaattgcatctgaaggtacttttacaggaatagaggcaatctttcaagcaaccccttgggcagagaattgcttctccccaaaacaacagtctctga

SEQ ID NO: 21996 - DNA, 1050 bp, Oryza sativa
  Clone ID: TF_OsC1781_14
atttgctcctcgcctagctagcttgtctctcttccccggaggagaaaaaggaggagacgaagagagaattaattatctcggagatgagcggcggcggcgaaggggcggcggcggcggagaggcaggagctgcagctgccgccggggttcaggttccacccgacggacgaggagctggtgatgcactacctctgccggcggtgcgccggcctccccatcgccgtccccatcatcgccgaggtcgacctctacaagttcgatccatggcatctcccaagaatggcgctgtacggcgagaaggagtggtacttcttctcccctcgggaccgcaagtacccgaacgggtcgcggccgaaccgcgccgccgggtccgggtactggaaggccaccggcgccgacaagccggtgggcacgccgaggccggtggccatcaagaaggcgctcgtcttctacgccggcaaggcgcccaagggcgacaagaccaactggatcatgcacgagtaccgcctcgccgacgtcgaccgctccgcccgcaagaagaacaccctccggctagatgattgggtcctgtgccgaatctacaacaagaaaggcggcgtggagaagccgagcggcggcggcggcggcgaacgttcgaatatgatgagccacggggagaccgcgtcggcgggctcgccgccggagcagaagccggccgtgctgccgccgccgccaccgccgtacgcggcggcggcgccgttctcggagctggcggcgttctacgacgtgcggccgtcggactcggtgccgcgggcgcacggcgcggactcgagctgctcggagcacgtgctgacgacgtcggcgtcgtccggcggcgtcgtcgagcggccggaggtgcagagccagcccaagatcgccgagtgggagcgcacgttcgccggcgccgccgccccggctggcgccgtcagcacggccggaccgattctgggccagctcgaccccgccgccgccgtcgccggcggcggcgacccgctcctccaggacatcctcatgtactggggcaagccgttct

SEQ ID NO: 21997 - DNA, 1440 bp, Oryza sativa
  unsure (1)..(1440): unsure at all n locations
  Clone ID: TF_OsC1783_2
catngtgtcatggctccatcaccacctagcagctctacacctctctcttatattagctctctctctctctctacccccattcatgctcatctccttctagcttccagcttaatcccttccttgtcaatgttaatggacaaactctgagcattgcactacccatcatctcctagctagactcaccttagcttgtctcttngcgtcnctagtgtgtgattctttctcccatttcctgtttggtttgcactgagtgaacaagcaattaagcttggtagtagtagtagttgttgtattgatcgatcgatcgatctagagacgacgatgagcatatcggtgaacatggaatcatgcgtccctcctgggttccggttccaccccaccgacgaggagctcgtcggctactacctccgcaagaaggtcgcctcccagaagatcgacctcgacgtcatccgcgacatcgatctctaccgcatcgaaccctgggatctccaagaacattgtgggatcgggtacgatgagcaaagcgagtggtacttcttcagctacaaggacaggaagtacccgacggggacgaggacgaacagggcgacaatggcggggttctggaaggcgacggggagggacaaggcggtgcacgacaagagcaggctcatcggcatgaggaagacactcgtcttctataagggcagggcgcctaatggccagaagaccgactggatcatgcacgagtaccgcctcgagaccgacgagaacgcgccgccacaggaagaaggatgggtggtgtgccgagcattcaagaagaggacggcgtatccggcgaggagcatggtggagacgtgggactactccttgcacgagcgcaacatcatgagcgccgcggcggcggcggcgttcgccgatccgagcgcggcgtacgcgcagatgaggcggcagcacaggagcgggcggttcaagcaggaggcggagctggacggcgccgccacagccctcctccactactccagccacctcgccgagctgccgcagctcgagagcccctccgcggctgcggcgccgctccagcccaacccgagccagctggccaccgccggcgaggacgacgactgcaagggcgataatggcggtaggagggccaagaaagcccgcgccgccggcgacaaggtggcgacgaccacggactggagagcgctcgacaagttcgtcgcgtcgcagcttagccccggggagtgtggcagcatggaggcaacggcggaagccgcggcggcggcagtcgccggtgtgagctcgccgctggaccacggcgatgacgacatggcagcattgctgtttctcaacagcgacgagagagacgaggtcgacaggtggacggggttgctcggctccggcgccggcgcgagcggcgtcgacggcgacctcggaatctgtgtgtttgacaaatga

SEQ ID NO: 21998 - DNA, 1414 bp, Oryza sativa
  Clone ID: TF_OsC1517_1611
atggccatgggaggcagtagcccggcggcgggcggcggattgggcgggcggcgaggcggcggcggcgccgtcgaagccgcggggttgggagcgggcggtggcccgctggcgaggccgggtggcggcacggtggggcggcagcggcgacggtggcgatgcaggaggcgcgcggtgctgagaggagcgctcgagcgttgtgcggcggcaggaaggaaaaaggaaaagtgcgacgtccgcaccgccgtggacagcagcttgtcgccggccgccgccgtggccgccgccgcggggaagaaggcggcggcgtcgctcgccgtcctcgtcaagatgtgcccctcctgcggccaccgcgcgcggtatgaacaggagacgacgacgatccaggacctgccggggctgccggccggagtgaagttcgatccgacggaccaggagcttcttgagcatttggaagggaaggcgaggccggactcgaggaagctccaccctctcgtcgacgagttcatccccaccatcgagggcgagaatggcatctgctacacccatcccgagaggcttcccggtgtgagcaaggacgggctggtgaggcacttcttccaccggccgtcgaaggcgtacacgacggggacgaggaagcggcggaaggtgcacagcgacgaggtcgacggcggcgagacgcggtggcacaagaccggcaagacgagaccggtgatggccaacggccggcccaggggctacaagaagatcctcgtcctctacaccaactacggcaagcagcgcaagccggagaagaccaactgggtgatgcaccagtaccacctcggctccgacgaggaggagcgggacggcgagctcgtcgtctccaaggtcttcttccagacgcagcccaggcagtgcggctccaccgccgccgccgccgccgccaaggaggcctccgccgccgtcgccgccgccgtggtgaacagcaactactccatcgtccatggccatcaaggtggtggtggtggtagctttctcaaggaggcaaacgttgtgcacgagttctacgacccggcagcaacgatgggttaccggccacctgctcctgctgcgcacttcgcgccaaacttcgcggtgcacgcggcaaggaacagctttggtggcccttgaaggaaaaaccaaaattacacaaaatctaaacattaccgtttataccgatatgattcacataggtgccattatattacattcttaaccttacattcatccatcagttatttgcagttttgttcaaagttgttatatcgtttccgatgctatactgtgcaaagattattactacacgccgttctaactcgaaaatgtcaattaatgtatcagtttgtacatgtatacatgcacacggaagaggtcctgatgatgcatcacttcatat

SEQ ID NO: 21999 - DNA, 4886 bp, Oryza sativa
  Clone ID: TF_OsC1781_2
gacacgggacggcgcacgcggcccctcttcccaacactagtaggataaagccacagagagagcagtagtagtagcgagctcgccggagaacggacgatcaccggagaagggggagagagatgagcggcggtcaggacctgcagctgccgccggggttccggttccacccgacggacgaggagctggtgatgcactacctctgccgccgctgcgccggcctccccatcgccgtccccatcatcgccgagatcgacctctacaagttcgatccatggcagcttccccggatggcgctgtacggagagaaggagtggtacttcttctccccgcgagaccgcaagtacccgaacgggtcgcggccgaaccgcgccgccgggtcggggtactggaaggcgaccggcgccgacaagccggtgggctcgccgaagccggtggcgatcaagaaggccctcgtcttctacgccggcaaggcgcccaagggcgagaagaccaactggatcatgcacgagtaccgcctcgccgacgtcgaccgctccgcccgcaagaagaacagcctcaggttggatgattgggtgctgtgccggatttacaacaagaagggcgggctggagaagccgccggccgcggcggtggcggcggcggggatggtgagcagcggcggcggcgtccagaggaagccgatggtgggggtgaacgcggcggtgagctccccgccggagcagaagccggtggtggcggggccggcgttcccggacctggcggcgtactacgaccggccgtcggactcgatgccgcggctgcacgccgactcgagctgctcggagcaggtgctgtcgccggagttcgcgtgcgaggtgcagagccagcccaagatcagcgagtgggagcgcaccttcgccaccgtcgggcccatcaaccccgccgcctccatcctcgaccccgccggctccggcggcctcggcggcctcggcggcggcggcagcgaccccctcctccaggacatcctcatgtactggggcaagccattctagacgaccaaaaaaaaaaaaaaaccaaccgcattggcagcaatggggtcactgaacacacccgtgcaggctagctagcttcatggccggtgaactttgactcaggcgagccgccggagttgactcaaagataattaaaagaagtgtcttaagtggattggattggattagacagaggagatgaggactcgagaaaggcggcgatgagaccgtggttggggggaccctggcctggactgaacgacgacgaggcagcagcagaaagatggtgcaattgcatcgggtggcatgtcagtgtgtgtgtatagtggcatgtacatagtacatggtgattgattcggtatacagggggctagctttcctgtttctgtttcttcattggttaattattactcccattataaggtcttcttcagggttgctagcttaattaattaattaattagcccagtggttgaagtgtaagtcaaaattcatcaagtcagagactggaataatacaatacagtactgtagatatcgtagaagaaaatgtattttagttcacgtcagattaatagaaaataaaaataatatgatggaaccatgcgaggaaaaagcgtggaattaaaattaaaaaatttttagtcgattgggtatgtattttgagggtggctagggcatggtaacgtgtgtcataaaaagtcgctttctggaggtgtctctcgcttgacctgtaaagccaaattttgtaatgctattatcggctctaataataataacacccctgatagtaatggagctcagccaaacagtttcggctcaactaaaattaggagtggagctgggtggagctctctcacaaaataaactagagttgtggagctgggtttaggcagctccacaactccactccagccccaactcctggagctaaatttaagagttggagctgtaccaaacaagccattcacaagtaataccttttttaagcctataccaaaggaacaccagtatgcatgaagcctctatcgaccagagtggctaaagaaaccagacctggtcaaagttgtatgcaaatggagactagacctcctatgcaaagtgatccccatcacctcactcatgtcgagtgatttggggctcaccccatcaggaagtgcccagtcaaagtggtaaaggaggttcgctaatgtgagctcaagtgtggtggtcgcgagcaacgctccagggcattgcctgcatccagctccgaatgggatgaaccctaagtgtgcgatagatgtcctgatatctgcgccgctattctcgaatctctctggcttgaactcctccgcattgtcccagtactttgggtcccttgctacggcgaatgtgtttattagaacaggtgtcgcttgtggtatgtcatagcccataacacgacagttctccctgctctgtcgtagaattagtgcagaagcgggatgcagccgtaaggtctccttgatgaccatacataagtagtgtagctcactaatgtcgatgccaatcaatttgcctttttcatggccaagcgtgtttcgaacttcctgttgtgccttatccattgctcttggattcctcataagctccaccataatccattcaagtgtggaagctgtggtatcagtagcagctccaaaaatatcggtaacaagggcggcgatgacctccgccgtgagaggggaggtgaggccgtcttcctcctgcagtctcagcagcacgccgagcagatcatcgtcttcgtctttcgcgccgacgccggcgtcactccccttcttctccttgcgctcctcgatgatcgagccgacgatcctcgccatctccgcgtggctcctcctcaggcggcgctcggtgcggcggctcagccaccgcaccacgcgcgacgacgggaacaggtccaccatgctgtacccggccaccagcgtcgtcagcacgccgagctcccggcggtactcctcctgccgcgcgcacttgccgccgaacaccgccctcgcgatcacgtcgttcgtcagcgccgccagcgcccgggtcatgtcgacggcggcggcgttgctgctgccggcgatgatggagtcgacgaggcgcgacacctcctcctgacggatggactcgaggcggcgcacctggcgcgcgctgaggagctccgcgaggcagaccctgcgcgcatggcgccagtgctcgccgtagggcgcgaagatgacgcccttcccgccgaagctgacggcgtcgaccgtcgtgctccgggcgcggtcggcgaacgccgggtcgcgcgccttgagcacctccatggcggcgtccgacccagagacgatcacggtgggcacctcgccgagcctcaccagcatcagcgggccgtgccgccgcgacaggcggagcagcgcgcggtgtggcggcgacgcgccgaggaggtggtggaggctgccgatgacggggaggttccatggccccggaggaaggttcttggctccggtggttgctcccttctcgccgccgcggcgatgagctcccatgaccatgagcgccaacgcgagggcgagagtggccatagcgaccatgcacaagcttccgaaggagagctcatccatggagattggagaatggttttcgatcgacagctcatccatcggctcgcggcttgagccgggagggatgaatgatctgatattctatcggggtggctcgggcgagccgctggaatcgatcggtggccgttggatggcggccgagttattggtagccgtcagatgggagatggaatggcattagttagttactagtatccgtatggacggcggcgatgaaacaggggagccccgaaatgcgtgtaggaaggagatgcatggtactgtactcgagaattataagccgtgtgtatatgcgaaattggttggctagatcgatctgggcgtatttctctctcgaggctcttgctatgtttttcatcttttttaaagaagactggacactttgtcgcatgcaacaaagcatgctgcatttttacaaggtgtcggcaatcatataattatgcacttgtatcagcattcaacatttaagcaaagtaattcttttaagtctagggtacagccaaaaaaccaaaaattaaccgtgctcgatcgatcgatcgatccatggatcgatgatcgcctccaccggcagatcaaaatcgaagcaaaaaatcagggagaattcttggtacttccagtacctctcgtcgacaccacgtgtcgggttttctgcaccgcggatcctcgctggccgcatcgtaacggcgagcgaggttaaaaatagtggagaattcaagaacacatccctgatttttgtttctgccggatggggagtaccgtgagcatggtagaaatgactggtaaaattttcgttgatgataggtagccagagtcgatgtaaccagtcgattttttttttttttttggttttagttgacatgccttcctgatagattcagaacaaacaatagagaagagaggagaaaaaaacacagaggagaaattcagagaccaaagttcaaagttttggaattttcaggggcgccagcagctgatggtattgtcagtcgtgtctaggttcgtagaggaaattaaaatgtagaagaacgggtacttcagttcacttcaggttcgttcgtgccaaacaggtctctgacactttagttaggttttgatttttttttctctttttttctggttttttgtcgtttggtaatgtaatgtaagggtgattgcgacatggtatttatgtgattagagtcgctttcagttgggtctctcgcgtgacctggaaagccaaattttgtaatgcaattatcggtaataataataataataataataataataat

SEQ ID NO: 22000 - DNA, 306 bp, Oryza sativa
  Clone ID: TF_uC-osrocyp010a11b1
ctgacatgcacttttgtttgctgaccaacaaacccaaccccgacccgcgcctgcgcccgccagcgaggtcgtcgccggcgcctaagctctcattcatggcggcggaggcggcctacggtggcggtggtgggtaccggatgctgccgcaggcggagatgccgatcggtttccggttccgacccaccgacgaggagctgctgctctactacctccgtcacatggctatgttgggcgccctagccgcagtagtcaggcttgtggtccaactcttccaccaacattcgtggtgacggaaccagtcacctt

SEQ ID NO: 22001 - DNA, 1632 bp, Oryza sativa; identical to SEQ ID NO: 12585
  Clone ID: TF_OsC359887_1

SEQ ID NO: 22002 - DNA, 1032 bp, Oryza sativa
  Clone ID: TF_OsC83405_2
atgaagaggggttgtgaagatgaacttggagctggtgatgtgattctacgaggggtggaggaggtagaagaggaagatgatgatgacctggttctccccggattccggttccatcctaccgacgaggagctagtgacgttctaccttcgccggaagatcgccgagaagcggctgagcatcgagatcatcaaggagatggacatctacaagcatgatccctccgacttcctcaagacgagcacggtgggcagcgagaaggaatggtacttcttctgccttcgagggaggaagtacaggaacagcatccgacccaaccgggtcaccggctccggcttctggaaggccaccggaatcgaccgcccaatctgctctgccgccggcggcggcggcggcgactgcatcggcctcaagaagtcgctcgtctactaccgcggcagcgccggcaagggcaccaagaccgactggatgatgcacgagttccgcctccctccgccgcccgccgacgacctcgccgccggccgctcctcccctcctccgagcctccaagaagcggaagtttggaccatctgccgaatcttccagaggaacatcacccacaagaagcagccgcagccgcagctcgccgtcgccgccgccgcggtgccggcgccggtgccggacgcgacgagctcgatcaccggcagcctcgagtccgacagcgccggcgacgacgtcgtcgagtacatgaacaccctccagccgccgccggcgagcaacgtgaacggtggctacagcaaccagcgctacttccaggagcaatggaacagtagcagcaatgataataccacagtgtttcatcagcatgcggcggcggcgccaccgccggagccttcgccggcgacggcgatggccggattcggccatgatcagagcgttctcagctcgccggcgccgagcgatttctactacaaggatggatgcaacgatgacatttacaggatggtgatggagctcgccgatccgagcttgttctatgatcatatatatgcttaa

SEQ ID NO: 22003 - DNA, 2555 bp, Oryza sativa
  Clone ID: TF_OsC50016_1
ctcccttcctgagccgcgtttcttccccaaaaaccaagggggaaggcaaactttccccaaatcgcaaccccaatcccaatctagggcacatgagccacccctcgtcgtcgtcctcctccgctcccccggcggcggccgaggccacctccctcgcaccgggattccggttccacccgacggatgaggagctggtgtcctactacctgaagcggaaggtccatgggcggccgctcaaggtggacgccatcgcggaggtggacctgtacaaggtggagccatgggacctccccgcccgctcccgcctccgcagccgcgactcccagtggtacttcttcagccgcctcgaccgcaagcacgccaaccgcgcccgcaccaaccgcgccaccgccggcggctactggaagaccaccggcaaggacagggaggtccgcaacggccccaccaccgtcggcatgaagaagaccctcgtcttccacgccggccgcgcccccaagggcgagcgcaccaactgggtcatgcacgagtaccgcctcgacggccaaaccaccatcccaccacaggattcattcgtcgtgtgccgtatcttccagaaagccggcccaggtccacagaacggggctcagtacggagctccttttgttgaggaggagtgggaggaggatgacgaggatgttggtttgctaccggtggaggagaaggacaactctgatgaccaggaaaaggaaatttctggtgctatggagaagggctatctccagatgagtgacctcgttcagaacttggttgatcaaaatgagaatggtaccattgccttgccagtttctgacaattcaaacaacagcaaccattctgaagacgtggatggaaattcaggggacattttaagtgaccaaaaccttgggtctaactttcttcaccatgttgagcctgtggagcaaaatggcctagtgcttaatgaaaatatgttttctagtgccaatgctggagacctttttaatatatctagccccaatgatggattcctagaactgaaggattttgcagatattgcagatttggagaatcctttagccaatgaatccaccatctggccttctgatggttggccctggaaatcaactgattccatggaggctgtgaatggggctagcaatgaattttctcccttagctggtgaacagatattccagccagaagaattggaacagttgttacagtcactgcaagaagactctcatatgggttcaactatctctgatcccccacattcatctataacaaatttagctaagccagaggaagattgtctaatgttctatgatgcaccctttgattcttcaatgtgtgatgatggttttagacagctcaatggatttcttggctccccatcgaccaatctatctggtattgacatggtggacgatggtatgccgtactatgatgcgatggatgataacttgtttaatgatcttctgagctcagtacagccatcagctggtagcagttcccatgcttttagtgggccagtccttactcaagaggtcaacaattcaacctatacatatagtccaactcaaaaggttttagaacctaattttgtagttggtgccccatcatctgctaggttacctgaagcgggtagtcagttaaattatgttgttttaccagattcccagaccaagagtagtctgatcgggaagcgttttgtaaagatactggattcaatctctgctccccctgcttttgcagcagcagagttcccagctagccttcgcaaatccttggctcctatttctggagctcatcacaacactatccgtgtctctgctgaagtaatcagcataggaagtttaactcctgattctcaagataagtggtcccttgagaaggatgaaggcatggagctgctcttctcggcaggttttgagcctgatacccgtgtacactttggctgcaacacaataaccgcagtactgcgtggtggcttctgcctcttcttcttttcagcaataatgctcttggtgagctacgaggtgggcatgtgcatctatggcaagtaggcctgctggtattggagacgttaagaacatgacgttaggtaatcctatctgtatttgaggcaaactagggacctcctgctgctggcttaatgtattgcactgcatgacattacatgacctccatgtgttgaacaagggctgaggctgtttaactatagcactagcagtaccgttttgcagctcgagagagctagtagtgtatgtatgaattcctcaggtgctattcgtagtagtaagcgcgaattgattattatcagttcatgatggtgctactattcatattcatgtttctggttggcatgggcggtgctagtgcaaactgcagagtgctgtaaatattccccaaatctgcaatgaattgaacgagggtgcatttgcccttatgactgttgcggtgttgcaggtttttgaatgagaaggaaagattactatgtagaaaacgctgtgttgtatttgtcggtcgcaggcatctggtggtaaattctgttactgaag

SEQ ID NO: 22004 - DNA, 2661 bp, Oryza sativa; identical to SEQ ID NO: 12590
  Clone ID: TF_OsC359_8224

SEQ ID NO: 22005 - DNA, 960 bp, Oryza sativa
  Clone ID: TF_OsC18236_1
ctaattttttatacaaacttaatcaaaccgaaataattttaactaaaaaatcaaaagaactacaatgaagtaaaacggaatgattactagctagctaggcccatatcgctccgtaataaatgcagcatctcactctcgtcgtcctctcattctctggtcctcgtcaaccatggatacaagctagctgtgcttcttcttcttcgtcttcttgtaccaaatcattcaaagttttctttcttcaagccttcaatcttctatatatatctccctccatgatcaaccagctatagctacctcactccaacaatcgccgaccacgatggccaccacgaggagcggcgtcggcggcgccatcagcgacccatttgcgacgccggggttccgcttctacccgacggaggaggagcttctcggcttctacctccgccaccgcctcgccggcacgaggcccgacgtcgagcgcgtcatccccgtcgtcgacgtctacggctaccacccgtcccagctcgccgccctggccggggaggcgagcgcgcgcgacacggagcagtggttcttcttctgcccgcgcgccgagcgggagctccacggcggccggccggcgcgcaccacgccgtcggggtactggaaggccacgggatccccgtcctgcgtcatctcctccgccacaaacagggtcatcggcgtcaagcgcaccatggtgttctaccagggccgcgcccccaccggcaccaagacccgctggaagatgaacgagtacaaggccgtcgccgacgacgccgacgccgccgccgccgccatgctccaccagctgaggaacgagctgggagtgtgccgggtgtacatcagcacgggcacgctgagatcgttcgaccgccggccgctcgataatcaacgctgggacacgaacaaggccaagaaccagatcatcagcagcggccgcctcacgccggcgtcgtc

SEQ ID NO: 22006 - DNA, 1467 bp, Oryza sativa
  Clone ID: TF_OsC153799_1
atggcagttgagggttttgaggaagcaattaaatgccttgagaatttgaagctggaatctggagaggccagtcttgagcagcggcttccggcggcggcgtgcggtgatcatcacacagcagcaggggcagggctgccgccgggattccggttccacccgacggacgaggagctcctcctccactacctcggcagccgcgccgcggcggcgccctgcccggcaccgatcatcgccgaggtcgacatctacaagtacaacccgtgggagctgccggcgatggcggtgttcggggagtgcgagtggtacttcttcagcccacgagaccgcaagtaccccaacggcgtccgtcccaaccgcgccgccggctccggctactggaaggcgaccggaaccgacaagcccatcctcggcaacgcagcagacgagactgtgggcgtgaagaaggccctcgtcttctaccgcggtcgcccgcccaagggcaccaagaccagctggatcatgcacgagtaccgcctcgccaacgccgccgcctcctcctcctcctcctatactagtaacatgaagcagctggcctcatcatcatcgtccagctccagcagcgccagcatgaggctggacgagtgggtgctgtgcagaatctacaagaagaaggaggccaaccagcagctgcagcactacatcgacatgatgatggacgacgacaacgatgacgaacacaacctgcaggtgcagcagcagcagcagcagcaggctcaaagccaccggatgccaaggcctccatccatctcagactaccttctcgactactccgacgacctcccgccgtccaccgatcagacgccatctctgcaccttggattcacggcggtgaacgagggcaacaacaagaggcacaaaactatggaggaatattattctatttccatttccactgcagatatgctgcatgcgtcgtcgtccacgtccaacaacaagtcgacgcaaatcaacttctcctccatatttgagccgcagacgcctgcagctgcgggccatcagctgatcgatgaagggcggtggccgggtggggcttggagaagtggccctcaagtgcaaacgagcgacggcaggaagagcagcggttgggctctcagcgtggaggcggtggaactttggatttggggatttggggcggcggtggtggccagatttggggaaaacaatggtggtggtcattgggcgccggcgaggagtgaaatggggtcatggagagacaaggagcttggtgatttcgtcatagaaatgcttctatccatgataaaggtgctcgtcacagaattgctttccagctggctagtgacaagcatcgtccaagccacgtggctgccatacgtggaatccacattggatgtgacatggcagatgacggcggttgatgtagagcatggtggcagcgacatggagtgcgcgcgcgtgctggctttatag

SEQ ID NO: 22007 - DNA, 2631 bp, Oryza sativa
  Clone ID: TF_OsC2635_2
tttttggtttttttttttttttttttttttttttttttttttttttttttttttttgccaaacaacgaacttaggagaagattaatagcaagtaaatagtaggccaaaccatgcaaacttacataaggtttaagtgcagtcataacacaatatacactagtttgataaacaaactttattcagcagcaagtaaataaggtaacacaaagcgaatatctgatcctcagtagcgcgccaggctagacaagttcggatcatagagcatcgccatcgagaactaggccaaaccttcaaaacaatgtacattgttggcctcacaatgcttgcagtgaccaccagttcgagcactggtaaatccagcaacagtccacgagaaagattcagcgaggtttggcttagctcggagcggcagcaggtggccatgaagacacatctgttgcgcagtactgccagcatatggaatcccactaggtcatcagtatcagagtcctctagaacggttctggacttagttatgacagtgggaactgcatgctgggttttgaagcaaagccaccgttattagcagcagcaggtaaatcatcaacaatgcgcatagttggacgcgagtcaccagatggaaaggcagcagatagagtagtactgtatgtgaactgatccatgggataatgccaaaattggttgtttggcaaaggatatgcataggataatcttgtgtctggagcaaagatatcatccatatttacataattttcactgttaggaactccaaagtatgtgggctgttgttcagtaacaccagcattggacggagaaaatccatcaccatttggcacacccaattcagcaagccctgcaatttcattgtacagatcatttgtgctaacctcaaaagcatgagcttcagcttcagacattggtgggagaccagagtgctccccaacagggttgccatgatgaggagaatcagttaaaaacctagaaagttcctccaatacaagcccctcaattacaggactgtctgcattattgaccacattagaacagttgtccacagaaactacctcatcaccaatagattcaacagagtgctgggaaggcagttccatgagagcactttcaccagtaacagtaatattttgatatgttgatccattcccagcacatacatgaggtaaatgctgcacaggtagttcctcaatagctctggcagcaacagaaggctgaacacgtgtatcatcagtagaatttactacctctgaagagggcagcaatggaaacacagaagtttcaacatttggcagcaagggaaacatttcagcatctgcatgctcccattcttcttcattaaatgggagccccatattgctccccaatccctggaccaaggccacttttcttggaaaattttgcgagaggacaaaatcatcctttgagaaaccagcagagaccaattgattgtcttccattttgtattcgtacatcacccaatcagtcctgttgcctttaggtgctttgccttcatgaaaaatcagtgttttctttgacccaacaatgcgagagttaagctcaatcgttctatctttcccacttgttttccagtaaccatttggtgtggaacgatttgtcctagacccattaggatatttcttgtctcgtgggcaaaagaagaaccattcaagatctctgctctggagacaggattgagcaggaagatcccagggagcaaatttatacagttcaacatctgatatagcttgaataagaggcttctttcccataatcttccttttcaaatagtatgaaacaagttcaacatctgttggatgaaaacgaaagccaggtggcaagcaagtttgagccatcactgcagtgtatatcttgccttcagcaccaataagacaacagagacctttgtttaaggtacaagcagaaatgcttcaccaaataatgccaataccaataatcaacaagtgatctaagattgaccagtaagggaaatgtttgagtgctcaaacaacagaatttaggagcacaaacaatcaagagaacttaggagagagctgcttttgatgtttgagcacagaaggaacaagagaggacttcagaagattgtattgcgtgaacacagcaggacggttcacttaagggagatcaggaggttgatcagaccaaaagggagattggtccaacctcagagagaacagaagacgtgattgttgagaaacaatcttcggcaagactcaagcagagtttagatcgagcactcaaccgacaaatgtttctgaacccagatgagagaaaacttgagtcttgccaattatgctaactacaactgattcacatgataggaagtattagcacaaaactccaggtgatccacttgtatcaagtgaaatctcggaattttatgcaatatatgaaccagaagtagcaggagaggaaataaggatattcctcgctgacttcagcagacatgggtgattaggatcaaaatcgcggaggaggcaggggagccagctggtcgattggggatgccgcggaggaggagggaggtgagcgcctgcgcctgcgccgccgtctggtcaatggagaggatgaggattttcggaggaagcaacccccggccgg

SEQ ID NO: 22008 - DNA, 938 bp, Oryza sativa
  Clone ID: TF_OsC168819_1
atggcgccggttggtctccctccaggctttagatttcatccaactgatgaggagcttgtgaactacttccccccgaggaaggtccatggcctcagcatcgacctcgacataatcccagaagtagacctctacaaatgtgagccctgggaattggaagagaaatccttcctgcctagtaaagactccgagtggtacttctttgggccaagggatagaaagtatcccaatggatgccgcacaaaccgtgcaaccagagcaggatactggaaatcgacggggaaagatcggcggatcaactaccagaacaggtcaattggtatgaagaagacactagtctactacaaaggtcgagctcctcaggggattagaaccagttgggtgatgcatgagtaccgcatcgaggaaagcgaatgcgagaacgccatggggattcagttacaggactcctatgcgctatgtcggattttcaagaagaatgtggtgttgggtgaatttgacaagaaaggggagtgcagttcatcacaggctaaaggaaatgaagaagttacagatttcggggatgctggacaatcctcgggagcaaatgagaatgataaagacaattcatggatgcaattcatagcagaggatctatggtgcaccaacaaactaaagtgaactagaaaactgagagaaaacagcttgttaacttcatctaaccagatatttcggtattagttatactgcgcgtatcttctgtatatgtttgataaggacacttctcactttgcataggaggaccactttaagtttggatgctggttcttaaattaggtttatacttttgttcctttagtactgtataatatatctaaaattgtgctactttgtacttcaatcttcaattaacatgtacctatcatctaatgaaatgataccaaaaaaaaaaaaaaaaaaaa

SEQ ID NO: 22009 - DNA, 1716 bp, Oryza sativa; identical to SEQ ID NO: 12570
  Clone ID: TF_OsC371956_1

SEQ ID NO: 22010 - DNA, 1278 bp, Oryza sativa; identical to SEQ ID NO: 12573
  Clone ID: TF_OsC29141_2

SEQ ID NO: 22011 - DNA, 804 bp, Oryza sativa; identical to SEQ ID NO: 12594
  Clone ID: TF_OsC397849_1

SEQ ID NO: 22012 - DNA, 1321 bp, Oryza sativa
  Clone ID: TF_OsC43596_1
aaagttcttgaatcatagtcttataagagattctagcattgtcaagtcagaaagcatcatattatcttgagagaagaccaaaagattgattgatatctcggtgctactactatatgtacaatcgaatccacagctagccattctacgctacttgttcttcgtcgacgggtgatttgatctcttgctcttgcacatgcatctggagatcgtgatcgactcctcttgcttcgatgcacaatgtaattctctgccccttgcttagtagtagagcagatgggcgtagggagacaggcagtgctggtcctgccacgggctgcgcagctgcgtcaggaacgggtcctgcagccagtccatcgccggaagctgcaggctcggcagctggctcaccgccgggagctgtaggctcgtcgccgacgccaccgtgaccgtgacgtctgcttcttccttcttggcttcccttggtgcgccagcgccgccgttcttgctgctgctgccggacggcgccgccgacgaggatgaggactggatcaggaagccgctgtcgtggacgtcgtccgacgagaagtagtcgtcgccggtggaggcggaggcgtcgtggacgagggatgctctcgtcgccgtgtagtctccgtgacttgatcctctctgcatctcttccattgccgaggctctctgctccagctccttcagtggcgtcgccttccggtatatcttgcagagcaccatgtcctccttgggaggcggcgcggcggcgcgggcggcgccgtagtcggggaggcggtactcgttcatgacccagtccgtcttggtgccgcgcggggcgcgaccctggtagaagacgagcgtcttcttgagcccgatcacccgcttcgggtcgccggagctccggatcgccctgtccgaccccgtcgccttccagaacccgcgctccgtcgtccggttcggccgcccgccgttcccggccttcctgtcccgcggcacgaagaagtaccactccctctccccgatcttcgccatgcctgggaggtcccagggatcatggcggtagatgttgagggtgccgatgatgttgaagtggagcttcttgcctaggacgacgcgggagaggtagaagtcgaggagctcctcctccgtggggtggaaacggaagcccgggaggtcctgctccacctccatggacggcccagccacagccactgccgccgccattgatgacagtgtgctctgctcgctcgctcgctcgctctgctccaggtggtggtggtggttgcctctgcacttggcttgccgatcttgatttttactggagacgatggacgag

SEQ ID NO: 22013 - DNA, 1557 bp, Oryza sativa
  Clone ID: TF_OsC394395_1
atggcggcggcgaagatggcggggctgacgccggggttcaagttcgagccgagcgacgagcagctcgtgcagttcttcctcctgccctacctgcgcgagctgccggtgcccctgggcggcctcgtcatccgggacgacccgaggagcgtgccgccatggaagctcttcgcgcgcaacggccggggcgacgaggaggacgcctacttcctcgcgccagccgacggcgagggccggcaggcgcgcacctgcgacggcggccgcggcaggtggatcacccagcggctggagcgcacgggcaacctgcggctcgccggcggcggcggcagcggcgaggccgtcgtgttcgagaagcacaggctcaactaccacgccggcgaggggcggtgcggcagcacggggtgggtgatgcacgagtacgccgtcgtcaagcccgcggcgctcggcgcccgccacagggcgtgccacatcgccttcaccggccacggccagaagcggaagcgcgtgcccgacggctacgtcgacgtcgaggacgacggcagcaaggccagcaccaacgcggccgccgccgtccctccttcctcgacggcggcgatgtcggcgtgcccatcgaatgtcacctataaccaagggtgccatatctcgccggagcagagcatcgaacagcacttccccgcggagcataataatatccaaatccaacagcaagcttactaccaatcacaagaccacgagcagtgccagtacagcgacgaagaaaaatacctgttgcagcagatcaagcaagaacaatactactacaaccagcaaaactgcttcttgccaggccaaggcaaccaagaactgtactacaacgacgagcagcagcaaatattctcgttgccggagcatcagtgcagccaagaacagtactgccatcacgacgaccagcaagactgcgtcttgccggagcaacacagccaagaactacacgggtacaacaacgaagaccaaggatccctcttgccgccggagccgatcgaccaggaggaacaagccctcttcgtcggcggcgagccgcagcatgaacaacaacccttgacgtcaaccccgcggcaggctcttcttgattatgatgatgggaagctcctgccgccggtcggcgtcaacggcgccatcgcgatcccgccgcaggacgccgccgtggcgtccaacgacgacgacggtgggcaggctacggaagcgccggctgcgaagatgacggcggaggagaagaagtggttcatggaagagttattgaccgagggctgttggtctggacctcttctcttcgaccaaccgtactacgccgccgcgccgaccggccgctaccgcgccaccctccgcgtcgcgctggctgcctccgccacccccgcgccgcgccaggccgctgctgcgcgggctgccgctgccgcccccgcgccgcttcgctactgcctcttcgctaccactgccgtctctgcgaggaaagagtggataagagcaagaaaagaggagaggataagagcgaggagggagataaggagaaagactttgcgatag

SEQ ID NO: 22014 - DNA, 486 bp, Oryza sativa
  Clone ID: TF_jC-osleLIB3474012e11b1
cttattcatccaaatagtattggtagcttgttgatcgaagaattaatccatggatggattgatcagtgatgatagtatgatgatgggtggtgaggtgagggcgatcgagtcgaggctgcctccgggtttcaggttccatcccagcgacgaggagctagtcggctactaccttcggaacaagcagcagcagcagcagcagcagacggcggccacctccatgctcgtcgaggttgacctccatgcctgcgagccatgggacctaccagaggtggcgaaggttggttcggatgagtggtatttcttcagctggagggagaggaagtacgcgacggggtggcgcatgaacagagcgagcaagcaagggtactggaaggccaccgggaaagacaagcccatccttcatccgacggtggccggcgccaggaagacgttggttttctactccggtcgcgcccccaacggccgcaagaccgcctgggtcatgca

SEQ ID NO: 22015 - DNA, 750 bp, Oryza sativa; identical to SEQ ID NO: 12601
  Clone ID: TF_OsC393139_1

SEQ ID NO: 22016 - DNA, 1842 bp, Oryza sativa
  Clone ID: TF_OsC257626_1
atggacgcggtccagccaagcaatgccagcataaaccgcgtgcacctggtttatgtgctggtgcgccgcctcgccctcgtcggatccctagtagggaggggaggtctccgtctgccggcgggaggcgcgggcgccgccatgaccggatgcattgtcttgtttatgaggcccggtgttcggaccgcgtcatacattcgtggaacagtgtgctcatgccttcggacatcctggataattgacagccatagaattgcttcaaaaataaaaaatgcatctggatcggtggatgccagtaagcacaaatgggttagcaacccaactaaggcttgtccaaggtgcaaccacatcattgataacagtgatgttgttcatcaatggcctggtttgccaagaggtgtaaagtttgatccaactgaccaagaattgctttggcatttgcttgcaaagcatggcaaagttggtgcaaaagctcatccgttcattgatgaatttattccaacagtcgaggaagatgatggtatctgctatacccatccacagaaacttccaggtgtcaagcaagatggaagcgtatcacactttttccatagaacatttaaggcctataatactggaataagaaagcgccggaagataaacactggtgatcttgctgatgtccgctggcacaagactggtaagacaaggccagtagtagttgatggaaaacaccttggttgtaagaaattcatggtgctatatatgagcaccatgaaaggtggtaaacctgaaaagaccaattgggtgatgcatcagtaccacctaggaactggggaagatgaggtagaagggcagtatgttgtctctaaattattgtttcagcaacagtttaaacctggggagaagaacgcacaggacttaacctctgcagatgctttagaatctatagttgctgaagatcttccaaatattcctccacttcccctggaagaacatgtttttaccaaccaagaactagaagttcttgagaaatctgaaactatcactgaccagggaaaagagactagcgaaataaacaacgaagataacgctgtagaagatgttgcgcatatggctactgagaaacctgaggatggagataacccctcatcgcaagatccgaaatggtgggaaggtgaatcccagttcctgttagactctcagcaactggcagagaaccttgcgatttgcgatgagttccttcagagtcagagccagacctcatgcggcggtggagatgatgaaaccgataagataaagccccgtcttgctgtttatgcccagttgccagtagaggacttgaagaaggatctggaagaatgccagaggttggacccctcagatggcacaaatcttgagcttgaaaatgcgtctgaatttcgactgagccaaattgagttttcgcaggatagctttacgacggcatgggctggtggcaaggtgatcgattgagtaagaaatctaccccgcgcattggctgagcgtcactgggttggtcccacagcccggccacgtgagactgagggcagcaacaagtaccgcgccgtgggtcggtcccatagcaccgggtctacaggccccatcgtttggccaagtaagtgtggtgtgtggataaaggtgggcccaagcccatggcgacgggcccaccacccagcggaggctgagagggacaccgtgggtctcggaaaaaaccgtaacggcgtctctctccgttacaacggagaatccttcgcaaacacgataaacacccctgggaatatttttcctttggcaaatcttatctgcaaggaattgagtgcaaggaaagccttagaaatgacatag

SEQ ID NO: 22017 - DNA, 1698 bp, Oryza sativa
  Clone ID: TF_OsC18626_1
gtccccgggctgcaggtaccggcgctctttttttttttttttagtactagaagtattaacatttcacacatcaaaacttacacaggaactacagtttgcagcacagagatttactgaaaggaaaacgaaattgcatccgataaagcaaggttcagataatgctacagaacattacatagacaaaagtaaccatatccctaacctgacttacaactgctgaacaactagggtatgtggctactaacatctgcaataacagcaggaaggaatactaccatgcacctaagtcacagaacatctacaacaactttcctcattcactacctcttcttttttcttcgttttcgcccctcttttttttttgtttttggatttttcttctgccgcagcacgctggaaggggaacaaacactccagggtgtctagcaaccgccgtctaaacacaagggcgtaagacgcaatatgtacaacaggtcactcagcacagcaggtcaatgttgggagcctgtgccagtaagcatggtcatcttgtaagaccatcaggggagcagctgtttacacccatcacgagcgtcttcttcatgccaattacttgctgcttcttcttgtcacccttggacctgatcaccctgtccttcccggtggccttccagtacccggcctccgtcgccctgttcgacctgctcccattgggatacttcctatccttcggcgcgaagaagaaccactccggatcatcggagcggatcagagacttatcagggagatcccacggctcgcacttgcagacatcgatctcggggatgacatcggcctcgctcctgatctgccccgtgatcttccccttgaggtagtgcctgacgagctcctcgtcggtggggtggaacctgaacccgagcggcagcttcttgagctccatcaccgtcatctccgccctctcatccacctcccccaacctctctctcactctcaagatccgattcgcggtcgccgggagggatatacttagcggcaaaggaagcgtggggtggtggagtgaggcgatttggggggggctagggtttggtcggaattggggattttaggggaggagaagaggagagccataaatcccaagggagataagcaggaccagagccacagagagaaccagccaaatgatgtacgatgggaatcccctcttattccctggtgctctcacatgtgaagcaagaacaccctcctcttcctcctgcttgttctccttgtcgcttccctctgctgtcttccgcagcctcagaacagatttagcatttgctgctgaagcatcatgctccttctggtcatcctcatggcaagtcccaccttcagccaaggtacttcctgcattctcttcaatctcaggtttctccatggtgcgttcactttcaccttcatttatgatgcaacttgatgaaccatcaacgctagaacacggtgctgcatcaaggtttgattgtagccgcaccctttgcactgcagcaccctgttgagtaaatgaactagctgagctagcagttggagcttggcgtcgtcttaggatagtgatacccgttgactcagcatcatctccatcagaaagcaagcttgcatttggagcttggtgctgtcttaggatggtaatacccgttgactcagcatcatctccatcagaaaacgaacttgcagttggagcatggc

SEQ ID NO: 22018 - DNA, 1761 bp, Oryza sativa
  Clone ID: TF_OsC29141_3
cacgcgtccgccttagcttattagcttccttccttcactagtgacagttttcctcctacctaatctaagctagcccggtcgtcatcttcttccttcagctcacgctgaccaaacaccatctgttattctgtttgtttgtttttttaaaaaaaagaaaaaaaatctagctaggcgagccgattgaaggagctgagcatgccgagcagcggcggcgccatgcctgcccttccaccaggcttccgcttccaccccaccgacgaggagctcatcgttcactacctcatgaaccaggccgcctccgtcaagtgccccgtgccaatcatcgccgaggtcaacatctacaagtgcaacccatgggaccttcctggtaaggctttgttcggcgagaacgaatggtacttcttcagcccgagggaccgcaagtaccccaacggcgctcgccccaaccgcgccgccggctcggggtactggaaggccaccggcaccgacaagtccatcctctccactccgaccagcgacaacatcggcgtcaagaaggccctcgtcttctacaagggcaagcctcccaagggcgtcaagaccgactggatcatgcacgagtaccgtctcaccggcacatcagctaacagcaccaccaccacaaagcagcgtagagcgtcatccatgaccatgaggctggacgactgggtgctgtgcagaatccacaagaagagcaacgacttcaattcctctgaccaacacgaccaagaacccgaggaatcaaccgtcgaacagcttgaagacatccatgacaacaactcctctgaacaacctccagctccagctgacatgaacaaccaacagtcagatttccagcccatgacggcgatgagcatgagcaagtcatgctccctcaccgatctcctcaacaccatcgactgcgccgcgctctcgcagtttctcctcgacggctcatccgacgccatcgctgagcctcctgctcctcccagccccctaatatacacaacacctcatccaaattaccaaacactaaactataacattaacagcaacagcagcatgccacacgccttcgagtcacgcctagatcatcacgatggttacgttaacaattataatgttaatggcctgaggaggaagagaatgatggcgtgtagtgcaacttcctttgatgatggcagcagcagcaatgactttgtgcatgccgttgtcaagaaaccgcagctgctgccaagtgattcgaggggtagtggttttggaggaggttactgcaaccagcagctttcagagactgcgactggctttcagtttcagaacggcaatctgctgagccatccatttcctctgaacaatcatctgcagatgcagtagtaggcgtctagatcccgtttaccgatcgatctgaagagaggtgaattaatttcaacgaatgaaactccagattcagagaggaagatactgattgttccatttgtgatttattttgaggagttgcatgggcagatagacaaacagacggaattcttgatgtaaccgatgcaaggaaagattcagatttcttcctatggcattaatttgtgagtttttttttgttttcattttcatggccaagaatgtaaattataaatggtaatatcgtgcaagctagtactcaagccaatttatatgataatctttaggcatgttttttaataaaaaaaaaaaaaaaaaacaaaaaaaaaaaaaaaaatttgaaattgattccggggcccttcccatttt

SEQ ID NO: 22019 - DNA, 2331 bp, Oryza sativa; identical to SEQ ID NO: 12611
  Clone ID: TF_OsC33185_7

SEQ ID NO: 22020 - DNA, 5141 bp, Oryza sativa
  Clone ID: TF_OsC12565_1
gggacgcagcaaaagatagttttttttttttttttcaaggaattaacaatacagagtaaaaaacgctatcatggcaaatgcttaacagtctctacaacactatgtacatctgaagataggacaggtggacaaccagggtccacggttgtttaattttcaccgagcaacaattgttgctttgaaacgacatcctaccatttctgttacaaccttttcacccccggataaacttaagactacaagcctaacaaccatacaacagttcaaaagatgaaaccccactaaaaactgggaataaaaataaacgaatcttcaaggcaaccccaaccatactattagacaggctgtggatcatgatgcttgactaggagctgtactgatggatagtgatgaagcgattctggaaattctacatctgcataatctatagcagggatggccattgacaaatcctctgtagagaacggtatacttaaatcatcatctaataaaaaggaatttgatacgagattctgagtatatttgtttacttcctccctcattgcagaaacaacctcattcgatattccttgggtattgtatttgtcgtcccagtacattgagcatatcctgtatatttggcgtacactcaagttcgggcaaagatcttgcctaatctcctcaagcgtcttcttccttttttgatgtatgaccaaaaaaccaacagcttgtctgatataatttagctcatgcctagatgttcctgcaaactcatccgtggcatcagtaatccatttctccagcaatgacagaccggctttgacatattccccattggagaaagtacagcattcgcgccgaagaagaaggctgttaaaaagctgtatattgataaaagagaatagctgagtgataagtttacgtataaagaatgatggcacataattttcatgcaaagtgtccataagcaggtcaagaaatttgacaatattgtcccaatgggagtttgatggtggttgagcaccaatcccaggtgatttggttgcttttccaggctgtgcacgtgatgattttggagcctgaatgcagacactaagaagtggtgatatttcctttttcagattatccctaagttgcccaaaaatcttttcaacacatgcagttagttgctgtttgaataatatggctggataccgagcatccacttgtccaagagtatcactgcgtcccataagctttgaaggagatctgagtgtttgcactatcttgtcaccaatccctagaggtccaccagacctgcgggatggtgtagcaaataatccatttgaccgtaaattcttctgcagaaggcatagcaatgaagaggtattggacaaccaataaggtaatctaccgtcagcctcttcccccttgagaacattatttatggcttcaatgacatgatcaaaaatagcagtcctctcagattcaaaagcacgccagtgtaaaaggcaactgtagataatgcatgcggtgactggtttaccatccttgaatcctagattttcctttatgcatcgtaataagatttcatgattttcctcctgcctttcaacaggcatcctggttctccttgatctagttaaactctgtggaagtgaagcgagatattttgctggtggtggtgtttcatatccgtgcttctgctcgccatttggaagcccaatcggtgtagcgaatttctgaggaaaagcctttgtagtcatgggcatattgttcaacggagacatgtttaatgccttttgcctaagaacatgattttcattttccatgtttgtaagtttttcctgcaatttgtccaaattttgctggagatggttgcattttccctctacgtctttcaatttcttcatcgtagcatcactacctttacgagctgaggtgagttcatattccagtgacgaattcctctttgataatgactcaactaagttcttcagattggagttctccttttctgcttctgctgtcataatcttgctaccccgcaacatagttatctctctcaacgaatcatccaattgcctctggagtagccgatttttgtcatgttcactttgagcatctgacttggctgcagcacattcggcacttaatgattctatcattttgtcgcgctttaatatttctactgactttgcttcctcaccagcagcacgcagtcgcctttctagagttagtctcagagtaaggtcatccaactttttctcaagtttattcttcgcctcacgcagtgcacctgcttcgtttgcagccattttgagtctccttagttctcttcttgcaagtttctgtctccaagcacactgaattttcacagtggcttgcctgtattgttggaaaagaattataaccttccgttttctccacaatgactgtatcaccaaagcagctttctgctctctgataactgagaaataacggcgagcgataaatcctcgaatacaggactgaataagaagagctgctgaatgagcttgctggtaagtccgatgaagccgccatctccggacatacttctgaacaattatagcagccgccgtttctcttttcaccatatacttcttccttgccaaacagcctctgcaatatgcttgtatagaaattgaagcctcccttgttttcacaaactctttgcgtgtaatgaatgttctgaaacgaccttgaatgtggcgtgcagcgttctccaaaacttcagcacgacgcatatctaatattgcgatttgaccagctctaaggaaaaccttagtgctaccaagttgaaaattatcaagcttcatcttttcaagaattccctttgtcaatgccctctcatcataacttccaagcatcaactcgggaaccagaacaccaaaccggtcaacaaattcagcataagtccttctggtaggatagccagcaagactgatgcgaacagcctctaaaacacctccgcagcgtagttgatgcaggacactctgattttcaaaaatctgaggctgattaacagagttaggcttcacgcagcgtacgtagtgaggctctgtcgagttgagggtttccatgagggcttgaagttgttgcttaaatcttgaagcaactgatgagaacttgtacgacgatctcaaagattcttctggtaatgtaccaaaaagtccagaaactaaagggcatcttgacgaagataaaagattgcagtgctctgcaacaatataatctctattcttctccaaaaatgattctgtttgatacgtcaccttcccagcataatgggagatagtaaaatctgtctccgagaattttgtcttctcaagcctatgatgcgaagagaaattcctgaacatctttgttgcaaaggtctcatgagtagattttgggaacatgcaagcttcatccagcagtgcaataattccaatcggtttctcattgaaatgttgctgaagcttttcattggcgaagttgatgcagaattgctcaaaactgttatttttgaagctctcaaaaccataaatatccaagataccaatttgtactttggaatcaacatcttgaccaatagatttgttaatattctcaacaagccagtcaaatagtcttgcatatacagtctttgctagagcatcacgattagctgctgctgcagaacagtctaatgcttttataattgctccttcgagagtgttaatggcgcgtgtacatagagttgagaccaacagatctggatcacacatgaatagtttggctgccatttgaaggtgaaaatttgatgttggatccttaatttttgaagaatcaatttcctttccaggagaaaactcaatgttgccaagatgaagaatggctgccagtatccgaaatatagcatcctgatcatttctgctaattccgacaatatccattgccctttttgtcttccagtactcgtcttcattatttgttccttccaattcatatgtcttacttttattcaagtaatggaaactccctgggtgaccaagcttgtacagttctgcatcctttccagacgcacataactgataaaagcaatgaaaatttctttcaggatcattaatctgcacaacacgggacctttccaaaagataggtcctaatagcagccccagatattctaccatttgcatcaaattgcatctccacaaatttgccaaaccggcttgagttgtcatttctaactgtttttgcattgccaaatgcctccagaagagggttagattcaagaacctgctgttcaacagttcgatcgtcaatagcagctctaccaccaacatacgtaagatattgcatgataaactttgttgtctcagtcttgccagcgccactttcaccactaaccaggattgactggctccgggaatcattcaccatagccctgtatgatgcatcagctactgcaaaaacatgtggactcaactcccctagtcggacacccttgtattgctccatcatgtactcattgtacaggtgaggaagcctcgtgaatggattaacagcaatcaagatgcttccagtgtatgtatatatctcattcaatgcatatcttctcttcaaattgtatagaacacctggttcattaagataagtcagtttggtcatgtcatcgacatgccccccacctagatcttcatctgtgtccctgggcagacacttctctgccaaaactgtaatctgcctttttgcaatagggaatacccacctgtaagacctcatcttccatcttcccccctctctctctctctcatcatcttccacgcggtctttgttcccaacggcgcgcggccacggctccgcggagtagacgacccccgtcgtgcccgccgccttccagtaccccgacggcgtggtctggctcggtcgcccgccccgcacctcccgctcctgccgcgggcagaagtagaaccatccgctccccctcctcgccgcgggcaaaagtaggtacacgcgtgtgctggtacctgagagctgcaacgggtcgacggagtagatgtcgaagacggggatgacgcgctcgatgtcgtcgcggaaaccgtcgagcttgttgcggaggtataagcatatcagctcctcctccgtcgggtagaagcggaacacgggagccagccgccgcctccacctccgtctccgcat

SEQ ID NO: 22021 - DNA, 690 bp, Oryza sativa
  unsure (1)..(690): unsure at all n locations
  Clone ID: TF_OsC135094_1
cccccggccggacgcgtgggctcgttcccaaaccctgcatccttctctttcacacaagcctctctctcgccggcttcggcgtccgtctcctcctcctcctcttcgtctagccttgtggcggcgtgcggtgcggtgcggtgaggaaaggagggagctttgaaggtcgggggagggcggaggagatgtctgaggtgtccgttatggccgaggtggaggagacggcggcggcggcgccgctggacctgccgccggggttcaggttccaccccaccgacgaggagatcgtctcgcactacctcacccccaaggccctcaaccaccgcttctcctccggcgtcatcggcgacgtcgacctcaacaagtgcgagccatggcacctcccagccatggcgaagatgggggagaaggagtggtacttcttctgccacaaggaccgcaagtacccgaccgggacgaggacgaaccgggcgacggagagcggctactggaagggccaccggcaaggacaaggagatcttccgcgggaggggcatcctcgtcggcatgaagaagacgctcgtcttctacctcggccgcgcgccccgtggcgagaagaccggctgggtgatgtacgagttccgcctcgagggcaagctccccagccaagctncccgcgctccggccaaggaccagtgggcggtgtgcaaggtg

SEQ ID NO: 22022 - DNA, 1091 bp, Oryza sativa
  Clone ID: TF_OsC60046_1
tttccttctctatctagaattctagatctccaggtgaatttgaaatctctatcggggtcaaaggagaatgaaccatcaaatcaatatatacaatgagcttgatcagcatgatggaggcgaacctgccgccggggttccggttccaccccagggacgaggagctcgtcgtggactacctctaccacaagctctccggcggcggcgagttctacggcggcgtggccatggtcgacgtcgacctcaacaagtgcgagccgtgggagcttccagcatatttcttgcacaatctgatcatcttccctgcacgcgcacgcgcacgcgccgccggtcgccggcgacgagaagacgccgcgcgggtgggcgccacggagtggtacttcttcagcctgcacgaccgcaagtacgccacggggcagcgcaccaaccgcgccacccgctccggctactggaaggccaccggcaaggaccgcgccatcgtcacccgccgccgcgccgccgccggagaggccgtcgccggcggcgaggtggtcgggatgaggaagacgctggtgttctaccaagggagagccccccggggcagcaagacggagtgggtcatgcacgagttccgcgtggacggacatgccgttgccgaccacccctcctcgtccacctcctcctcctcatctaatcttctcaaggaggactgggtgctgtgcagggtgttctacaagagcagaacggctacaccaagggcagtagtctccggtgaggctgccgtgtcactgtccggtgagctcagcttgccgccgccgctgccgccgcccgttgcccccgccgtcgtcgacggctacaccggcggcggctattacgagcaagacagctcagctgggtaccaccaccaccaccaccaccggccgccgccgtcggcagcattgccgttcaaggacctgacggacttcagggacctgctgagcaacatggcacaaggcggcggcggcggcgctgccgccgccaagacggaggggttccatcttggctggagcgaggaggagtcctccggctacgtgcagcagagcgccatggcgtcgcaggcgtggaacccgttctag

SEQ ID NO: 22023 - DNA, 302 bp, Oryza sativa
  unsure (1)..(302): unsure at all n locations
  Clone ID: TF_2311034
atttgctcctcgcctagctagcttgtntctcttccccggaggagaaaaaggaggagacgagagagaattaattatctcggagatgagcggcggcggcgaaggggnggcggcggcggagaggcaggagctgcagctgccgccggggttcaggttccacccnacggacgaggagctggtgatgcactacctctcccggcggtgcgcngcctccccatcnccgtccccatcatcgccgaggtcgacctctacaagttcgatccatggcatctnccaagantggcgcttgtacggcgagaaggagt

SEQ ID NO: 22024 - DNA, 1101 bp, Oryza sativa
  Clone ID: TF_OsC334673_1
atggcggaagaagatgacaagaagcagaagggccccgacgtgacggtgccctcgggatacttcttcgtgccgaagccggagcagctcatccgcgactacctcaaccactggatcaccggccggccgatcgaggagctccgggacatcgtccgggaagccgacgtctacggctccgacccggcgacgctgacggaggcgcatagggcgtacggccacgacggcaagtcgtggtacttcctcaccgtcgccaagtggaagggcggcaggggcggcgccggcaccgccggccggctcaaccgcggcggcttcgagggcggcggcacgtggcacaactcgcagcgccgccgcgtcatcgagggctacggcgaccgccaggcgttcgagtaccgcgcccccgggaacaagaagacggactggctcatggaggagatcgccagcaacctgccggcggcgatcaccgacgagggcatcatggtcatctgcaaggtctacctctcgccgagggccaaggaggcgacggccgacgaggaggaacgccaagaaaccaacgtggttcccgggcccaagaggctccgagaggcggaagccaccggctacgacgcgccggcgccggagacgccacagcccgacgtcggatgctcgtactccggcggcggcgagacgtctcaagcgaccgcctcgatggactactgctgctcgacgacgacacacacggcggacgacacggccaatgccgccgcctactaccacggcgacgctgatgccatcaagccagatgcttacgacggcggcgactacggcatcggcttcaacgcagacggggagctggttctctgcggcaacggccacggtggcatcgggacgcagggacagacgccattggcaatgcagaacaccaacggggagatgaccttgttctcaccgatgaacggctatggtgttggcttcaatgaggaggtgagacaagaaccacaagtaggaggtgaggtggagatggatgatttcttcaacgatttgttcgtcgacttcgacggcgccggtgatcccaatcccaatcccaacgggggtggagacagccacggccacatactatgtgaatga

SEQ ID NO: 22025 - DNA, 1632 bp, Oryza sativa
  Clone ID: TF_OsC158769_1
atggcaacattgctcctctgggccgctgctgcgatgccaacagtggcggatatcggccgcgaccaaggagggtcacgaggcggctaacccgcccacggcgtccgggacgccggtggcgtccgcgaccaacgcgttgggcgtctagtccgaccgctgcgtcgggcgcctcggcccgccggaagccaccgcgttcacggtgctcgcccccccgtacgcggccccgcgggagggggtgaccgtcgacgacgtcggcagggaccatggcggccacggccgcgtgtacctgtcgacgaacgacgccgcggcggcgtctgcttgtcccacgccgcgtggtcgctctaccaccgcttctacgcccgcctcgccgtggagctcgacgtcgcgggcatcgtctccgtcgtcctcccgctcgcgccggagcaccgcctccccgccgccatcgacgccggacacgccgcgctgctctggctccgtgacgtcgcgtgcggcaccagcgacaccatcgcgcaccatgcggtcgaacgccttcgcgacgccgccgacttctcccgcgtgttcctcatcggcgacagcgcgggcggcgtcctcgtgcacaacgtggcggcacgcgccggcgaggctggggccgaggctctcgacccgatacgcctcgccggcggtgtcctcctccacccgggcttcatcttgccggagaagagcccgtcggagctggagaaccctcccacgccgttcatgacgcaggagacggtggacaagttcgtcatgctcgcgttgccggtgggaaccaccagcagggaccacccgtacacgtctccggcggcggcggtgacggcggcggagggagcccagctgccgccgatgctggtgatggtcgcggaggaggacatgctccgcgacgcgcaggtggagtacggcgaggccatggcgcgcgcgggcaaggcagtggaaacggtgttaaacaagtttcccgcgcaatgcatacgtgttttcgtttctccgatccgcttacgaaatttcgatttgatggagaaacacgtcgagaagatgctcagtttaggctttcgtttcaacccgtctgcagaggatctcatcaccttctacctgccacggctgatcgccggcaagccaatgaaagacaccgagaaattcatctgccgcgctgatgtttacggcagcgagcccagtgacctcgccggaaagttcgcgccggtgcccaggtgcgagaaaggcggcaggttcttcttcactagctgcaagcggcacaaggggagtagcaccaagaaagagcgaacggcgggggctggcacctgggtgaggcagaacagcaaggaggtgaagaacaaggcgggggtcaaggtcggcgagacgcagaacttccgtttcaagaaggacgggagctacaccgactggctgatggaggagcaccactgctgccggcagcaagccgtcgccggcgacgaggagcccgtcatctgccggatgtacgtgtccccgcgggcgcctccggattccgcggcgcgccaggaatccgctgctttcgtgcagcagcagccggcgccgcaggtttccgagccgccgtgcgacaagaagaagagagatgatgtggcagaagaagcccctgccgcggcttag

SEQ ID NO: 22026 - DNA, 782 bp, Oryza sativa
  Clone ID: TF_OsC16309_1
ccggccgggatcactgcagtgcctttgagctttcgttctctagagtgtctagggtgaatcttgagcgagtgagcgagcgatctctgtgttgtgtagtttgtgagctagggtgatggctaacaccggacttagcatccccatggtgaatggtgccacaatccacctcctccctggtttccggttccgtccaactgacgatgagctagtcatcaaatacctctacccccgtgcttttcatgtgccactgccctgtgcgatcatcaccgatgttgacatccatcatcacaacccctgggacatcgtcccagtggcggagagggagaaagggaagcacttcttcacaagaaaggaggtcaagtaccctggtagccgccgtagcaaccgtgttgctggtaatggcttctggagagcagcaggctcggaggtgcccatctattacaaaccagaaggtgctgctaacgacatgctagttgggatgaggcggactctagtgttccactacggaaagtcacgatctgcagagcgcactgaatgggccatgcatgagtttcagcttgctggtgctggtctccttcctcaccctatgatgaggcatgcaaccagcaatggttcagagccaccctgtggctgccttgaagcgacaatcgctaagaaaagtgatggtctctctgcaactcttcgtgccaagcgtgattctgcccctcttatgagaatcatggtagaacccgatagctcatgggtgatctgctgcatctacaagaagaggcagcgtgccccgcctg

SEQ ID NO: 22027 - DNA, 1721 bp, Oryza sativa
  Clone ID: TF_OsC46776_1
cgcgcacgcgtcctctcccgcgtcctccgcctcctcccgcgcgctgcgtacgtgagagcgccatctcctgcttgcagcagctagcaagcagcaggcgcaacagtattactgcagatagagctctcgaccgattgatcgattgctcactgccatatacatgatacttacataccgacgtactacacacagagatagagatcggagggatagctattgctattgctagccatagtatagtagttccctttgctcctgctgctgctttgttgcttgcttccctacacttctctctctcagctgctagctgcgcatataattattccctcgccaagctatatatatttgcctcctgccttcttcccgagctcacacaatcgccaacctatacagatatatgtgctagctacttccaagttcctacctatcaatttctctcctcctcttcttctctgcatcaatctgcagcttaattcttagctatgtacatatagctagctaccacttccaaaatactccacaggcaccaggcacatatagatatagctagattgctatagacagagagatcatcaaagaaatttagcaggtgatagccacatggggttgagggacatcgagctgacgctgcctccggggttccggttctacccgagcgacgaggagcttgtctgccactaccttcataacaaggtggtgaaccagcatcgcttcgccggagttggaggagccgccgccgccggcggcggcaccatggtcgaggtggacctccacacccacgagccgtgggagctaccagatgtggcgaagctgagcacgaacgagtggtacttcttcagcttccgcgaccgcaagtacgcgacggggctccgcacgaaccgcgccaccaagtccggctactggaaggccaccggcaaggaccgcgtcatccacaaccccaagctgcacgccgccgcccaccgccgcgcctccatcgtcggcatgcgcaagacccttgtcttctaccgcggccgcgcccccaacggcgtcaaaaccaactgggtcatgcacgaatttcgcatggaaaaccctcacacccctcccaaggaggattgggtgttgtgcagagtgttctacaagaagaaggcggagacggagacggagtcgtcgtacagcatggagaacgagcaggaggcggtgatcgccatggcacggagcgccgcggccatcaaggcgggtggatgctactccaactcctcctcgtctcacgacccggccgccgccggccatcactcgcccccgccgttcccggcgtcgctcgccgcctgcagcagcagccaccactacagcagccacccaccgccgcctcccgatcaccaccaccaccaccacatgcccgtcaccggcggcggcggcggctccctcaacgagttcatccccaccaccagcatggcgctgtacagcagcatcttcgacttcagccagcatctcgacggcggcgccgtggcggcgtcggcgtcggcggcgggatcgagggtcgacggcggcgagcagtgcggtctgatggagctagggctcgaggagcactacaattacaacggcctgatgccgatgtgacgatccaccataggtgtcggtgctgctagtgctagcttagctagcttacacacactcccagctgctagctagctgcagttctgcagcgcagctagctagcgtttattattaataacctcttttcacct

SEQ ID NO: 22028 - DNA, 1179 bp, Oryza sativa
  Clone ID: TF_OsC1783_3
agctgatgagctgagctaatcagggcagaacaaaggcaggaggatatagttttccaagatcctagggccggcctgcatcaaaaagaaggatgcatccgagcggcggcgcgctgtcggtgccaccggggtttcggttccacccgacggacgaggagctcctctactactacctgaggaagaaggtggcctacgaggccatagatctcgacgtcataagggagatcgacctcaacaagctcgagccctgggatctcaaagatcggtgcaggatagggacggggcctcagaacgagtggtacttcttcagccacaaggacaagaagtacccgacggggacgaggacgaaccgggcgacgacggcggggttctggaaggcgacggggagggacaaggccatcttcctcgccaacgcctgccgcatcggcatgaggaagaccctcgtcttctacgtcggcagggcgccccacggcaagaagaccgactggatcatgcacgagtaccgcctcgaccaagacaacgtcgatgtccaggtaggcgggtgggtggtgtgtagggtattcatgaagaagagctaccagcgaggcctcaacccggcggacatggcggcggtcgacgacgacgacctcctccaccaccaccaccaccccttcccaccggcccagctccacggcggcgccgccgaccacaagcacgacggcgccggcggccaccaccaccaccacctcatgcagccgcaccaccactacgacgacttcccttccttcgacccctccatgcagctcccccagctcatgagcgccgaccagccgccgccgccaccgccgtccctcctccccggcggcaccgcctcgtcgttgcagaggcttccactgcagtatctggggtgcgaggcagccgacctgctcaggttctccaagtagagagattatccctccatgcatgcatggatcacttgaactaagctagcttaattagctgccaccgataaatgagcagttgatgatggtgatgatgatctgaatgatcagctcatgtttttttggttagactggttaatttgatcttccttttggtatggagcttaatgcttccaagtgtatatacactctatgctatgctatgctatgttttcccatgtgcatgcatgcaaatgtggctttgaaaaaaaaaaaaaaaaaa

SEQ ID NO: 22029 - DNA, 1129 bp, Oryza sativa
  Clone ID: TF_OsC1783_4
gcatccgagcggcggcgcgctgtcggtgccaccggggtttcggttccacccgacggacgaggagctcctctactactacctgaggaagaaggtggcctacgaggccatagatctcgacgtcataagggagatcgacctcaacaagctcgagccctgggatctcaaagatcggtgcaggatagggacggggcctcagaacgagtggtacttcttcagccacaaggacaagaagtacccgacggggacgaggacgaaccgggcgacgacggcggggttctggaaggcgacggggagggacaaggccatcttcctcgccaacgcctgccgcatcggcatgaggaagaccctcgtcttctacgtcggcagggcgccccacggcaagaagaccgactggatcatgcacgagtaccgcctcgaccaagacaacgtcgatgtccaggaagatggttgggtggtgtgtagggtattcatgaagaagagctaccagcgaggcctcaacccggcggacatggcggcggtcgacgacgacgacctcctccaccaccaccaccaccccttcccaccggcccagctccacggcggcgccgccgaccacaagcacgacggcgccggcggccaccaccaccaccacctcatgcagccgcaccaccactacgacgacttcccttccttcgacccctccatgcagctcccccagctcatgagcgccgaccagccgccgccgccaccgccgtccctcctccccggcgtcccaccctccgccgccgctgccttgagctccctcgacgtcgagtgcccccagaacctcatgaagctaacgtcggccgccgccggaggcggtgccaccgggctgctccacgccggcggcgaccaccgcttcgccaccgccgccacggactggtccatcctggacaagctcctcgcctcgcaccagaacctggaccagctcttccagggcagggtcatcgccggagcgtcgtcgccggctgccatggctgctcctagccaccaccagcatctcatggatcagctcgccggcggcggcggcggcaccgcctcgtcgttgcagaggcttccactgcagtatctggggtgcgaggcagccgacctgctcaggttctccaagtag

SEQ ID NO: 22030 - DNA, 249 bp, Oryza sativa
  Clone ID: TF_OsC346533_1
atggcactgccaggtcaacgcatggagcgggttagaacccgtttggatttatatgacacacctgggccacggatgaagggagaagggcagcacgtggccactggacaggagctggacactgcggctgcggaagatttccttgtccttgtcagtggccttccagtagccgctcgccgtggcacggttggtcctcatgtgatgcggactaggatcccgatcttccgttagatactgactaaaccgaaacat

SEQ ID NO: 22031 - DNA, 961 bp, Oryza sativa
  Clone ID: TF_OsC41958_1
cccacgcgtccgaaactctctctctctctctctctctctctgaatctctggatctctgaaaactctgaacattccaagaactcataagttacctgtgatctgtgaagcttgagctgaagctgtgacagtgtctcactgatcgttgatcactcagcttggctgctactgtgcattcactgcgtggttagctagctaactgagcagaagagctttagcaatggcgacgccggggcagcagctgccgccggggttcaggttccacccgacggacgaggagctggtggtgcagtacctccggcggagggcgctgtgccggccgctccccgccgccgtcatcccggacgtccacgacgccaccgtgctcgacccctgggacctccccggcgccggcgatggtgaggcctacttcttcagcttccggcagctcgcggcggcgagcggcggcggcgggtggcggaggaggagggcggggagtgggtactggaaggcgacgggggcggagaagccggtgttcctgcgtggcttcgggtgcggcggcggcggcggcggcggcggccagcacctcgtcggcgtcaagacgacgctgctcttcctccgcgcgaagccgccgtcgcgcacccactgggtcatgcacgagtaccgcctcgccgccgccggcgctgtcgccgtcgccgccgccggacagacaaagcgcgggaaccatagttgcatggctcagccaggagaatgggtggtgtgccggatttttctgaagaacaacaggtcatcaagaaggcgagccggcgacgccgacggcgaaacgccggtcaccggtgtccacggtcaccgtcggcggcagccgtcgccgtcgccgtcgtcgtcgagctgtgtcacggctgaggtttcagacggagaaggagaagaagaagtcagcagtggcagcatcaatggtgctccatctgcctctcaaagagaggcctag

SEQ ID NO: 22032 - DNA, 1089 bp, Oryza sativa; identical to SEQ ID NO: 12620
  Clone ID: TF_OsC83405_1

SEQ ID NO: 22033 - DNA, 762 bp, Oryza sativa
  unsure (1)..(762): unsure at all n locations
  Clone ID: TF_LIB4833-025-R1-N1-F6
ccggccgggcacataaaactatatcatcatcttccatagctgtacacatcctatattttcattcatggcgatgacaccgcagctagcattttctcgcatgcctccagggtttcggttccagccgacggacgagcagcttgtcgtcgactacttgcagaggcgtaccgctgcgcagccatgcgttactcccgacatcaccgatatcgacgtttacaacgtcgacccgtggcagcttccagccatggcgatgtatggatcggatcatgaccggtacttcttcacgatggcggcccgagaggcgcaggccagacgaacgacaccgtcgggtttctggaagcccaccggacaaagaaagatctcgtcgntccgccgggggcatgagtgcccaccgcgtcagaaggagttcgtcttctacctcggccaccaccaaccatcgggcagcaacaacaacaacaaaacatcatggatcatgcatgagtaccgtctcatgaactctcccaagagcggcagtgccgtcgtcttcttcggtgaatcgtcttcccactgatgatctcacggaagagatggtgcctgtgtaggatctccaacaaggacctgcctaaaccacccttcatccacaacggncttgttgcagttctctttcagtgggngttgaaatgggtgatggggtattaattactttgatcccttgatcacccttgagccctccagcaatggagtatcctaatggtggcattggnaatgggtgatgatgctgctgct

SEQ ID NO: 22034 - DNA, 1101 bp, Oryza sativa; identical to SEQ ID NO: 12622
  Clone ID: TF_OsC351524_1

SEQ ID NO: 22035 - DNA, 1276 bp, Oryza sativa
  Clone ID: TF_OsC146425_1
caaacaaacagtcctttagtttctacaatctgacaagttacaaccaaaacaaaatctagaggtacaagagaactgagaaactaaaaagcaagggtacaacattagctaagtaatcatacaatatccatagactaaattaaggtagctcaaataattatgtcttcctacataatagaccaacaattgcttggcagtaccccaagcatttccttcaggactacatttggtaactaccaggccagtacctctccaccagctgctctacatccaaattctggtatctgatgccagtgcctccaacaacaacatccgtggtaaaacctccatctgttccctgtgggatgacaccattggctagtcctggaatcatttgctctgttaccataacctggtttgtagtacttcttggttggttcatcggcatcgacatcgcttggaggatggattgtggtggcggtggtggtggtggaggcatggctggcgaggatccaaggttgaggttaaggcctgatagtgtaaaaggcgcagccgggttgatgtaaccggggtgtggttggatgtgtgggtgcaaccccggcgtacctctagcaaaccgggagagttccgccatgtcaacggggttcatgtaagggtggtgtccacgaccaaatgggtcttgttgcaatagagctgggaggagaggtgggaccatgtctagtgtgtatgggtggtgggatcgggaatgagcattgttggaggggtatttcttgacgccggcagtcttggcaaatatgcgacagacgacccactcatccttgtttgatttggggattgatttggagtggagtcggtactcatgcatgacccaattggttttctcacctcttggagcccttcctttgtagaacactagggttttcttcattccaactaactccggtgttgctggtggttgtccagtgaagatttccttatcctttcccgttgttttccaataaccagcattagttgctcggtttgtgcgcacgccagttgggtactttcgatcccttaggctaaagaagtaccattccttctctcccatttttgccttctctgggagatcccatggctcgcacttgttgagatcgacctcggcgatggccctcgccgtgaagccgccgtcggcgatcttctgccgcaggtagtaggtgatgagctcctcgtccgtcgggtggaacctgaaccccggcggcaagctctcctctttctttttcgccgaccctcctcctcccgatccttccattcccatagccat

SEQ ID NO: 22036 - DNA, 1266 bp, Oryza sativa; identical to SEQ ID NO: 12614
  Clone ID: TF_OsC359883_1

SEQ ID NO: 22037 - DNA, 1303 bp, Oryza sativa
  Clone ID: TF_OsC283445_1
tccccgggctgcaggctccccgcacacccgcgacaagctcgccccggctggccccggccggcggcgagcggcggcgacctggtgctctgcttgggttgagttcttgattttgccgaggtgtatcgatggagacgacggcggcgaagaagctgccgccggggttcaggttcaggcccaccgacgaggagcttgtggtgcactacctccgccgccgcgcgctcggctcccctctcccgcccgccgtcgacatccccgatgtccgcctcctcgcgcatgacccctccgacctgcttcctccagggtggagtgagcaggagaggtacttcttcacgtgcaaggaggccaagtatgtcaaggggcgccgcgccaaccgcgccacgggcgccgggtactggaaggcgacggggaaggagaagccggtggcggtgtccgtggcggcggcgccgaggagccaggccgccgccgtcgtcgtcggcatgaagcgctccctcgtgttctaccgcgggaagccgccgaccggcaagaagacggactgggtcatgcacgagtaccgcctcgccggcgccggcctcgccccgtgccgccgcgccgccaccgccgaccacccggcgcgccccgccgagggctgggtgctctgccgcgtgttccggaagaaaggctccgcggccgcgtcgacagccagccccaccgccgacgccgacgacgacgacgccaccacggagcgcgccgacgacgccgcggcgggcgtccggttcatcgacttcttcgcccgcgccgacgcgcggcggcgccgcgcggcgtcgccggtgtcgtcgagctgcgtgacggatgcgtcggcggagcattgcagggagcaggagacgacgagccggaacggcggcgccgccgccggcgacgcctccgactaagctaggcaaggcaaggcaagccttgcaagtttgtagcaagaaagaggcagggttaagctttgtttgtaagtttgcttaacgaaatcgcccccccaaaaaaaaaaatgcaggaggacaagacagagagtagctcaagagtgttcagtgtagctcaagatctgttaaaactaatgtatctgatttttaatctgctgttttttgttttcggttttatgtcacagtgccacacgcacccggtgctcgtcccaaattcggtgagctcaatcgcaaattcgcattaaattggattagttttttttttttttttacaaaattcagtttgacttaagttggtcccaagcaaatgtgtaaattgtgatttgtgggagattcagtttgacacgtcctaggttctt

SEQ ID NO: 22038 - DNA, 1509 bp, Oryza sativa
  Clone ID: TF_OsC16321_1
ccttttctcgttcttctttgttcttgctagctagctcgctattgctaactcgtttgtgttaatattctgggtcctttgcttaatggttggtgttggttttttctgatgaattgccgtcgatcttatgtgtcaggtttagtagatgcgattagccaggcagcagcagcaggtggtggtggctgcgacgatggagcatgacgtgcaccaccaccggcagatgatgcagcagcagcagcagcaggagatggacctgccgccgggcttccggttccaccccaccgacgaggagctcatcacgcactacctcctccgcaaggccgccgaccccgccgggttcgccgcgcgcgccgtcggagaggccgacctcaacaagtgcgagccatgggacctgccatcgagggcgacgatgggggagaaggagtggtacttcttctgcgtgaaggaccggaagtacccgacggggctgaggacgaacagggcgacggagtccgggtactggaaggcgacggggaaggaccgggagatcttcagggggaaggccctcgtcggcatgaagaagacgctcgtcttctacaccgggagggcccccccgcggcggcaagaccggatgggtcatgcacgagtaccgcatccacggcaagcacgccgccgccaattccaagcaggatcaggagtgggtgctgtgcagggtgttcaagaagagcctcgagctggcgccggcggcggcggcggcggtcggcaggagaggcgcgggcgcggggacggacgttgggccgtcgtcgatgcccatggcggacgacgtcgtcggcctcgccccgtgcgcgctcccgccgctgatggacgtgtctggcggcggcggtggcgccggcacaacctcgctgtcagcgaccgcgggcgcggcggcggcgccgccgccagcgcacgtgacctgcttctccaacgcgctggagggccagttcctggacacaccgtacctcctccccgccgccgatcccgcggatcacctcgccatgtcctccgcctcgccgttcttggaggccctgcagatgcagtacgtccaggacgccgccgccgccggaggagcgggcatggtgcacgagctgctcatgggcggcggctggtattgcaacaagggcgagagggagaggctgagcggcgcctcgcaggacaccggcctcacgtcgtcggaggtgaaccccggcgagatctcgtcgtcgtcgcggcagcaacgcatggatcatcacgacgcgtccctctgggcctattgaaatattcattcatcatcattgaaaattgcattagccattattattagtactgttggccaccgattattgattgtgttgtaatattggtattgttgattataattaattagtacgccaaagagacaaatcacaagagaacgaagtgtgtatgctgtagattaattccgtatgtttgtgaaaatattcttgaacccaagtgaatgttactagtgcttttcagatgctcatgtttggagcgccg

SEQ ID NO: 22039 - DNA, 1681 bp, Oryza sativa
  Clone ID: TF_OsC10665_1
ccggccggggcattcatcagaacaccatccgtccatcttaattcgcttctacattggggcgcttgttaatttacatgcgagcttgttgaggttgaagcgatcgagatcatcgttgagagctgtagtacgtggtgagcatgggagagcagcagcagcaggtggagcggcagcctgacctgcctccgggctttaggtttcacccaacggacgaggagatcatcaccttttaccttgcacccaaggttgtggacagcaggggcttttgcgtggctgccattggagaggtggatctcaacaagtgcgagccatgggacttgccagggaaggcgaagatgaacggggagaaggagtggtatttctactgccagaaggatcggaagtatccgacggggatgaggacgaacagggcgacggaggcgggatactggaaggcgacggggaaggacaaggagatcttccgcaaccaccacatgctcatcggcatgaagaagacgctcgtcttctacaagggcagggctcccaagggcgacaagaccaactgggtcatgcacgagtacaggctcgccgacgcctctccgccacagccgccgccgccgccatcctccgcagagcccccgaggcaggacgactgggccgtgtgcaggatcttccacaagagctccggcatcaagaagccggtgcaggtgcccatgcagatgccgatgcagatgcagatgccggttgctcatcaggtgcccgccgccaactaccagcagcagatggccatggcctccgccagcatcatccaagtccccatgcagatgcagatgccctccatgtctgaccagctgcagatgttggacgacttctccaccggttcactcatggcgccgcctccgcctccgccttcctactccactctacctggcttcccgcttcagatcaacggcggcgccccagcagtttgttgggaacccgtcgatgtactaccagcagcagcagcagcagcagcagcagcagatggacatggccgccgggaggcttcgtggtgaggcgagccgtcctctctggtggtgtcgccacacagatgctgcccgatacatatatacataggcatgcgcgagcttaattagtgtgatgacaagaggatgctggcttaattagctagtatactccatcatatggcttttgcattgcctttaattttggcttcttgtgtgagtgagatttgctgagagattattattattattagttattatagattgcatggctagctatatttgtacatacataataatatgtgtgtcccatcaatacgtatgtgtgtgagcgcgtcgccgtcttgcgtggtctaaggttactgggtattgccgtacaagttatatataggtttacatgcatgcgtgatagatatatgtgtgtatttgtgcgtgagcccagcttagatttgtgttgtacatagctagcggtgcatgcctgctattcctctgtatggattgaattatgggaaataattacaagatataaataggtatacatgcatgcgtgatagataaatgtgtgtactgcatgtatttgtgcgtgagcccagcttgattgtgttgtacatagctagcagtgcatgcctgccatccctccgtacggattgaattatgtgaattaattattttgtttaattaaaaaaaaaaaaaaaaaaaaa

SEQ ID NO: 22040 - DNA, 638 bp, Oryza sativa
  unsure (1)..(638): unsure at all n locations
  Clone ID: TF_LIB4833-006-R1-N1-G8
ccggccgggatcacaaaacacataaaactatatcatcatcttccatagctgtacacatcctatattttcattcatggcgatgacaccgcagctagcattttctcgcatgcctccagggtgttcggttccagccgacggacgagcagcttgtcgtcgactacttgcagaggcgtaccgctgcgcagccatgcgttactcccgacatcaccgatatcgacgtttacaacgtcgacccgtggcagcttccagccatggcgatgtatggatcggatcatgaccggcacttcttcacgatggcggtccgagaggcgcaggccacacgaacgagaccgtgggtttgctgcgagcccaccagcccagagaccactatgttcctcgacgccgccggcgccatggtccccgtccgcgtccacaccgtcctcatctccacccagcacgacgagaccgtcaccaacgacgagatcgccgccgacctcaaggagcacgtcatcaagccggtcatccccgacaagtacctcgacgagaagaccatcttccacctcaacccctcgggccgcttcgtcatcggcgggccccacggggacgccggcctcaccggncgcaagatcatcatcgacacctacggcggatggggcgcg

SEQ ID NO: 22041 - DNA, 1415 bp, Oryza sativa
  Clone ID: TF_OsC1783_1
agctgatgagctgagctaatcagggcagaacaaaggcaggaggatatagttttccaagatcctagggccggcctgcatcaaaaagaaggatgcatccgagcggcggcgcgctgtcggtgccaccggggtttcggttccacccgacggacgaggagctcctctactactacctgaggaagaaggtggcctacgaggccatagatctcgacgtcataagggagatcgacctcaacaagctcgagccctgggatctcaaagatcggtgcaggatagggacggggcctcagaacgagtggtacttcttcagccacaaggacaagatggatggatctagtatgagcagcagcagcacgcagcagcaggcgcaggttcctcctggatttcgtttccacccgacggacgaagagctggtggattactaccttcggaagaaggtggccgcaagaaggattgatctcaatgtcatcaaggacgtcgatctctacaagattgagccatgggatctgcaagagcgttgccggatcaatggcgggtcggcggcggaggagcagaacgaatggtacttcttcagccacaaggacaagaagtacccgacggggacgaggaccaaccgtgcgacggcggccgggttctggaaggcgacggggcgagacaagcccatctacgccaccaagcagcacagcctcctcgtgggcatgaggaagacgctcgtctactaccgcggccgcgcccccaacggccacaagtccgactggatcatgcacgagtaccgcctcgagaccaccgagacggccccgccgcaggaagaagggtgggtggtatgccgggtgttcaagaagagattacccacaacaagaagagattcagaccatgacgcaccttgcggcagctggtacgttgatgaagatgcaccgggcgccttcatgtctccgatgatgatcaccagatcatcaatattgcgcccacaccaacaccacgccggcatcacgctgcaagagcaacacctccacaccacttacaagcacagagacctcactactaagattcagcagctccaagtccctgcggcaggccatcatctcctcaacaccatgccccatgacctggagagttctacttcctccttccattctcttttggtctcacctgatcaccaccaaatcaacatgcaccatgctcaggctgatcccttctttgacgacatgcatgcagtcgatcaagccactaccactgactggagagttcttgacaagtttgttgcctctcagcttagcaatgatgctacaaacaagcctgcggatcattatactgatgaaggagacattcttcaggtcagtgacaagcagcaagaggtggcagccgccgattatgcgtccacatcaacgtcaagcagccaaattgatccatggaagtga

SEQ ID NO: 22042 - DNA, 867 bp, Oryza sativa; identical to SEQ ID NO: 12638
  Clone ID: TF_OsC408353_1

SEQ ID NO: 22043 - DNA, 286 bp, Oryza sativa
  unsure (1)..(286): unsure at all n locations
  Clone ID: TF_LIB3432-002-P1-K1-B11
cctagtctaaagtaaaaatcaaaaacggcgagctcaggtcagaggcaaccaccacgaccaccttgagcaaaacgagcgagcgaagttatcanagcacactgttattaatggcggtggaagtggctgtggcttggccctccattgaggtggggcaggaccttccgggctttcgttttcaccccacggaggaggagcttcttgacttctaccttttccgcggtgtgctagggaagaaggttcacttttacattattgggacccttaacattttacggcattattcctt

SEQ ID NO: 22044 - DNA, 1361 bp, Oryza sativa
  Clone ID: TF_OsC315862_1
gggataatgatcttgaactccggaggcagcttcatcaacacctgtccgctggattccgagcagctcaagaccttctacttctggatcttcccaatcttcaatagatactgcctctgccgcctctaattgacaagcattcaaccatatatatgtgataaattgtgccaatctgcctcaagtattagcatttaggcaaattgacactacatctagctagctagctagctttgctccgattagtagtattgtttgcctcttctttccattgttaaccttcgattgaacaattaggtttgcgcttgcttgcccaagatattagaataggttttgcaagtgtacatttgtctgaaattcagtcggttgatttgatcatgggtaccatgactctgcccccgggtttccggttccacccgaccgacgatgaattggtcggctactacctcaagaggaaagtcgacagcctcaagatcgagcttgaggtcatccctgtcattgatctctacaagttcgagccatgggagctaccagagaagtcgttcttgccgaagcgtgacctggagtggttcttcttctgcccacgagaccggaagtatccgaacgggtcgcggacgaacagggcgacgagcaccgggtactggaaggccaccggcaaggatcgcaagatcgcctgcgccggcgaggtcttcggcctccgcaagacgctcgtcttctacaagggtcgcgctcccggcggcgagcgcaccgactgggtcatgcacgagtaccgcctctgccaggacctcgcccatggcgtctccaacttcatcggggcgtacgcgctgtgccgcgtgatcaagaggcacgaggcgggcctccatggcgagccgccggcggcgaaggcgaaaggaatgatcagcaaggtgtcgagcagctcgtcccttgtcaccgtcgaacaccagctcagcagccggggcaacgcctcgccgtcgttcacgcccaccaacaatggcagcccgctcgtcgacgagatgttcgtcggcggcggcggcggcgacccgttccagctgcttccgagctgcgtcccgtaccatggcggcgacgcgtgcgggttcgacttgccgccgctgtgcatgcctcagactcaggacccgttcttctccgacgccggcttcacgcaggcagcgcctcctctctacggcgacgtcatgggaagcgtgtcggagcacgagctcaagtgggacaccctgggcggctactccggcggcggcggtggggagctctggaacgcggcggcggcgccgctgctgtgcaggcaggccagcgacggcgacgacctcacggcgtggttcacggccgccgacgacaacatgtccgtcttctga

SEQ ID NO: 22045 - DNA, 1548 bp, Oryza sativa
  Clone ID: TF_OsC46432_1
gcactcttcgtcgtccggcgttcgctgcccttcatcgaaactgtttttctttttttttttttttaattgctataatggatttcagattaatttctcaaccatcggagaaaaatattacaatattacaccaacacaacttgcaagttacaaatggatcgacaacgacgagatgcatatgcagctagctagcaactacagatatgtgcccataattaattaattaagtagataatatctggctcctgacccacgggggcgtccctgccgctccgggccaccaccccctgcttatttcaacctgattaattcagtgcttccttcccgttacattacactgcattacattaaattacagttacattacatggctgggcaaaaatagatctagttcccgtcgcggctcgcaccaggaatgtcccagggatcgcagcttgaagaggttggtggaggtcggggatgaactggcggcggggagcggcaggccgaacgccttgcggcggaggtactgcaccacgagctcctcgtccgtcgggtggaacctgaaccccggcggcaacaccactcctccatgcctcaccaccaccggcgccgccgaagccgccctctccatcgtatcaattctatcaattcacaccaccaccgacgccgacgacgacgacgacgacgagctagagctactcagtcacacagccaagaagctagctagctcaaagctcagtgaagcacaagttaatggcagagagctaagctaagctaagctagctcgatacagttaaagatcgatactgaagagaagctgcagctgctgcttcttcttcttttttttactttgcaggagccatgcatttgcttggaacgttcatcccggccattcgctagagctacgaggctagacccagagagccgggccaccaccaccggcttgtcccgcccgcccgccggcttccagcacccaccgctcgccgtcacatgctgcctcctccccctcgccgcaggtggccgcacggcgaagaagtacttgtccccgtcgctgctcgcaccaggaatgtcccagggatcgagcttgaagaggttgtggaggtcggggatgacggcggcggggagcggcaggccgaacgccttgcggcggaggtactgcaccacgagctcctcgtccgtcgggtggaacctgaaccccggcggcaacaccactcctccatgcctcaccaccaccggcgccgccgcagccgccctctccatcgtatcaattctatcaattcacaccaccaccgacgccgacgacgacgacgacgacgacgacgacgaggagctagagctactcagtcacacagccaagaagctagctagctcaagctcagtgaagcacaagttaatggcagagagctaagctaagctagctagctcgatacagttaaagatcgatactgaagagaagctgcagctgctgcttcttcttctttttttactttgcaggagccatgcatttgcttggaacgttcatggcgcggacgcgtgggagcacgcgctagagagagagagaggagagag

SEQ ID NO: 22046 - DNA, 725 bp, Oryza sativa
  unsure (1)..(725): unsure at all n locations
  Clone ID: TF_LIB4371-016-R1-K1-B5
cgctttcttccccaccacgtctcctcctcttctcctcccctaaaatccccaattccgaccaaaccctagccccccccaaatcgcctcactccaccaccccacgcttccttcgccgctaagtatatccctcccggcgaccgcgaatcggatcttgagagtgagagagaggttgggggaggtggatgagagggcggagatgacggtgatggagctcaagaagctgccgctcgggttcaggttccaccccaccgacgaggagctcgtcaggcactacctcaaggggaagatcacggggcagatcaggagcgaggccgatgtcatccccgagatcgatgtctgcaagtgcgagccgtgggatctccctgataagtctctgatccgctccgatgatccggagtggttcttcttcgcgccgaaggataggaagtatcccaatgggagcaggtcgaacagggcgacggaggccgggtactggaaggccaccgggaagggacagggtgatcaggtccaagggtgacaagaagaagcagcaagtaattggcatgaagaagacgctcgtgttccaccggngggcgtgcgccgaagggtgagcggactgggtggatcatgcatgagtaccgcnaccaccgagccggagtttgagtccggtgacaggggagggttacgttctctacccggctgttccgaaagcagaggagaaaaatgagcgacccagtccgggatga

SEQ ID NO: 22047 - DNA, 1138 bp, Oryza sativa
  Clone ID: TF_OsC189913_1
atggtgatgagcggcggcggcggcggcgcgaggattgtcagtgatccggcggcgacgccggggttccgattctacccgacggaggaggagctgatcggcttctacctccgccaccgcctcgccggcacgagggccgacgacgtcgcccgcgtcatccccgtcgtcgacgtctacggctaccatccttcccagctcgccgccatggccggggtggcgaccgcgggggacagggagcagtggttcttcttctgcccgagggcggagcgggagctccacggcggcaggccggcgcggaccacgccgtcgggctactggaaggccacgggctcgccgtccttcgtcttctcctcctccgccgccgccgccgccagggtcatcggcgtcaagcgcaccatggtcttctaccagggccgcgccccctccggcaccaagaccaggtggaagatgaacgagtacaaggccgtcgccgccgccgccgccgacgacgaccacaacgccgctggcgtggccgtgcagctgccaccaatggcgccgccgccgtcgtcctccgcgtgcgtgcggctgaggaacgagctgagcgtgtgccgggtgtacgtcagcaccggcacgctccgatccttcgaccgccgccccctcgacgcgcccccggtgatcagccaccatcaacctcagctccagcaacaacaacgtcagctgccatcgtcggcagcggcggcggcgacgaacggcaacctcatcgccctcgccggcgggtacgagtgctcacacgacagctccggtggctcgtcggaagatgccgccatcgactggagctcgctgattaccgccgccaccgattccgctaccgccgccgttgatttcagcttcaacgacgacatcgatttcagccctgccgctgttggcccatgggcgccacagctttgattgattgataatttgtgcacactgcataataactgaattactagtaatttagtagtagtaagtttgatcagtgcttgctaattcccatagtttctatttcagtcaactcgattgatttattacctcccaaactctcaattctgcttgtctttaatttttcttgaataaattctgaactatggcctgttcttttcttaaaaaaaaaaaaaaaaaa

SEQ ID NO: 22048 - DNA, 1159 bp, Oryza sativa
  Clone ID: TF_OsC1779_1
tcgacccacgcgtccgcccaccaccctcattccctcaagtcccaagatcgaacacctcgtgtccatggcggcggcgaagcggcgagtgcgcgacgcggaggcggacctgaacctcccgccgggcttccgcttccaccccaccgacgaggagctggtggcgcactacctctgcccgcgcgccgcgggccgcgccgccccggtccccatcatcgccgagctcgacctctaccgccacgacccatgggacctcccccaccgcgccctcttcggccgccgcgagtggtacttcttcaccccgcgcgaccgcaagtaccccaacggctcccgccccaaccgcgccgccgcctcgggctactggaaggccaccggcgccgacaagcccgtgctgcacaacggcaggacggccgggatcaagaaggcgctcgtgttctaccacggcaagcccccccgcggcgtcaagacggagtggatcatgcacgagtaccgcctcgccaagaagggcggcgccgccgccgccgcgggcgcgggcgcgctcaggctggatgactgggtgctgtgccggctgtacaacaagaagaacgagtgggagaagatgcagagcaggaaggaggaggaggaggccatggcggcggcgcagtcgtggggggagacgcggacgccggagtcggaggtcgtcgacagcgacgcgttcccggagatggactactcgctgccggcggcgtcgttcgacgacgccctgctgcccaaggaggaggcgcgcgacgacgactggctcatggggatgagcctcgacgacctccagggcctcggctcgctgctgcaggccgacgacctctccatgctcgcgccgccgccggcggcgaagacggagccgctcggcgcgccattcttctgagctctctctctctctctctctctctctctctctgtgactgcaccactgtatataaattcagagttttcagacatgttcagtattcagagttctcaggcaagttcagaattcagagatggttaaggattagtggcttatgagcagtatgatatgcaggttagtttctagtttagcagtgttactccagattggagatttgattaatgatttgattctaattaatgtagtatactgagtgttactcaaaaaaaaaaaaaaaacaga

SEQ ID NO: 22049 - DNA, 330 bp, Oryza sativa
  unsure (1)..(330): unsure at all n locations
  Clone ID: TF_LIB4370-037-R1-K1-E1
gttttgtttatcatttttttcgtttgttcgttggcaacgatctgatgatgaagtggcggagagggagaaagggaagcacttcttcacaagaaaggaggtcaagtaccctggtagccgccgtagcaaccgtgttgctggtaatggcttctggagagcagcaggctcggaggtgcccatctattacaaaccagaaggtgctgctaacgacatgctagttgggatgaggcggactctagtgttccactacggaaagtcacgatctgcagagcgcactgaatgggccatgcatgagtttcagnncttgctggtgcctggtctcncttcctcacc

SEQ ID NO: 22050 - DNA, 2067 bp, Oryza sativa
  Clone ID: TF_OsC1784_1
ctggcacgaggctagcttcctcgctgcttcgcccgccacgtcaccctcctcctcctccccttttttttctctcgctcgcctcgccatccatggcgtcgatggcgaaccagcagtagtagtagtccaccccaacgacgcgcgcgagccagctccggggtacccgccgctcgtgcccgggggggaagggggtgcaccggggagccgtcgcgccgcgcggctctgattcttcccgttcccggagatttgaaccatggagtctttacgtgacatggtcctcccaccaggatttggattccacccaaaagatactgagctcatttctcactatctgaaaaagaaaatacatggccaaaagattgaatatgagatcattccagaggtggatatatacaagcatgaaccatgggatttacctgcaaagtgcgatgttccaactcaggataataagtggcatttcttcgctgctcgtgacagaaagtatcctaacggttctcggtcaaatagggcaacagttgctgggtattggaaatccactggaaaggatcgagccataaaaatgggcaagcaaactataggaacgaagaaaactttagtttttcatgaaggccgcccacccactgggagacgtactgagtggatcatgcatgagtactatatagatgagcgtgaatgtcaagcctgccctgatatgaaggatgcatatgtactttgtcgtattaccaaaagaaatgactggatcccagggaatggcaatgagttggacaacagtgatcctcatccagaaccatatgatgctcctccatcagttatcagtactgaacagctaaatcctgctgctgaaccagttgtcggtgttgaagctgcaccagttaccgttgctgaacctgacggtgttactacgtcagctatcactgctaatataccatctcctagtgatgacattaatctggatgattggttgaatgaactatttgatcctttctttgaccctgaacagagtctggcttctgctgatctgtctccagatgaacaaaatgttgaatcatcgaacgtaggtgctttggctccaaaggtggaacaagactattctagtcctaacgagaacgtagtagatgatacggagtacttgttgcctgaagatgtttacaacatactgcaccctggtacagatgacttcaatatgctccagaatcctttggatcagtaccccattcaatatgcaaccgatgtttggagtggaattcagaaggaagaactgtggtcgccccaggccaatgctgagcctagtcagtcgaatgaagctgctgataatggaattataagacgttatcgtagtatgaaaacacctgaaactagtgtgccgcagttcaagggtaaaactcaggctaaaatgcgggttgggatcaacaagatggctacgagtagttctgaatctatcaaccagactatcaagtttgagaacagtggtcgtcttgttgagcaccagaagaaccaagcgcatgatgtagcttctaccaagcggtcagacgcagggaagccaagtacagagctcagcagcaatcgaggatttctcaggggtatccgaaatgcatttgcaggctgttcggatgctcgatggaacatgatacttgttgcgggtttcgctattggagtcgctgtggtagcgcttcatataggccaacgccttggattaagccagagagatcagcagcatacctagcctttaggtttgcaggttactgggtttctatgctttttgcaatctggagaaacgtaaacaaactccgatctttggttggtgcagaacatttgatgtatgcgccgttttttttgtgttggttttgtacatattattatcttcggttttggtcgacttttgttctcgccagctagtagtactatgttgacgaatgtagaagaaaacctcaaaaaaaaaagaacaaatgaaaaaaaattgacgatgaaaatttatataattaaccgcttgcattgtactaaaaaaaaaaaaaaaaaaaggcatgattctaaatacacgcacttgtggatgactacggcatttttcctctg

SEQ ID NO: 22051 - DNA, 1122 bp, Oryza sativa
  Clone ID: TF_OsC152847_1
atggagcggtgcagcgtgctggggctgggcggtggcgggggcgggggcgggcggctggacggcgagctgccgccggggttccggttccacccgacggacgaggagctgatcacctactacctgctgcggaaggtggtggacgggagcttcaacgggcgcgccatcgcggagatcgacctgaacaagtgcgagccgtgggagctgccggagaaggccaagatgggggagaaggagtggtacttctacagcctccgcgaccgcaagtaccccacgggactccgcaccaaccgcgccacgggcgccggctactggaaggccaccggcaaggaccgcgagatccgcagcgcccgcaccggcgccctcgtcggcatgaagaagaccctcgtcttctaccgcggccgcgcccccaagggccagaagacccagtgggtcatgcacgagtaccgcctcgacggcacctacgcctaccacttcctctcctcctccacccgggatgagtgggtgatagccaggatcttcaccaagcccggcgtgttccccgtcgtccgcaagggccgcctcggcataagtggcggcggcggcgacacctcgtgcttctcggactccacctccgcctccgtcggcggcgggggcggcacctccgcctcgtcggcgctgcgcgcgccgctggctgaggcctcgctgttcgccgccgccgcggcgccagccgttgacggcgccgacagcagcaactacggcgggggcggcggcgccggcagcgccaccgccaccgccaacttggtcaccggccttgagctcgtgccctgcttctccaccacagcccacatggatgcctcgttcggcaccgggcagtacaacccggccccgctggccgtcgagccgccgccgccgccgccggccttcttcccgagcctccgctcgctgcaggagaacctgcagctgccgctgttcctctccggcggcatgcaggcgggcgtgtcgtcgcagccgctcagcggcggcggggccttccactggcagtccggcatggacgtcaaggtcgagggcgccgtcggccgcgcgccgccgcagatggccgttggccccggccagctcgacggcgcctttgcatggggcttctag

SEQ ID NO: 22052 - DNA, 654 bp, Oryza sativa
  Clone ID: TF_LIB4833-008-R1-N1-D7
cctcgaggccggcccgggaaaaaaaaaaaaaaaaaaaaaaaaaatcacaatagcatcattcaatctttaattcatttgagagttgagagtgagcggaatatatttgtattctacgattgaggagaatggccagccctggagtttgcatcaacttggtgaatggtacatcgacgcgcctccccaccaatgctgatctagtagtccactacctgcaccgtcgcgccattcaggaaccggtgccctgtgacttcatcaccaacgtcgacattctccagcacaacccctgggacatcgtccctgcggaggagaagacaaatgggaagtacttcttcatccatgaggagaacgaacgccttggcaaccaccacagcaaccgtgctgctggtgatgggttctggaggccagtaggctcagaggtgccgatatatcacaaacgtagtggtggcgctgatgaagcactggtggggatgaagcgcaccttggtattccactacgggaattcttcgtccgcaaagcgcaccgaatgggtgatgcaggagttccgacttgctggtgctacccttataccttgccctgtgacgaggccagccaccggggatggctccatgcttccctgccaccggacaggaacgaccatcgccacggaaaacaatg

SEQ ID NO: 22053 - DNA, 2686 bp, Oryza sativa
  Clone ID: TF_OsC1252_4
aacttagcttcgttttggatggatggatggatatatcaaaggaaaaagtacacccaaggtcccttaacttgtcatcgagatacaaaatcatcccccaatcgcaaaaccagataccgggcatcccttaactatcaaaaccattcgctttaggtcctttggtggttttgaacctagttttgtccgacgtggtggctgagtcagcatgggacccacgtgggccccacatgctagagtgccacatcatctatcccttcctcttctctcggttttctcctaggcaggctgaccggcgtgttggggaggaagtcgacggggcgagacgggagaggaggaggatcggcggcggtggccggcgaccggcgatgcggcggcggccacgcaggagcaggtgggtcggtggagcggacaggtgacgaccatcatctccgagcagttcccgccggacgtcgacgcaagcatcgccacgttccgggtcgactccgacgtcgtctcgctcaacgggagggaggcgctgcaggcggacgccgaggcggggcgcgacggtcgagtccacgccgtcatccgctgctccgcgtcaacctccaccacgggcggcggcgcggcgcgctccggcgtgtcccgagcgtacggcgcgtccaacgccatgacgccgcgcgcctccaacctcaccggcgtggagatctactcgccggtggagatgaagtggaaggagaggagcggcacggcgaagacggcgaagatggcgaagcggcgcggcggttgggaaaacgacgcgacgaggatggcggcgggcgagcaggagcggcaggcctcgcaggtgcttggtgagggtgctcgtcggcatcccggtcttgatccagatctccgtctgcgaggcagcgaggacgttgtccaggaggactgtcgtcggcggcggcggcaccgccgcgacgctaggtctagcgggctgcctcgcctcgccgccaccgccaagccgacgagctcgccgcctccccgcgcctccgccggctgcgcgtgtggctccagctccgccgccgcggtcgcccgccgctcctcctcatcggcgagcacggagaggaggctgacgccgccgccttgctcctcgttggcgagcacggagaggaggctgacgccgccaccttgctccccccgccgcccgccgccgccgccttgctcctcctcgtcggcgagcacgaagaggaggctgacgccgccgccgccttcctccccacccgtcagccggcgccgccgtcctgcccgttgccccagagagaagaagagagagagagagaagaggaaaggagagaagaggggaaagaaagaggaggctgacctggacaggctgacatggtcgatccaagcaagaatgagcagcgacggcgcctctggaagcattggaatgaagcacgacgacggcgatcaccggccgagcaccggagcgtcgtcgcggcggtgccccagctgcggccacgaccctgactgcaacaagccgttcgacatggttgggatgcctgccggcgtcaggttcgatccgacggaccaggagctgattgagcacctggaggccaaggtgaaggatggcggctcaacatcgcaccctctcatcgatgagttcatacacaccattcaaggagaagatggcatctgctacacacatcctgagaacctgcccggtgtgacaagggatggcctgagcaagcacttcttccaccggtcagccaaggcctaccccactggcacaaggaagcggaggaaggtcctggctgatcagcagcctgacgaccatccacaggccagcaagggcagaaatgtcgcggcggcggagacacggtggcacaagaccggcaagacgcgggagatcacggtgcgcggccagcccaagggctgcaagaagatcctggtgctctacaccagcttcggcaagaagcgcaaggcggagaagaccagctgggtgatgcaccagtaccacctcggcgagctggacgacgagaaggaaggggagctcatcctctccaaggtcttctaccagacgcagacgcggagcgccgccgcagcagaggcaccggtaagctcgggtgctgccatggaggtgcagggacagcagcagcaagtgctgaagctgcaggctgatgatggtcacttcagctcagctcctaccaagaagagactgcatcaggatgttgtagcacaagtaaaagttgatcggggtcaccactgcatgccagcacaacgccaagtcaacttcaatttgaaagtaactcctgtgcccaccaccagttcattccctgtcgttgtcgacaaacagttggaagaacttcaattcatcagccccaaaaagcagattggcctcaccagcgctggcctcctgacaaccaagatcaacatggataacttcctggattcacagtagatgaacttaactggtaaatggttctagtgttgattttgaaacgtacaacagaaactggctgtaatatcttcggctactgctagagtgctagtgctagtaacctatctacttctgttcttagcccgtagggcagtattgtttcttattgagaatgactgtctatatacatgtacaaaatctcttatattatgaaatagaggtaatatgtagtttttctgtttatgtttgtaggatactaacatcaataaaatcagaccatgatagatttcttcatcc

SEQ ID NO: 22054 - DNA, 502 bp, Oryza sativa
  unsure (1)..(502): unsure at all n locations
  Clone ID: TF_LIB3477-009-P1-K1-E12
ccattacaagattgcatcagagaagatatcttcatagataattgttggagcaagaacacaagaaaacacgtaggttcaattataatcgatcgtggagatggtgaccagcaaggagtttgcaagggatcaggcggccatggatcagaagatcaagagcgacgtcggcgaggtggtgctcgccggagacgaggaagaagacggggacgtggtgctcccggggttcaggttccacccgaccgacgaggagctcgtcacgttctacctccggcggaaggtggcgaggaagtctctcagtatagagatcatcaaggagatggacatctacaagcacgatccatgggatctccccagtaagtgcatccccaattaatttgacaaataacctcaaacacaaatcattttcaaaataattgagctaaattctgtgtntgtgtttgaatggaatggaatgatttgtgcagatgcgagcacggtaggtggagagaaaggagtggacttcttc

SEQ ID NO: 22055 - DNA, 996 bp, Oryza sativa; identical to SEQ ID NO: 12513
  Clone ID: TF_OsC136542_1

SEQ ID NO: 22056 - DNA, 1085 bp, Oryza sativa
  Clone ID: TF_OsC84764_1
gaacaaaaaagatgatttgtcgatctatatacatgtgcaattaagctgcaaaaccatgcaccgggggtcataattaattaataaactgatgatcgatcgagctctctgatcatgatcatttcatagaaagagtagtagtgtaattctttgtgaatgaattaactactaagtacatagcagtgatttaatgaggtaagagtacgtaatcagaagttgaggacgctggcgtagtagggcgaccaggtctccatccatgggctccgcagctgcgtcaggaatggctcctgcatccactccagcccgctctgcggcctcgccacctccagctgcggcaggctcagcgtcgccgggcggaccagctcatgcgccgccgccgacgcctcatccacccccaccacctctttcttcatggcgtccgaggaggaggagatggagatggaggaggagtcctgctgcaggggcgagccggtgttgtgggtgccggaggacgtggtggagcgtgcaagctcctccatggcgaccctctgctccagctccttgagggagaccgccttccggtagaccttgcagagcaccatgtcgtcgtgttgcatttgcaattgcatggtgtcgggaatggcggcggcgtcggggaggcggtactcgttcatgacccagtcggtcttggtgccgcgaggggcgcggccctcgtagtagacgagcgtcttcttgaggccgatgaggcgcttggggtcggcggcgcagcggatggcgcggtcggagccggtggccttccagaagccgcgctccgtggtgcggctgggcctaccgccgccgccgccgccggtggcctgcttgcggtcgcgggggacgaagaagtaccactcgcgctcgccgatgcgggcgagtccggggagctcgcgcgggtcgtggcggtagaggtggacggtggggatgatgtcgaacttgagcttcttcccctgcaccacctgcttcaggtagaactccagcagctcctcctccgtcggatggaacctgaatcccggcagctgctccacctccacctctcctcctgccgccgtcgacctgctccccggctgctccat

SEQ ID NO: 22057 - DNA, 495 bp, Oryza sativa
  unsure (1)..(495): unsure at all n locations
  Clone ID: TF_uC-osrocyp010e10b1
tgttcgtgtccgtgtcctagaaaaacttctgcacacgcagccgacgcccttctctatctagctaaatctccattttaattcctctctctctctctttgtgtctttctcaagggaaaattaaccatcaaatcaatagatacaatgagcttgatcagcatgatggaggcgaacctgccgccggggttccggttccaccccagggacgaggagctcgtcgtggactacctctaccacaagctctccggcggcggcgagttctacggcggcgtggccatggtcgacgtcgacctcaacaagtgcgagccgtgggagcttccagacgccgcgcgggtgggcgccacggagtggtacttcttcagcctgcacgaccgcaagtacgccacggggcagcgcaccaaccgcgcacccgctccggctactggaaggccaccggcaaggaccgcgccatcgtcacccgnctgcgagccgtcggcggtgaggtggtcgggatgagga

SEQ ID NO: 22058 - DNA, 780 bp, Oryza sativa
  Clone ID: TF_OsC12565_4
ctaatctctaggccagtacagaagtgcggtcaaggtggccaagtcgtcccactggtcccaatccggatcaacggcgccaccttgatccatcagctccagttgctgcatggaacttcctgatccgtcgttttcctcgggtgacgccgccgcggcagccatggatggccccgggttctcatcaccaccacccgctagcggccgccgatcgaattgccggatgcctcccgatctggtgtacagtcgacacaggctgaactcgctcctcagctgcggaggaagatggtttggtggcgcggcggcgccggcgctggaggcggaggcggaggaggcgtcggggtagtggaatgctctgtactcgttcatcttccacgcggtcttggttcccgacggcgcgcggccgcggtagaacaccatggtcttcttcatcccgatgggccggcggtcggcggagtagacgacccccggcgtgcccgccgccttccaggaccccgacggcgtggtccggctcggccgccgccgccccgcgcctcccgctcctgccgcgggcagaagtagaaccacggctccccctcctcgccgccgcctgcccagcatctcgtggtgaatctctgagagctgcaacgggtcgacggagtagacgtcgaagacggggatgacgcgctcgatgtcgtcgcggaggccgtcgagcttgttgcggaggtagaagcatatcagctcctcctccgcctccatcgggtagaagcggaacccgggagcccggcggccgccgccgtcggccat

SEQ ID NO: 22059 - DNA, 1382 bp, Oryza sativa
  Clone ID: TF_OsC24159_1
ccggcattttcaaacaatcccaagctatagcaccccctccgcccaagcaataaccgatgtggaacgaggcctcacaacccacaacattttcaaacaacgcaaagcagtagcagcagcgagaagcaagcaagaagcgatggggatggggatgaggagggagagggacgcggaggcggagctgaacctgccgccggggttcaggttccaccccacggacgacgagctggtggagcactacctgtgcaggaaggcggcggggcagcgcctgccggtgccgatcatcgccgaggtggatctctacaagttcgacccgtgggatctgcccgagcgcgcgctgttcggcgccagggagtggtacttcttcaccccgcgggatcgcaagtatcctaatgggtcacgccccaaccgcgccgccggcaacgggtactggaaggccaccggcgccgacaagcccgtcgcgccgcgggggcgcacgcttgggatcaagaaggcgctcgtgttctacgccggcaaggcgccgcgaggggtcaagactgattggatcatgcatgagtaccggctcgccgatgctggccgcgccgccgcgggcgccaagaagggatctctcaggttggatgattgggtgctgtgtcggctgtacaacaagaagaacgagtgggagaagatgcagcaggggaaggaggtgaaggaggaggcgtccgacatggttacgtcgcagtcgcactcgcacacccactcgtggggcgagacgcgcacgccggagtcggagatcgtggacaacgaccccttcccggagctggactcgttcccggcgttccagcctgcgccgccgccggcgacggcgatgatggtgcccaagaaagaatcgatggacgacgccaccgcggccgccgccgccgccgccaccatccccaggaacaacagcagcctgttcgtggacctgagctacgacgatatccagggcatgtacagcggcctcgacatgctgccgccgggcgacgacttctactcgtcgctcttcgcgtcgccgcgggtgaaggggacgacgccacgcgccggcgccggcatgggcatggtcccgttctgaggtgacggcgacgcgatcgaacaggtggtgatcgatgctgcaacgtgtgtaaatatacagcgccggctgggtcaagagatggctcgggtgacgcgcgcgcggcgtgtcctggcgttggcgccggggcattctttagtttttcatcttttcatcatctcagatggtagatacaaaacagtgtatgtatgtagctctgtttctctctatagaaccccaacaaattttgttgttgatgttgtttaaaatatcgaacggctcctcaacccaaagcttttaactaatgatttaatttttt

SEQ ID NO: 22060 - DNA, 951 bp, Oryza sativa; identical to SEQ ID NO: 12516
  Clone ID: TF_OsC397708_1

SEQ ID NO: 22061 - DNA, 1613 bp, Oryza sativa
  Clone ID: TF_OsC344389_1
atggcagaactaccaccggaaggccgcggcggcggtggcaacaacaatgggaagtggaaggggaaggagaaggtggtgcccgagcacggcaagaaccggcacggcatgcccgtcggctgctacttcgtccccaaggaccctggagctcttcgccatcctcaggtgcaagctcgtccgcggccagctccccggcgccctcaacaacgtcttcgagcatatcaggatcctcgaattccaccccgccctcctccatgagacgtacatcgagaacgaggaggatgggtacatctacttcttcagcaggaggcagttcgcgacgaaggcagggaacaagaggcggccgacgcgggtggcaaagggcgggacgtggaaggcgtctggtgggagcaagacggtgaggagcaagaaggtcggcggcatcgacgttggccagaagctcaccatggtgttctacgagcgcaggttcgagggtgaccggaaccccatcaagaccaattggggcatgcacgagttcaccaagatcattgatggctccaaaaaccagttaccaggtagtccttgtggaccttgccgtgtaccgcctgtacaagatcaaaaggaaggaggacgaagaaccgtcgaacactgccgccgcggcgtcgagcaccgacgagccctccacgtcgtcggcattgccacctcctacgccaccgcggccattgccggacatggccggaccgtcgtcagcaacgccgctactgccactgcaattgccgggcctggccgggtcgtcgtctgcgatgtcgctgcctgcactgcagctgccgggcatggccgggtcgtcgtcggcgatgccgctaccgccactatcgttgccgggcctggctggagggatgatgtccatggcggaccaggcgaacatggcctcgacgtcgcaggcgtccacaccgtcgtcggagctcctgcaagactggtacgacgagttcgagatcacgtacggcgccgtggctccgccgtctcctagcacgatcagctgggtggcgccgcagagctcgccgacggggtggtggccgtcgccgaacggcgggccggtgcagcacgacggctacctcgggatggcagcggatccaacgtcgtacatgctggaaaacctgttgcccaccgcggcgatcccgccggagccgatgatgccgccgacgagctcgccggcgccaccaccagccgtcgaccaccaccaccggctctcgcctccgcatgacgccgccggcagcaactacaaccacccggagctcgccgactacaacggcggcgtccaggcgcagcacgagcatcagtatcacccacaggagccgcaggcatcgctggtggatgccgaggacggctacagcgccatggccggtggcgacgacgcgcagctgggcggcgcggagcttgacaccgaacgaatcgccgaaatggtaaaccatataatggatggcgaattcgagttcaaattcgaggacaacaccgtccttaagtacaacgaagtctttcctgacaatgatgaggtggtggcggcgccgatgatgatcgacggtggtagggatggcgatggcgcagatggaggtgatggagacgacccattcgacaattag

SEQ ID NO: 22062 - DNA, 921 bp, Oryza sativa
  Clone ID: TF_OsC604_13
aatgcggcttggcagaaagaggccatgaattcaatcacgctatcagtacaacaacaacatcttaaacgtcccatttgattcgcagtgttcatcacacggaatgtatgggcagatgctagaggaggaataaagcaaaggaacacaattccaaagcaaaagtataaccgaagtcgaatcccaacgcgaggcaaacctcgtgatctccgccgtcggccggatcacgcagcccggacatccgcggcggcggcggcggcgggcttgcgccgccgtgctggcttggctggagagatcttggcggcttggggcctcgagctcttcctgacatggcagagaacccagaagtcgtcctcctcgccgtcgtcggcgcggcggtagcaccgcgggtcggtgatctcgtactcggccatcatccacccggtgctccgctgctgccccatctcgccgcgcacgtagaagcagtagttgatcctgcaccaccgcaccaccacgccgaggtcggtcacggactgcccgttcttggtggagctgtgcatccacgcgccaccgccgccaccgccgccgccgcagcccgccacggtccgccgcaccgagggcttcctccgcgcgcgcgccgagaagaagaacccctcctcccgcctcccgtgccgcgccaggagctcccacggcgccgcgccgcaggggtcggcctccaccacggcgcccgccacgcgcggcgcgaacccgcgcagctgcggacggaggaagtggagcatcagctcgtcctccgtcggctcgaacccgacgccgccgccgccgtactcgtcttctcggatcagattcatctccttccccattccgagtagtagctagtctagtctccgctcgaagtcaacagcgagaagacaagatgtggagatgaacagagacgggtaggggtgtgtg

SEQ ID NO: 22063 - DNA, 1705 bp, Oryza sativa
  Clone ID: TF_OsC345355_1
atggcggcggcggatgggctcctcccgggcctcaagttcgatcccagcgaccacgacctcgtcggaaggtacctgctccggcgcctccagggccagcccctcccgctcgacggcgtcatcctcgaggcggatcccctgagcgcgccgccgtggaagcttctcgcggatcacggccgcggcgacgaggccttcttcttcgcggaggcgcatgccaagaatgggaaggggaagcggcagaagcgcaccgttgagggcggcggattctggcaggggcagcccacgtgcgtcgacggcgagaggctttgcgtccccgacgacggcgtcggcagcggcggcggcggcggcggcttgcagatcgcgtggcgcaagtacgtgctcagcttcttcgcgaacggagagaggggcaagttcgggatgggtgatgcacgagtacccggtgacggcgccggatggcctcgcctcgtcccaattgcggctgtatcgcgtccgattcagcggctacggcaagaagcgcaagagggagccccaatgtccgggagcccacggcgacgacgacggcgagctacaatgcgcgccgcccccgcgccccatggcggagacggctctgctcgaggagcgtgggccactgccccatcccgttcttggccctgcatcggtggtggatcagtgcaccgatcagggctcatccggcgtgatcgacgattcttcgctggtgtttcgtgatcttcccgacctgattgacctgccagttgcggaggaagcagatgccagccatggtgcagagactgctctgctcaacgagcacctgccgctgccgccgccacagttgttcgttccccctactgcagtgccgctggacctcgccgatgactctaatggcgccgatcagaactcctatggcatgatgggcgacgatcagctgctgcttcctgaccttcccgggacaatcaatgacgacatgccagacctgttcgtctcccaagcagaggaagccagtgcagtgcccgcgatcagctaccactcgtcgggcttcatgggcaacgaggttgcggcattgtctgattttgagttgccggagagctattcctcatctgatgccatggacggcgaggcgctggcattgtcgaattacgagtttccagagagcttcgaggaggatctgagctgcatcgacttcgccactgccaacgcgagcagcctcggcttcccaatggacggataccccatggacgagctgttcgatgatatgcctgaccagggctcttccggcgcgatggacgattcatcggtggtgttccgtgatcttcccggcctgatcaacctgccagccgcagaggaagcagatgccatcggcgatgcagagactgctctgctcagggatctcgccgatgactctaatggcaccgatcgaaactcctatggcgtgatgggcgacgatcaggatcggctgctgcttcctgaaattcctcggagaatcgacatgcccgacttgttcgtctctcaagcagaggaagccggtctcggtggcggtgcagcgctggactcctcatcgggcgccatggacggcgaggcgctggcattgtccgactttgagtttcccgagagcgtcgaggaggtgctgagctgcatggacttcagcacggtcgacatgagcttcttggacgtccccattgacgagctgctagatgatctgcccgcagactga

SEQ ID NO: 22064 - DNA, 1751 bp, Oryza sativa
  Clone ID: TF_OsC1781_9
cccctcgaggtcgacccacgcgtccgcttccattagcgactaatccagccttcgttaagggtgattagaatttgattaatttcaaggcctcagatcggagattgaatggagtgcggtggtgcgctgcagctgccgccggggttcaggttccacccgacggacgacgagctggtgatgtactacctgtgccgcaagtgcggcggcctccccctcgccgccccggtgatcgccgaggtggacctctacaagttcaacccatgggatctccccgagagggcgatgggaggggagaaggagtggtacttcttctcgccgcgggaccggaagtacccgaacgggcagcggccgaacagggcggcggggacggggtactggaaggcgacgggggcggacaagccggtggggtcgccgcgggcggtggcgatcaagaaggcgctcgtcttctacgccgggaagccgcccaagggcgtcaagaccaactggatcatgcacgagtaccgcctcgccgacgtcgaccgctccgccgccgcccgcaagctctccaagtcctcccacaacgccctcaggttggatgattgggtgttgtgccgaatctacaacaagaagggagtgatcgagaggtacgacacggtggacgccggcgaggacgtgaagccggcggcggcggcggcggcggcgaagggtggtcgcatcggcggcggcggcggcgcggcggcgatgaaggtggagctctccgactatgggttctacgaccaggagccggagtcggagatgctgtgcttcgaccggtcggggtcggcggaccgcgactcgatgccgcggctgcacaccgactccagcgggtcggagcacgtgctgtcgccgtcgccgtcgccggacgacttccccggcggcggcgaccacgactacgccgagagccagcccagcggcggatgcggcgggtggcccggcgtcgactgggccgccgtcggcgacgatggcttcgtcatcgacagctccctcttcgagctgccctcgccggcggcgttctcccgcgccgccggcgacggcgccgccttcggcgacatgttcacgtacctgcagaagccgttctaattaacggaacgtgacgcctctgcaaacgctaattagctcactaaccactgtcaggtcgatcgtgtaattcttttaccagtctagggtacagccaaaaaaccaaaaattaaccgtgctcgatcgatcgatcgatccatggatcgatgatcgcctccaccggcagatcaaaatcgaagcaaaaaatcagggagaattcttggtacttccagtacctctcgtcgacaccacgtgtcgggttttctgcaccgcggatcctcgctggccgcatcgtaacggcgagcgaggttaaaaatagtggagaattcaagaacacatccctgatttttgtttctgccggatggggagtaccgtgagcatggtagaaatgactggtaaaattttcgttgatgataggtagccagagtcgatgtaaccagtcgattttttttttttttggttttagttgacatgccttcctgatagattcagaacaaacaatagagaagagaggagaaaaaaacacagaggagaaattcagagaccaaagttcaaagttttggaattttcaggggcgccagcagctgatggtattgtcagtcgtgtctaggttcgtagaggaaattaaaatgtagaagaacgggtacttcagttcacttcaaaaaaaaaaaaaaaaaaaa

SEQ ID NO: 22065 - DNA, 515 bp, Oryza sativa
  Clone ID: TF_uC-osflcyp044b03b1
ctctttttttaatcaaggtttagattcggagaaattttatttgtttttgaatggagtgcggtggtgcgctgcagctgccgccggggttcaggttccacccgacggacgacgagctggtgatgtactacctgtgccgcaaatgcggcggcctccccctcgccgccccggtgatcgccgaggtggacctctacaagttcaacccatgggatctccccgagagggcgatgggaggggagaaggagtggtacttcttctcgccgcgggaccggaagtacccgaacgggcagcggccgaacagggcggcggggacggggtactggaaggcgacgggggcggacaagcctgtggggtcgccgcgggcggtggcgatcaagaaggcgctcgtcttctacgccgggaagccgcccaagggcgtcaagaccaactggatcatgcacgagtaccgcctcgccgacgtcgaccgctccgtcgccgcccgcaagctctccaagtcctcccacaacgccctcaggttg

SEQ ID NO: 22066 - DNA, 928 bp, Oryza sativa
  Clone ID: TF_OsC1783_5
gagcatctcggtgaacgggcagtcgtgcgtgccgccggggttccggttccacccgacggaggaggagctgctcaactactacctccgcaagaaggtcgcctccgagcagatcgacctcgacgtcatccgcgacgtcgacctcaacaagctcgagccatgggacatccaagagaggtgtaagattgggtcagggccgcagaacgactggtacttcttcagccacaaggacaagaagtacccgacggggacgaggacgaacagggcgacggcggccgggttctggaaggccaccggccgcgacaaggccatctacaacgccgtccaccgcattggcatgcgcaagacgctcgtcttctacaagggccgcgccccccacggccagaagtccgactggatcatgcacgagtaccgcctcgacgaccccgccaccgacaccgccgccgccacacccacggttacttctgctgctgctgcggcggcggcgatggcggcggcggcggacggcgggcaggaggatggctgggtggtgtgcagggtgttcaagaagaagcaccaccacaaggaggccggcggcggcggcggcaagcacggcggcgacggcagcgccggcgccaaggcggcgcacgcttactcctccagcgacgacgcgctcgaccagatcctgcagtacatgggcaggtcgtgcaagcaggagcacgagctcccctcgccgcaggccagcggcggcgccggggccggcgcagggagcaggccggcgtcaaggtacctcccgccaatgtaccccagcctgcgggcgtctggttttggaaatcggtccctctttcgccgcccgcgtgggggctccgcggcgattggctactcgtcagttctgcctgataataatattgtttacatcctgtacgtcgtctcaggctcatcagcagattaa

SEQ ID NO: 22067 - DNA, 1005 bp, Oryza sativa
  Clone ID: TF_OsC228106_1
tcagaagttccagcagtagtatggctcgtcgagaaagttgcaaatggaatttgagtttgatgatgaggcctgctggtccgtcgggccaccggcggcgatcccgccgtagatgtcgccgaactccatcaactccggcaggtcatctgacgacgaagcaccaaggtgctcatggttgagaagccgagacgacggtgaggaggtgcagcgtgatggtgagctgatgaccaccggagacgacgactcctctcgagccaggccatgttcatcctcctcctcctcacggttgccaccatcgatggcagcacggccatcgccggaccggcgactcgtgtgttgccacggctgaccggacggcggcggcggcgccgccgcagcctccgccggagggagacggcgccggtttggcgtgtgctcctgcactgtcgtcgtcgtcgtcgtcgtctccacctcctccatttccagccagtgttcaattggaggctgcttcttgaacaccctgcagatcacccactcgctgtagataatatcgagaagattatgtgtacgtgcctgagctcctctgatgaagttggtgctcggtgctctagagtactcgtgcatcacccagctcgtcttctcccctcgcggcgccctcccttcgtagaacaccagcgtcttcttcgtccccacgagcccgccgccgccgccggcagcgtacacgcccttgtccttccccgtcgacttccagtagccgccggccgtcgcgcggcggacgcgcgcgccggacgggtacttgctgctccgtctgcagaagaagtagcactcgccgccgccgccgcctccggtgctcgccgccgacgagtcgcatgggaggtgccatggatcggaggtgtagaggtcgacgtcgcggatggcggcggaggtgaaggtggcgtccatggccttcctggcgaggtagtaggtgacgagctcctcgtcggtggggaagaaccggaaccccgccggcaaccgctgctcctcttccat

SEQ ID NO: 22068 - DNA, 2070 bp, Oryza sativa
  Clone ID: TF_OsC1713_5122
tcaggtagtgtgattcagagatttccacacaccaaccaacaaaagcagagagccggccatcacaaagagagccggccactgccacccccaccctagtcgcacaacagagctagtccatttctgaatatgaggtgcatgctgctgttctcgtgtctccaacgaaggtacattattctcattgctatttctagactccactctcaacagcctctgctttagattagttccacggggctgattagcatgtaccaacatctcttcatgaaaggagaagccttggagcttgtccataacttccactgaatgatccacttgaataggggtatcctctttgcactgaatatgcattggttctccatcaataaactgtagtagtaccataatctgggaggctgcatcgtcattttcctcgctgtggttattagatgaacttccagtgttacaacatgatccagcttcatcttcactcctgacactttccttcttgttattagatgaattgcgagtgttacagcatgatccagcttcatattcactctgcaaatgtgaggatacaggttgagagactgatgccctctcaacagagcatacaaggcggatccttcttgcagcagttccttgttgtggatcaacgagatcttgagctgtcaagtgcttcattgaaggtgcctgttcctgaccttgttctttcaaggcatctgaaaatgtcatgccactcctgcccggttctacgatagtatcgaaccaatgctggggataaggggtccacaatccagcccaacagaaggctccactcttttgtgactccatgtgaggattgaatgcggagtgtagttgatcttggttgcacaagggggagccctcggctactccactgtagaccatgctgctactctgggctcttgcttcaagattagcatcacttgtttctgtttgtggtgcattgattgaagaagaacagcaagtagcatctgtgttgtctgcacgctgaattagaagcatctgatatgaatcattcttcctccaactatccatgagtaatgtgttattgtttggattgttggacgacgcggtaggattagactctacgtttccagtggggtgcttatccattttggtgtaatttggactaaacaacaaactttgcaggtcctgctcagacaaggtactgccaaaatgcgctgaaagatcttgctcacccagattgccgacaaaagggtgatcgctgtaagggcgaattggagaggtgatattagggaatccattgtatctttgctcaggctctaggtctggaagttgagataacacgtccagaaaagcatcgtcatgggctacagtttgctctttgtcatggacagatgtactagcatcttgtatttcagtcagttggctgaaaccagatgatggtaaggtctgatgatccttcattattgaggcgagggccggttggacagcaggtgtgccattttggggattgccttgagaagacgtggacaattgttggtccaaattggaggccggggtatgggtatcatcttgttcgtgcttgttaaacaggcgatacagaacgaagctaccgtttttgcctgattggaagtgaggctcagtggtgcggtactcgtgcatgatccaggcggtgcggaggccccgcggagctctgccgcggtggaagacgagggtcttcttgatgccgatgagggggccggcggggcgggagcggatgaggcggtccttgccggtggccttccagtagccggcggcggtggagcggttggagcggtggccgccgggatacttgcggtcgcggggggcgaagaagaaccactcggggtcgtcggacttgataacggacatggccgggagatcccagggctcgcaggtggagaggtccacgtccgggatgaggaggaggtcagggtggctccgcccagcgatctttcccttcagatagtgcctcaccagctcctcgtccgtcggccggaaacggaaccccaccggcagaaccgccgcggcggcgaccgccggcgtcatctccactttcccttgtttcatcgccacttttcccttctc

SEQ ID NO: 22069 - DNA, 1369 bp, Oryza sativa
  Clone ID: TF_OsC8585_1
gcgatttataactaggctccgcctccgacgcgcgcacgcctctccctcccctcctcctccgcctcgcctcgcagtgtggaagaaaggaaggaaggctaaaaccctagcgagcgcgcgagcgagcgagggctctctgcttccttgcgatgacggcgccggcggacaaggggaagaaggccaagaccgacgccgacggcggcgccgccgaggagaacgagcagatcgacggcgccctcgtcctctccatcgagaagctccaggagatccaggacgagctcgagaaggtcaatgaggaagctagtgacaaggttttggaggtcgagcagaaatacagtgagattcgcagacctgtctatctccgaaggagtgacgttatccaaacaatccccgacttctggctgacagcgtttctgagtcatcctctacttagtgagcttttgaccgaagaggatcaaaagatgttcaagtacctggagtctgtcgacgtggatgattctaaagatgtcaagtcaggctactccataactcttaccttctccgagaacccgtactttgaagacaaagagctcacgaagacatatgccttcgctgatgacggaacaaccacaataaatgctactagcattaagtggaaagaaggaatggaaattgcaaatgggaatgccaagaagaaagggagcaagcgaccattggttgaggaaagtttcttcacctggtttactgatacagagcacaagagtcttgctgatggtgtgcaagatgaggtggctgagatcatcaaggaagacctgtggcccaatccattgaagtatttcaataatgaggctgaagagttaggagaggatgacgacgaagaggggtctgatgctgatgagggtgaagaggatgaggaggaggagaactgagtctaggatgtcagattgcgatggtgccgatcgtctgcattttgtggatgctgtcactctgaagggcgaagttgcgtgaccctcggttgcttctttcttttttctttttgatgacttagctggaacccttaggaactgtttaatgccttatggagtccgtcgtattttcgactcaaaggagacacctctatatcataatctgcgtataaccatggaagacattttaacctgctgatgtgtggttcattgcgctgcctctggtgctgtagggtgttcgttcctttgtgctctctgtcttttttttttttttttgtgtgtgtgtggtcgcgctggcattgttgccagtctgatgggctgttatttctccccctagaaagagtgaaaaacctggcttgtgatcattgtttacgaaaccgtgcgggtatctcatggttatctcggttattacatgctgtaattttctc

SEQ ID NO: 22070 - DNA, 1242 bp, Oryza sativa
  Clone ID: TF_OsC8302_1
ctacgaaacctcctctctctctctcccttcgctttctctcttccttcctagggcttcccctcctcggcggcgcatcgcataggcggcggacgaagagctcccggcgatgggcggcgacaaggagaacctcgacctctccgacctcaacgcctcgctgcccgccgccgccgccgctctcagcgccgaggaccgcgccggcctcgtcaatgccctgaaggataagctgcagagcttggcgggtcagcacacggacgtgcttgaggcgctctcccccaatgtcaggaagcgtgtcgaatatttgagggagatccagggccagcatgatgaaatcgagttaaaattctttgaagagagagctgcgcttgaagcgaagtaccagaagctttatgaacccttgtacacaaagaggtataacatagtaaataggaagttgttgaggtgttatggttggcaatgcaacaagagctgtttgttatattttgttgatgcagtattttgcgttgaactgcccaggaaattattggttggttgtgcacgggtgagttttcgttgcttggtatatgttacccgtggttttattggcggaagttgtgaggcctgtctgggaacatctatattagagtattattatgttttagttatatgtaatcggtttattaagtttgtgtaattatttggaatctgccggtggaacttttactagtattcatttgagccttatgaaaaaaaaactaaaataggagaaagcaattgggactgaaaatagagtggtatcctggtaaaaacctgacacagaagattctaaaaaagaaacccaagaaaggttcaaagaatgcaaagcctattaccaaaactgaagtctgtgagagcttcttcaactttttcagtcccccgcaagtacccgatgatgatgaggacattgatgaagacactgctgatgagcttcagggtcaaatggaacatgattatgacattgggaccaccataagggataagatcatcccacatgctgtttcctggtttactggtgaggctgtgcaagccgaggattttgacgatatggaggatgatgaagaagatgatgaagacgatgatgaagatgaggaggaggaagaagaggatgaggatgaagacgaagacgatgaggaagaaaaaagcaagccaaagaagaagtcggcaggcaaaccgaagtattttgcgttgaactgcccaggaaattattggttggttgtgcacgggtga

SEQ ID NO: 22071 - DNA, 1261 bp, Oryza sativa
  Clone ID: TF_OsC18074_1
ccggccggcaccatcccctaacccctgaccacccccccgcctccgcacccgcctccggttgcctcctcccctctcggcgggcggcggcagcagcggcggcagagtcagcagacctcgccgggaagctaaagccctaaagctcgcggaagggtttatcgcaacgggcgatggcggcggcggagcagaaggggaagaagccgaggaccgacggcgcggaggccgagcccgtcgacgccgccctgctgcagtccatcgagaagctccaggagatccaggacgagatcgagagggttaatgaggaagcatgtgataaagttctggagttggaacagaaatacaacgaggttcgcagaccagtttatgttcgacggaataaaattatcaagcaaattcctgacttctggctgacagcgtttcttagccatcctatgcttggtgaactattaactgaagatgatcaaaagattttcaaacacttggagtctatcgacgtggatgactcagaagatatcaaatcaggctactccattactctcacattctcccccaatccatattttgaagatacaaagcttacaaaaacatattcctttagtgacgatgaagcagtcaaagtaaaggctacctccatcaggtggaagaaaggaatggatattgccaatgatcgtgcgtacacgaagaaaggggacaagcgaatcttaattgatgaaagtttctttacttggttcaatagtgaaaagaacagaagttttgctcatggagctatggatgaggtggcagatgtcatcaaggaagatctgtggcctaatcctttgaagtacttcaacaatgaatttgaagaagaattagagctactggatgacgatgacgaggtatctgatgatgacgatgaggaggaggatgatgaagaccaaggtgaaggagaggaggatggagaggagaactgagctctctgtcatgtcagattcttttggcctggacaacttatgtctgcagaaagcggagaccgggcctcctggagggctgaaacagcagggcgtccccttttgcggcgttgtggtgctcgacttagctggcagtgtagggacttgctccgaaaaactttgttctatggagaaataactcgagttcaatagatgattttgttgcatgcgcgatcgaaatgttgcgtgttgtttggaagtgttatttaccttgccgttggattagtgtttataacgctattatatatagagcatgatcaattaaaaaaaaaaaaaaa

SEQ ID NO: 22072 - DNA, 1695 bp, Oryza sativa
  Clone ID: TF_OsC26576_1
gaatcccctccgcctccactcccctctcccctcctctcaacccccacagctcgcgccgccgccgcagctagggtttctctccgccctagcctacctcgcggagacctaccacccgaagcttcgggaaccctcgcatagccgccatgagcgacggcaaggactccctcgacctctccggcctcggcgccgccgtccccaacgccaaagagctcagcgcggaggacaaggccaacctcgtggagtcgattaagaacacgctgcagggattggcggcgcggcacacggacgtgctcgagagcctcgagcccaaggtcaggaagcgcgtggaggtgcttagggagatccagagccaacacgatgatctagaggcgaagttctttgaggagagagctgcacttgaagctaaatatcagaagatgtatgaaccactttactccaagcgttatgaaatcgtgaatggtgtggttgaggtagatggtgtcaccaaagaagctgcagatgaaacccctgcagagcagaaagaggagaagggtgtaccagagttctggcttaatgccatgaagaaccatgaaattctgtctgaggagatccaggagagggatgaggaagctcttaagtacctcaaggacatcaaatggtacagaattagtgagccaaagggtttcaagcttgaattttacttcgatactaatccattcttcaagaactcggtgcttaccaaaacataccacatgattgatgaagatgaaccaattctggagaaagccattggtactgaaattgaatggttccctgggaagtgtttgacacaaaaggttctcaagaagaaaccaaagaagggctcaaagaacactaaacctatcacaaaaactgaaaactgtgagagcttctttaacttcttcagcccacctcaagttcctgatgatgatgaggaaattgatgaggatacagctgaacagttgcagaaccaaatggagcaagattatgacattggatctaccatcagagacaagatcattccacatgctgtttcatggtttactggagaggctgctcaagatgaggacttcgaaggcattatggatgatgaagatgatgacgatgaagatgacgacgatgatgaagatgaggatgacgagggtgatgatgaagacgacgaggatgaaaagaagggcggacgagttcctgcaggggaagggcagcagggagagcgacctgcagaatgcaagcaacagtaagatgcttcctacctgagcgtttccaaagtccggtcctggagtgaagaagaatgtttggttcggcttgatgcaatgtctcgtccatttggtttggagagccagttggggaagtgttgggattgagttggtttagtggaactggcgggggatatttttttcgggacatggtattatatgtttggtagctttttccattgttgtattgggtcgacatatcttgtgcgaagcttatggttgagtgatgaatatcgccggtttggtattatcatattgccaataccactggcatagtgctgagaaattttgatctaggagaggcaatgtttttgttccacgagaggcaatgtttttgtgcgaccaagttgcatctttgatggcaaggaaattgttctttttttttttttaaaaaaaaaaaaaaaaaaaaaaaaaaaaaaagggggggggcctgcagcccggg

SEQ ID NO: 22073 - DNA, 5515 bp, Oryza sativa
  Clone ID: TF_OsC1542_1
atggacggggggacggggccgggggcggagctgctctcgccgggggaagccgagtggccgcccgagctccgcctcccgcctccgccgccgccgcatcctcctcctcctcccccgctcgagccggctccgccatccactccccagctccgcggcgaggcgtccccgcccccgcctccgcctccgcccgtgggaccacccggcgcggcggtggtggccgccgccgcgaggaaggaggcgtccgcgtccgccgaggggtttgatgactcgcacttcctcggatcgatcatgggggcgcccgcgcaccagcaccagcaccagcaccagcagccgcctgccgtggggccgccggtggtggtgaagaggaagagagggaggccgccgaagaacagggatggagcggcgccgcctccgccgcccaagccggtgaagaagagggaggacgacgaggacgtggtgtgcttcatctgcttcgacgggggcaatctcgtggtctgcgataaaaagggttgcacaaaagtctatcatcctgcttgcatcaagcgcgacgaatcattctttcgatctcgggcgaaatggacatgtggttggcacctatgcagcacctgtgaaaaggcagtacagtacatgtgctatacttgtacatactccctctgcaaaggttgcatcaaacaaaagccagtcaaattctttggtgtcagagggaataagggcttctgtgatacctgctatagcactatactgttgatagaatccaaagatgatcgtgccaaggctaaggtggacttcgatgataaaaataattgggaatatctcttcaagttgtattggttggatcttaaagggaaacactctctaacattggaagaacttgtcaatgccaaaagctgttggactgttcgtagcacttccgctaggagagaaaaggaagattcatccaatgacctctatgatgcaaattttgaccttgatgccagttctgatggcgcctcaagaaaacgaagacggaatagtttttcagggaaaaggggacggaaacgccaaaacaatggtgctgaaagcttacctaagagagtgcaaaatgaaggaatgacttttataggtgacacacaatgggcatcatcagagctcttggaattcattgggcacatgagaaatggtgatatttcttatatttcccaatttgatgttcagattcttctgcttgagtatgtaaagcaaaaaaatcttcgtgatcctcgcagaaaaagtcaaattatttgtgatgcgaggcttgccaatttgtttaggaaaccacatgttggccactttgagatgttaaagcttttggaaatgcattttcatgcgaaggagacggtaaatggtgatggccaaaaaggcattgactcagattcagctcaaatagacagtggaggatatagtgatatgccaagtaaattatgctctgataagaggaggaagattcataagaagattgagagagaatcaccagctaatctagaggattatgcagcgattgacatgcacaatatcaatttgatttacttgcgccgcagcttgctagaggatcttattgatgataatggcacgttctctgacaaaattactggtgctttcgtgaggataaggactccttgtgttggccaaaagcaagatatttaccgcctggtgaaagttcttggtacacataaagtagcagaacggtacagcgtcggtaagaagacaactgatcatgcgcttgagatattaaatttagataaaaaggaggttatcacgatggatacaatctcaaatcaagatttcacagaggaggaatgcaaacgcttacgccagagcatgaagtgtggtttgattacccgactaaaagtggtactgttgatcaagattcattatacgggagacatccatgagaaagccaaaatattccaactgctgcgagttaatgattggttagaaaatgaaaagcagagactgagccatctacgtgatcgtgctagtgaaactgggcgcagaaaacaatatccttttaacttaatcaaagatttgcatgcctatggtcatcatagattaatctatgaagcgttcaattcataccatcattgcgaaattattatttgcatgaggatacatttcttcatgcatactttactaatggagtatgtggagtgtgtagagaagttgcaacttctgggcactcctgaagaaagagcacgcatcattaatgaagatccagaagtacatgttgacccatgtatgtctcctgattatgaatctgctgaagaattggatgttaagaaagctgttgattcgacaagtaggaatggatcagacctgttatttcttggaagaaaaggaatcgaaacaaactctctgcagaatcatagacaaaattgttctgccactagtcatcacacgactacaagtccacctactgagggtatgactcatggacaaggagaagaagcatcgtttgcatcgtcagaaattgtatcaggtgacatggaaccagaaaaagtatggcactacaaggatccttcaggaagtgttcagggcccattcacacttttacagctgtccaagtgggcagcttatttcccacgtgacctgagaatatggctaacatttgagagtgaacaaaactcactgcttttgactgaagttctctcgaaacaacaaaaagatttcattcagccttctcccaaagttgacaataataggtcaacatgggaaggcgttgggcaagatagagttgactcaagtttgactggaaataactcttcctctcctattggttataatgtgatctactcttctcggttgcctagcccatctgctgactattgtgcatcagctagagaaggcccaaaccttccgagtggaaccttgccattcatgacaagccagaaaacacaaaaggatcctcagatgttgcatggccaggcacagcatcagggtgattattcatgtaccatcccgtcatctgtggtttcatatagaccagctggttctcatgatgagtggccccctcgaggcaacattggtgaatggaacaatagtcaggatagtggtggtatgtggagcccaaccacacctcacatgagtcggagcaatttggagcatcagcctgacaggtgtattacgaagaagcaattgcagaatgattccaaacgtaatacgctagcaggatctgcagaaaatctaaattcccaaatggattttggttcacagaaagtacacattcctactccacaacaacctgagagagatcttgccacttctgttggtacttcaaggcaatttgagtttaaaacttgtcatcaggaaggctctcactggagttcaacagcagactccattactcatgatgggcttcaattatctcttgcttcagcaaagcctgagagctgctctgcagtaaatcctattagagatggagattccagttcagcttctcgtgtgcctaatcaatcaggagctcatgtctatagcccaccacacccagctacaactaatttaagcaagagtgaggagactatgaatcagtgtaaatcgtgtgagcctgaagcatcaaataaatcacgcaagcctgatgcatcacatgctccagttaatcaacatcctaagcctgaaagtgatccattgttacctgatactcaagattttgagcgcacgcatcctagcccaagtactgaacatgacacaaaggagccattgaaggatcaatcgaggtcaacatcagtagcacctgaagggtcgggtacaatggcacatggacagtcttccatagcttttatatcagaagcatctggcccactttctagtaaaattgttggcttgcaaccacccaaggatacatcatttcttgtcgaaaaagatataaaagatggaggttccattacacaaacagagcaacaaaaagaagagagtacagcatttaagaaagagaacgtagctgttgatcctatctctgacagtgaagcaatagtatctggtgtgttggaatctttgacagagacatataatctgcatgaagaaaccgctttggaaaatttcacgccaacatctgccgaggaagaacaaccgcaatgctctacccctattgcattatctccttgggatgaaacaagtgactatcaaggtgaagctgttgattctgctctatggggtgtccaagatgaccaaaacaatgaaatgtggtcattgtcttcaccaacacctactctccaaccttcaggtattggagctgataccaaaggtgcttcctgtgctatagaagaggtgatagtagcccaaggaaatagtggtgttgttgaaccgtcaccagcactggagaagaaaaggattgaaaaagtaccaagtgcttccatagatcgtggagtaccagagcaggtaaaaccaaaatcagatgctgcattatctccagaagagagcagaaaaccttcaggtttgcaactatcaagcacatatctacaagggagcacaaaatcttcaggtttgccaccgtcaggcacatctctagatgggggcatagaaccttcaggtttgctaccttcaggaacttctttggagtggggtacaaaaatttcaggtgtgcaatcctcggcctcatctctagaggggagcaaaaaggcttttgttaggcaaccatcaggctcttcactagagggaaacacaaaagcgtcagaaaagcttcagcatggcaatcatcaggttcttcgcctgttgcagggagctcaaaagcatcaggttggcagccatcacctcgcgagagctcgaaatctaagcctaattccacatggggtgccggccaaagccgcaactcgtcttcgcaccaatcaacaacaccaacagctaaatactcatcagaaaccccaaggagacaaggaaacaacaacacaaattctgctggctggggagactctctcggaaacaagagctggcattcaccctcaggcaatgcgagcagccgaggcagccattctagccaccaccatgaccggcacaatcagagcagcgaaccatggcgtggtggctcaaatcattccaggagatcagatcatcgtcaagaacatggcaacggtggctcgtcgagatcatcgtcgtcgagggggcaatctcaaagggggatctgtagatactacgagaatggctactgcaggaagggcacttcctgccagttcctccaccgttgaaaacgccctcacatttttgtacagccctaaatgatttctcactcactccgtagtcagcacagaagtgacctttatttaaccttctcggcaccactcagctgttagtaagtatatacatatccatcagcacaggagtatgattaagttagcattttatgcttggaaaaacagccactgatgtacggccacgactgtagatccttctctttaggtgaatgatgcattttgattgatcctgttaggtttagtggaattatgagttcacccgctttaaaaaagaaaaatctttaataataatattttaaatttattctactaaaccaatg

SEQ ID NO: 22074 - DNA, 690 bp, Oryza sativa
  Clone ID: TF_OsC10655_1
gaaaaaaaaaacaaaccacaacgaactaccccctcctcgtcgagccgacgcgagagaggaaagtgggttgcggcttgctgcgcgtgtggagtcgccattccccaattcgctgcgccgcccgccggatctcgtcttgccccctgcggcggcggtttgggcccccccttccgatcggtttccccccgcacatggtcgtggcggcggcggaggtggtggtggtgcgggagtagggaggcgggcgaaccgaggcggcggcgccgatggcggacctggtttccagctgcaaggataaactggcatactttagaataaaggaactcaaagatatattaaatcagctcggcttaccaaagcaaggaaagaagcaggatcttattgatagggtgttggcactcttaacagatgagcaaggtcaaaggcatcatggatggggaaggaaaaattctctcaccaaggaggcagtggcaaaaattgttgatgatacatacaggaaaatgcaaatccaatgtgctcctgatctagccaccaggagccacagcggatcagatttcagtttcaggcctatagaggaagcctatgactcttttccgccagaggccaaagttcgctgcatttgcagtagcacaatggttaatgacagcatgatccagtgtgaagatcagcgatgccaagtgtggcaacatttgaaat

SEQ ID NO: 22075 - DNA, 6021 bp, Oryza sativa
  Clone ID: TF_OsC31430_1
atggagggagcagccgccgccgccggcggcggggagatgctatccccaggtgaggcggactggcctcccgagctgcggctcccaccgccgcccccgccctccgccgcatcggagggggagccgccgcccgcgcgggccgcggtggggatggatgactcgcagttcctcggatcgatcatcggcttgcccgcccagccgccgcaggccacggccgaggcgctcgcggtggtcggggtcaagaggaggagagggaggccgccgaagaagagggacggggcggcggcggcgacggcggttgttcccgcggcgaggcctgcgaggaggagggaggacgaggaggaggtcgtctgcttcatctgcttcgacgggggcaacctcgtcgtgtgcgatcggaggggatgccctaaggtctaccatccggcctgcatcaagcgcgatgaggcattcttccaatctcgcagcaagtggaattgcggttggcacatatgcagcagctgtgaaaaggcagtgcactacatgtgctatacgtgtacatactccctttgcaaagtatgcatcaagcaaggtaaatttttcagtgtcagggggaccaagggcttctgcgatacctgttattcaactatactgttgatagaatccaaagatgaaggtgatacaaagattgttgttgattttgatgatcaaaatagttgggaatacctgttcaagctatattgggtggatctgaaagggaagctttcattaacattggaagaactaactagcgccaaggctcgatggaatgcacctactacttacactaggaaagaaaaggatgagtcatctgatgacctttatgatgctaataatgacgatgatgctggttctgactgctcctcaggaaagcgaaagagaaattcttcgagaaaaaagggtcgaaaacgtcggaaaccaaattctgattgtagcattgccacaaaaaaggttgagactgttactagagatgatggaaccctgcccaacaaggtaccaactgaagaggcgtccttgccggtagacaccaaatgggcttcgccagagctactggagtttgtagggcacatgagagatggcgatcaatcttttatttcccagtttgatgttcaggctcttttgcttgactatataaaacagaacaacctccgtgaccctcaaagaaagagtcaaattatctgtgactcaaggcttcaccgtttattcaggaaaacacgcgtcgctcattttgagatgttgaagcttttggagatgcactttattgtaagtgagccttctgcagtaaatgatggtagccaagggattatcaatcctgattcagctcaaatagatcatgccagtggatataatgacatggcagcaaagttctctcctgataggagacgaaggatgcatagaaagatggaaagagaaccacaggctaatcctgaagattacgcagcaattgatatgcataatattaacctaatttacctgcgccgtagcttgatggaggatcttattgatgatcccacattgtcagacaaaatttctggtgcttttgtcaggataagaatttcgggacttggtcagaagcaagatatgtatcgtctggtgaaagttgtcgggacacataaggtttcagaaaaatacagcatcgggaagaagatgacaaattttgcacttgagataatgaacttaaacaaaaaggagattatcacgatggacacagtatcaaatcaggattttacagaggaggaatgcaagcgcctaaggcagagcatgaagtatgatctaattagccgactgaaagtgggtgatatccaagagaaagccaagatcttccaatttgtaagagtgaatgatcttctcaacactcctgaggaaagagcacgcagaattaatgaagttcttgacgtgcatgttgactcgcatatggatcctgattatgaatctgatgatgaatttggcaacaagaaagctgttgaacgtagtgtaaattgggcaagatcagatccgttcgtttcacccgttaaagttaaatattcgaacagttcacaaaagaatggtgatgctacccgccatctcaaaaacctgtctaaacaaaatacagagcgtaaatcaggagcagcaagaaactttgagaattcccattcaccagttggtatggatattccaaaatctggcactaatgtaaagagtaccaggtgtgaaactacgtcaccttcatctcatggggttgtatcaagtgacatggaaccagaaaaagtctggcactacaaggatccttctggaaatgttcagggcccatttactcttgtgcagctatccaaatggacaagttacttcccacgtgatatgagagtatggcttacatttgagagtgaagagagatcattgctgttgactgaagtgctctcaaagcaaccaaaagattttggtcaacctgcatctgttactacaagtagtaagtcgacagtagcagacactggacaaaacagaaacactgaaattgttgatctcaacaaagctccttctcctgttggttatagtatgcttaattcttttgaaaccactgttcagtctactaagcattctgctccagaaagggaaagcgtgaactctttagatgacaggttatcacactcgactgactcagttccaccaaaggacgctaacgcttcaaatagtcaagcaatgtgtcagatcaagcattcaggctctcttccatctcctggaagtccacatcaacgatcagacttgcaccatgatgaagtacagggaggacgctctggtgaatggaacaatcaacacaacagtgaactgtggagtccatccatgccgcagacaagttctagtgcacacagtaacgtggaatctcatcacgatcattatccttcgtggtcacaggttcaacatgatcctaaaaatagtttacaagcaggttctgggaaggatctgaattcgaggtatgatattgcgcagaaacttcctagtcaacggatcacgagagatgttcccagccctgtatttgcctggagtccatctgagtccaggactgcttccagtcaacatgaaggttcttgcttgagttcaacaaccaatctatgcactcatgatgaacttcattcttcaattgcttctgcaaaggctaaaagctttgctccagcaactcctgttgaagacagaggttcaagctcaccctctggtatgctgagtctctcggaaagagcaccaatctgcagtccacagtcagctccttctgcgtctgcttctgatacatgcaagatggaggagaacatgaatcaacaaaaaacacttgaagctgatatatcaaacacgtcagttaatcagtctccacagtctaagattctccctgaatcttctcctgataaccaagatgctgaacatgaatatcgtagtccacctccaatatctgagagtaaagagttatccccacagtcaaggactacccctggatcttctcctgataaccaagatactgaacgtgaatatcctagcccgcctccaatatctgggagtaaagagatatccccacagtcaaggactatccttgaatcttctcctgataaccaagataatggacatgaatatcctagtccacctccgataccggagagtatagagctatctccgcattctaaggctctccctgaatcttctcctgataaccaagatattgaacctgaatgccctagtccacctcaaatacccgagagtaaagagctatctcggcagtctaagattctccctgaatcatctcctggtaaccaagatattgaacctgaatgccctagtccaccgcaaatacctgagagtaaagagctatctcagcagtctaagattctccctgaatcctctcctgataaccacgatattaaatgtgaatattccagtccaactccgatacccgagagtaaagagctatctctgcagtctaagattctccctgaatcttcttctgataaccaagatattaagtgtgaagatcctagcccaactccgatatctaagagtaaagaggtgtctccgcaatctaagattctctctgaatcttatcttgataaccaagatgttgaacgtgagtgtcctagttccattctgataactgagagtaaagagcttgctgtggacctccctggatcaatatcattagcacctgaaaaaacagcttctactgatgtaggtgaaaactcttcacttgcttttatttttccaaaatctactctggctggggatgatgctttgaaatcagtatttgatatggcaaaggcgcatttagaatgtgaagattcaaaggttaaagaagaactgtatgttgaatcaactgttgttataagagatgacatggttgttaatcctgcctctggagttgagtccatagacatgtctgaaaatctcttggaatctttgatggagcaaagttgtggaactttttacatggatggtacaacagccttagaaggttttctgtctggttcaacgaaggaagaaccgcaatgttctagccccattgctttatccacatgctctagccccattgcattatccccttggggtgaacatggctactatcaaggagattctgttggttcttctttatggggtgtccaggacgatgatccaatcggtaatatttggccattatcctcacaagcaccggctctccagtattcatctggtagcactgctcattttattgatgaagcaactgtcacccatggaaataatggagttgttctaagtagcacgccaggggaggaggtgggtttaccaaactcaggtgtttgcacagattggggattggttgagcaggtgaatccagaaacaaatgatgcatcggtatcaatgatagacaagaactcaggattagtagattctcaaccatcagcaaatgatggctcagatgtgggtactgcacggaacactaaccataatactaacttgtccctcaaccatgaaacagcggtacccttgagtagaagttctggagaagcatcaagaaaacacggatttattactgacttgaatgttgctacttcagaggaggcgttagggaacaccaagaactggaatccatatgctggtaatgctaatcggggcagccagcggaatcatcaccgtgacaggtactctcaaataagcgaatcttggcttcttagctcaaactactctaggagtaggtctgatggatttggcactggtggatcgtcgagatcaaccccaaggggacaaactcagagggggatatgtaaatttcatgagaatggctactgcaggaagggtgcatcttgtaactacctgcacccctgatctctgcaatagataacgagggtttgcattctttgcccatatcttttgacttttttgtatagcctaattacagtggtagtcaacatagagcctacacaaccttttcttggtttcattcaaccgtagcaaggacggagtatatgtctagctctagcataggaggatgactgaatgtactgcccaagcagattccactcttttggggacacggcctattttcgttttgcttggttcaattgaactgcatctgtgtatccctataactaaagttccccgcttttgtttcttcgaggcctgaggcctgacccgcatccgccagatgtatcggaaaatagcgatatgtaacccatcggtttagtttctgatttgccttatgttgacagaatgtattcggtattagtacactgggttaggatagttatttagcattttgactagttataaatgatactactacttaacagtatacatgatgtgattgtgatattaacatgctgatactgtgcaccgaaatttggtagaggatggcttgtcgaaggtcagatatacaacagtacaagttaggcagctgattactgaatttgtattaagggacttgtggaatagtttatcggttgtcgtcattactcctgtatccagtgtccatttcgtggctctcttgtagccagatacaaaaaaaaaaaaaaaaaagcggcc

SEQ ID NO: 22076 - DNA, 5620 bp, Oryza sativa
  Clone ID: TF_OsC13528_1
gttgggtttcttttcggggccgaccatctcccccggggctgttttttagtacccatttcctacctgacaccaggatttattcagaatgtattactgcttgttccgaagcaagaaacagaagggtaggatgcacatgatttataactacaactgttctacatgacaattctgaggagatgcaactcgctacaatgcaccaagttcagaaacatgcatatgtgatatggatgtctactgaggaactacaacaaaagggaggatacaacagatgaaactgagaacggatctactgcctctctcttgattgtgacctagtatcagtcagcctgtcatcatgcctgtcactatccctgccgttgtgcctgtcatcacgcctctcgttgcctgacgattgccgatcaaactgccgatcagtcctctcgttttgcctgtcgtaccgtctctcgttacctgaattttgcctatcgaagtgccgactgtttcttgatggatatccatcattcggtattgaatgggaaaagttgcagtgctcaccattcttgcagtatcccttgtcgagtatagaatagcagactccccttttaggcctccacgaccctccatcaccacctgactgcgacctccaagacctcccaccagagtcaccgccattaaaatcaccaccatgcccagaatgcctgcctccattgtctcgctgctggttattccaatttgggttcccgcttggtgaattccagttcatattgttattatcttggcctgtcccatttccagtactgggacctggattaacctgcatgggagcaccccatccaacattttggttcatgtttccaacttggcccccccaaccaggataagaatttgtatttccttgtgcaatggccccccatggagccattgcaactccttgcatctgagttcccaccattgctgctgcatttggagtgccttggccttgagttgcccacatcatattcatattggtgtttccaggatttggtgtaacccagcccatgtttggaactgcatttggctgtgcttgcatagccaaacccatgttgtagcctgtggcactttgtgctgttcctccccaagacatgttcatgttgttctgtccaaccattccccagcccatgtttgcattaccctggagagtagctccccaggtcatatttccagccgcctgaggctgagattggccagatgtgcttgccaattgtgcccaagcagtgttttgattatcaccaccagccatggctgtggacgagggctgcactgcttcagcagatggtgttgatatcagctgagatggctttaccgagttggaagcatcagtttgtaactggttccttgcatcttcaagttgttgagtatttgattgcacccctccaggttgtgcaccagatagtccaagatcttcacccgatgacctcatcctttcacgcgaagcatcttcccccaactttgaatcgtttccatcagctaatctgccatcactttgtgataaaaaagatgctatctggttctgggactgcaactgtgaattaactacttctgcactcactgtcgcaggacctggtacaggagttagctgacctgcacttcctaaagctgcattttgtccaactacaaagctacccatggcaggctgagaaagtgtcacaggatttattgcagttccaaactgacttgaggcgttccaacttccactaagagattgttggactgcatacgctgcttgagagttttgcattccataataaccttgtgtactagattggatagtggctggtccaagatttgccgcatcgtttccctgaccagcccttcctgagaaagactgtgtgctacttagaactgctgattttgaaggttgttctccagctcttgttccttcctcaagaagggaatcattacggggcctaccatcaacatctgaactgcttccaactggcggttcccacggcggtaggtctttctcaaacctcccgagcaaagcatctgtcaataatattgaatcatcttgcttctcagtagacttccatatttttaaattcggagggaagtacccactgccattccatttccgcaactgcactattgagaaaggaccctggattttaccggtaggatccatgtactgccagattttttcagactcattaataactgactgtgatgcatgtgttccccctgaccctatattggctcctgcagtagctcccactttaactgcgtgtgtaccgatgtttgggctatctgatttacttgtgtaaccagcactttcaccgtgagacgaaaatgcaggtctgcgtccaaggggtgactcgatatgtgtactggattcgccccatgtgtttcgattagactcccagttggtttttaaatctctttgtgcaggactcctaccctctcctttacctggagatacaggattattatctttcttagagaaagatcctcttgacttattgaagctgcttcttccagtatcctgctcttgttcctctggagattcataatctggatccatggtatggtcagcatgaacttcaggttcttcattcagcctacgaacacgctcttcaggggtacttagaagcttcagcttctctacacattctctaagcgtaaataatgaagaaggatattcttttctacggcccatatcgcttgcacggtcacgaagatgcccaagccgcattttttcactttcaatccaatcgttgactttgagagattgtagaacctttgctttctcataaacctctccctgaatggtaagatagtttagaaacagcgaaactgtgcacatatgccaaaaaaacactgtcagccttggaatgaatccacactttatgctttgccgtaagcgtttgcattcctcctcagtgaactcttggtttgaggttatatcaatagtaataacctctctcttgtctaagtttagaatctccagtgttatatcagtcgactttttcccacatttatattgttctggcgctattcctgtgccaacaatttgcacgagccggtagatgtcttgcctttgacctgttccagatattcttattctcacaaatgacccaagaactttctcatcaaatgtgtcaacttcactgatcaattcttctaacaggttgcgacgcaggtacattaaactgatgttatggttatctattgctgcgtagtcgtcaaggtttgtttgcagagctttctggtcatacttgcgagattttttccttttttctgagctcatcaccattgatgcttcactgttgccatcagcatccagactaggatcagggtctacaacaccaccatggttgtcatcaatttcaactggcgagacctcgctcatgaggaaatgggattcaagaagcttcagcatctcaaaatgaccaacacgtgctttcccaaaaaggcttttgagcatagaatcacaaattatctgacttttcctgcgaggatcccggaggttttcacgtttaatataatcaagtaaaagggattggacttcaaattgggacagcacagatttgtcaccatttttcatatttgctacaaaatccaagagctccttcgaagcccaactggtctcttcagctgacgatgtagatgtccctacgctttcagattctcttggtcgatggtcactgctcaaagcacgcttggacaattttctaacctttctccctgtagaacttttagtatcacggccacctgtcaggcctcgctttgtagatttcctagtgctatctttaactacagaactgtcatcgttagcagcttgctttgatcgcttccttcctttcctctttgaattgccttctagatggcgcacagatgagctgtctgaattaccctcttcttcatcatttgtatcatgtggttcactgagatcattgtcacgaataaccaaagaagaaccattcttttgagacttggctgctgatatttcttcaaacgtcaatggtaattttgttttcaaattcaaccaataatccttgaacaaataccaccagcttgttttgtcgtcaaaatctacatccggcatcccactatcacaattccaacgacccttcgatttgaagaactcgtcatcccgattaacacaagaagggtggtaagccttaggacaacccctacgatcacacacaacaaggtcaccaccatcaaagcaaatgaagcaaacttcctcatcatccttcttcctaacaggtggtttcaccacaacctgagccttggaagatgcacgacctcgcttccggcgccccccgcctttccttgtcaatggtggaggcacgtcatcatcatcctcgtcctcatctatctgcactgcatcttcttcagggatatcctcaccaactgtgtcagccacagcttcttctgaaacaccatcatcatcttcaacaacattttcatcagccttgccatcttcatcttcagctccagttgtggtaaccgcatccatctgcatgccctcctcatctgcactattgttaccagctggggcagcttctttttccgccttatcatctccagtcaggcctatagtttccagttcttctgtaccatcaacagcatattcaacaacattttgagcagcctcatcatcttcttcaccctcacctctagttgtgtttagcacattcatctgaatgccctcttcatctgcgccatcatcaccagctgcagcagcctcattttccgcactattatctctactaatggcaactacattcacttccggaacaccatcagcattgtcagccttgccattttccacatccttatctccggcggtaatgaccccatccatcttcaagtcctcatcatctgcaccaccagcagctgcggcagcagcctcatttgccacattgtcatcaccagacaggccaactgtacccaatcgcatgtcttcatctgtctcatcaagaccagctgcaccaaccacttcctcgttgcgatcactggagctggaaactgcatccaccttcctgccctcgtcatctgtggccgcatcacaggctattgtaaccatttccttaatgtcctctcccggttggacaagtatatccatccctgtgccttcctccgagacactatcactagctttgacaagatctatgctcgcatcattcagcacagttgaggaaactacatctataagcgccccctcatcctgcgcattcttgtccgtctgaggaccatcatcaaagctagccacacctccaacggggagcgtattcataacatcatcaatcaaggaagcacccccctcatccacagcggcactagtatcatccaaacgcacctgaacacgagcatcttcctcaggctcattaccttcattgcaagcaccgccgccgctagtatcctgaccatcttgctcaacaaagctatcgccatcgccacctaatacggacaccatagccgtaccatcgtcaatctgcgaagcacgcacctccgtgggatcatccactgcaaccctagtttcatccaagtgcactccagcaccaccaccttcttccttggtctcatcagccttgccaacatcagccaaaccagggtcttccgcaactcccacagtctcttcttcagctatatggtccat

SEQ ID NO: 22077 - DNA, 1600 bp, Oryza sativa
  Clone ID: TF_OsC15358_2
atgggggagccgccccctgccggagaggggagcggcatgatgatgccggccaagcgccgccgcgagcgggtgttaccgtcgcggttcaaggactcggtgctggtgctcccgacggccgccgcgaagaagggcaagcccgcggaggccgcggcggaggggggagttgtggacggggagctctacgacgtggagctggaagaaggggatcccggcatgctgtggaccggcgacgagcggccggtgcagacggaggaggagctgtactgggcgtgcaggaacatcaggagaagcagcacctccacctccggtagcttcagcagcagcatcttcagcggtagcagcgcggtgacgtccttgagcaatgccggcggcggcggggggaatgggcggccggaggggaagcccacggtggtggtggagtgcaagccgaagagcgatggcggcgagaggaaagaggatttctactggccggaggaattcgtgctcggggatgttgtgtgggcgaggtcggggaagaagtgcccggcatggcctgcgctggtgattgatccactgcttcatgcgccaagggtcgtcttgaactcctgcatcccgggtgcactctgcgtcatgttcttcggatactctaatagcggcctcagggactatggatgggttaagcaagggttgatctttccctttgtggagtacctagataggtttaagggccaaactttatataagatcaaggcaagcagattccgtgaagcaattgaggaggctttccttgctgagcgtggcctttttgagctcgaaacggatgaggggtgctcactagagaagtctgtcaatgaccagtccatccctgacgggttactggaagggtctggttctaataatgagcaggaatgccaatcggaggctcaggttgttggcaaatcacctggatgtgatatttgcggtaatcgtcttccatgcaagatagcaagcaaaaagaagcaagcgggagaacgattactctgtaggcactgtgataagctattacagtcaaagcagtactgtggcatatgcaagaaaatttggcaccatacagatggtggaaattgggtttgttgtgatgagtgtcaaatttgggttcatgtagaatgtgaccagacatgcatcaagatggaggacttggaaaatgctgattatttctgtccggattgcaaatcaaaacgcaagaatatctccagttgaacaaatgaacacccctaacagttcagagtgagttaatttccttgaaagtctgttgaaactgtgatagttggaactaatatttgtcatttgtgcagacatgtagtatgtagggactagtgagggtggtacactggtactgaaactgtattgtgatatggtcaaacgggttctggtgccgtcatgttgttttgttagacgtgctttagaaaatagcattgtccataaactgtaatcactattttctctgtgacaatgtgacctaccaactagaaagcctgtactaggatccctatccgcaatgtagtatccacaaaggcacaaaccagcgtgtatgttgtacataaaccatgcatgcatatatgttgtaaatattaattatttg

SEQ ID NO: 22078 - DNA, 423 bp, Oryza sativa
  unsure (1)..(423): unsure at all n locations
  Clone ID: TF_uC-osflM202123g09a1
gcatgcacgcttacttatttttggaaccttccgtgcgcccgcccttaatttttntttgtttttttaaaaaactaccctcataaacgccgagacagcatctctgccactgataaaaactttacaacggacgaaaataaacacaccgtttattctgttcaataaaacagggtgaaagcagaaaaaaaaggcagaaaaatcacctttttcgcttggatactctcgatttgctagctacgcgtgacgcagatttcttcgtcgctttgggcatttcgcactgggggcacagccagtcatgttctgggacagcttccaggggagggtcgcagcagtcgatgtgcatacctacaccgcagccggtcgagccatcctcgttgccgcagatgagcatcacctcgccccggtccgtactcccgcacgccgagc

SEQ ID NO: 22079 - DNA, 2213 bp, Oryza sativa
  Clone ID: TF_OsC10999_1
tgatttaactactaaggactgcagaaccgcgggagggttactatacaattagggtggcgagaacaagactaactccaaccatattaatggataacaggccctctaccaattacggaaaaccaagcgtcctggcaacactcagaagaaacacactgatcctgatgctattatgaatacagctgcacctgggattttacctacctcacgaaatgcaccagttagaaaagtggcagaatgtgatgtactatctgccaaacaagagtctgttcctgttgcagtgcctgccaagcaagaggttcatagtcccaaacaagagagtatcccaaaattcaatactggatcttcaagagttagccagttgatttctgtgcaacaagcaaatgattcgtcaccaaacagtaaagtctctgcagatgctaatattggcagttttgatctggcaaagttttccaagaaaaatgctcttccctgtgatatctgcatgcgatctgagactgtactgaaccggatatttgtctgctccagctgcaaggctgctgtgcatttggattgctaccggagtgtgacgaatcccacaggtccctggaagtgtgaactttgccaagagatgccatcagatgttgtcgctggcagtcaatcagattgcgacggttcaaaaccatgcttgttgcagtgcgatttgtgccatggaacatctggtgcttttagaaaaacaataaaggggcgatgtattcatgccttttgtgctgagtggttgttggagagcacgttcacaaggggacaatataatgcagtagatgggatggagagccttcccaaggataaggatacatgcgctatctgccaccgcaatgttggctcatgcttgaagtgcagtactgtggactgtcaaattacttttcatcctacgtgcgctagagatgctggtttttacatggatacaaaaacaattggtagtacgttggaacataaagcatattgtggcaagcatggcattgagcaaagaaaggctgacttactacaattacatggacctggggaggtcaagaatatgaaacagatgagggttgacttggaagtattacgccttatttgtgagagagttgtgaaaagagaaaagttgaagaaagacttggttgtatgtggacatgatacacttgctgcaagaaggaattctattgcctattcaacccggacttcatattgtggatctggacctggagcaagttcagaatctgcaacaacttctgtcaataactcatatagtgggttaatgcaaagaacagatgatgtcgcggttgacagtattatttccaggaaacctactgttaggttttctctcaataacagcgatgctgataggaacacagctgacagttcaacatcgtcaatatcgtacaagcagaagctggatgaccgggaatcacttgctgataagaatcttccgaagaaaccagctactgccatgcagatatcagaagagggtgagacaaaatcatcggataaaaagaaccaacgccctccaaagagtatcgtctatactcgacgtagcgccttgtccaaaaagaggcaattgagtcagaatgtagaaggacctggtggatagaagccaaccaaggtggctccttcgtggatagccagagtgtttgaagcattctccatgtggaaagcacatgcagccagcggagctggccagtgtaaccatgatattgccataggggcacggtcggccaaggttgtaaatttacaaacggcgcagatgggagttcttcaaagtgtgacttgagcttccgaccagaatattcgagtatttgacccctcaaggctcaagctcacatcactcagacgaggggtgacatggcagaattcatccactgatttagctactagatgctaatctgtgagatatgctttgtacaattgttagtttagttctgtaaaagaaaacaagcaattgccattagtggatgattaaagagaagcgaggaaagtcttgttaggctgacatctgtagctgacagtttcccagtagctaaccagaacatgagtgaattaagcacatgtaggttcaaatgtgctatgacgattacctgttgcgttgatgtatggctacatttgttgtgacttgtaatgaatccatgccagagtttttgaaagaaaaaaaaaaaaaaaatgctgcttcaaaaaaaaaaaaaaaaaaaaaaaaaaaaaaa

SEQ ID NO: 22080 - DNA, 2064 bp, Oryza sativa; identical to SEQ ID NO: 12650
  Clone ID: TF_OsC305349_1

SEQ ID NO: 22081 - DNA, 771 bp, Oryza sativa; identical to SEQ ID NO: 12653
  Clone ID: TF_OsC349609_1

SEQ ID NO: 22082 - DNA, 2756 bp, Oryza sativa
  Clone ID: TF_OsC17337_1
gttgggttttgagatcgaaaatttttgagatttcaaacctcctccattccctcccttcctcgcccccaaaaaccctagccgccgccgccgccatgcctgatctcccctgcgacggcgatggcgtctgcatggtctgccgcgtcgcctcccctcccgaggtcgatctcctccgttgctccacctgcgccaccccgtggcactccccctgcctctccaagccccccgcccttgccgacgccgcccaatggagttgccccgactgctccggggactccaccgacgccccgcccccggccccggcaccgctcgcccctgggagtgccggccaactcgtcgccgccatccgcgccatcgagtgcgacgccaccctctccgaccaggaaaaggcacgccgccgccaggagcttctcggcggcgccgcgcccgccggtgccgacgccgatgatgacgagggggacgacgtcctcgaggtcatcggcaagaacttcagctgcgccttctgcatgaagctgcccgaacgccccgtcaccgtcagtactcttgcggggcctttcccccattgcttccagaaatggatccacagcggaaaaaggacatgtggtaaatgccgggcacaaataccagcaaaaatggcagagcagccaagaatcaactcagcattagtttctgttatccgtatggctaaggtttcaaagaatgccaactcagctgtctctgcagctgcgtatcattacatacgaaatgatgatagacctgacaaggcttttacaactgaaagggctaagagggctggaaaagctaatgcttcaagtggccagatctttgttactatcccacccgaccattttggccccattcttgcagagaatgaccccaagagaagcattggtgttctagttggggatacatgggaagacagacttgagtgcaggcaatggggtgcccattttcctcacgtggctggtattgctggccaatccacacatggtgctcagtcggtagccctctcgggtgggtatgtcgatgatgaggaccatggggaatggtttctatatactggaagtggtggaagagatctaagtgggaacaagcgtacaaacaaggagcagtcctcagaccagaaatttgagaagctgaatgctgctcttcgtattagttgcctcaagggttaccctgtcagggttgtgcggtcccacaaagagaagcgttcttcatatgctcctgaagctggtgtgaggtatgatggagtttacaggattgaaaaatgttggaggaagattagtgttcagggtaaattcaaggtttgcagtgatatttatggtgaccgtccgaggccactccccaaagttgatgagctgaaaggtgcaacagacatatcagagaggaaaggaactccttcatgggactttgatgagaaagaaggctggaagtgggtgaagcctccaccaatcagcagaaagcctaacctatcaggggatcctgcaactgacaaggaaatccggagggttgcaaggcgtgcccagatgtctgtgactgaaaggctgctgaaagagtttggatgttccatttgcaagcaagtgatgaaggaaccactcactactccatgtgctcataacttctgcaagttgtgtttggttgggacatatggtagtcaatcgtctatgagggagagaagccggggtgggcggactctaagggcacagaagattgtgaagaagtgcccttcatgtccaactgatatttgtgacttcctagagaatccacagatcaatcgagagatgatggatttgattgagtccttgcaaagaaaggctgttgaagaaggagataccaagacaagctcagatgttagcaatggtgctgagtcatctggagatgatggaaacaacgaagctttagagaagggagaggatgatagcagcttgaaggatgatggcagcttgaaggatgatggcaaagtggtcaaggctgtggttgtaatcaaggaagaggacctgcagcctaagaagagcaaaggagaagatgagaaagaacaaggtgacaagaagatggacagtgctgatgtggtggacattgcagttgaaaagaaacaggcgacgaagcgggcttctgagaaggctgagaagaagcaggcaaggaagcgcaagggggatgctgttgccacaaatgatggtaaaaggatgaaaacaggtggtgatgctatggagacagcagcggaagaggatgctcccctgagcggcggaactcctgtgaagcgcaacagcaggaagagtagtgaggttgatgccaaaggcggtggcggtagtcctgttgtgagcagccctcgcagggtgacgaggagcaatgccaaggctagcggtgaagctgatggtagccctgcgacaaggaccaggagggctacccgcgctgaagcctgaatgaagatggatgaatggctggttggctggctgtagaggggaagaagacggagactggagccattttggggtcgtattcgtatattctatctatttagtaatttaggccgtttgccttgtgctgttgctctagctcttttgatccacaaggggtgaactggaactgccgcggtgtgcttttgggatggcttgggttgggttgttagttgaaggaatatatacttatatacagtggttgctttacctttacctgtatggatgtatgatggatgttcctcatacaactttccaattccaattactggcatggtttgccttggattctcatgctaaaaacaa

SEQ ID NO: 22083 - DNA, 2466 bp, Oryza sativa; identical to SEQ ID NO: 12654
  Clone ID: TF_OsC297803_1

SEQ ID NO: 22084 - DNA, 4957 bp, Oryza sativa
  Clone ID: TF_OsC18633_1
aagcagggaaaaaacttgcatttatcaaacttcacattctgatctatcctttatgtcataccagttcgtttgggaactaaaacaccataatcacacaaaatgcagaagcctaataccatcaccagaccagcatctttagcaacaaccagatgcatagaacagtgaaataaaccaaaggtttccataatttaacagctataccatactactaccctgtctaaaccccataaagtaaaacacagcacaaaactgtacactcaaatatctagagaagcaatgaagtgttcatgccaggtttctctggcagaaactgcttcatctcaagagcctggttgctagtcactacaccagggagcccaagagacagagacagcggtccatcatctcctgtatcagaaccggtaagattatgcttctttgaggccatagaaagggacagtgacagtagaggagaagggccctcttcttccttcagtgatgtcttattcagattattacgaggttctggggagtcttcatcatctgaagataggacatggatcacatgatccaagattggtttagttggagaacagggatctgctggaaccctaccaatatattgcacatcatctaatgaagtatgctgatcagctggcaagggtatcttggacaagcatttgctagtcagttgaccatctccaaaactgcaagtagagtattttccctcagaggtcttttgccgtttgtagatggaactagaatcaggcaaaacaaagtcctttaaaactgaatcacttggatcatcagaaagctttggcctgacagaatgctgtggggatacttcttgaaaggatacgcgtgcctgtgtatttgccaatatctcatcagatactgatctggtggttgcacctgtatgctgcttagtaaagcatggaactccattcttggtaaagctctcttcctcctccatgttgtccctgcccgctgttccttcgctacctattatatcacttggatattctggtttaatgttgaggcattcacgttttgaacttgtgtgaacatgaactccatagggaactgcagtaggagttcctaacaaaattttcccagtccctgcagtttctgggaaatgtatttcacataaattcagcctttcagcctcatggttggacctcaacaaagtctcatggtttacagatgcaccacgattctccatctccgtttgaactgatacagctggatcatacaattcatcaacagggcactcattcaaatctatgcccaaagactgaggcatcttaggggaacagacaagttgattaacaggtccattaatttgttctaatggactatgattcatccctttgacaagcagctcagttgaactacttgcctttctggcataaaggacaccccaaaagaaaagtaagccattccaccgttgagtcctctcaggcagcttatcagacgtaaaaatgagaagttcaatgccacaaatatttgctgtgagggacaaatctccagcaagcatgttttccaacagtttcccatatgctctttcataactttcaacatctttagcaaagaaataaagagcaatgttatcttcattcggctttacttccttaaattgcagtggccatgaggaatgccgtggaacttctaccaactgaattctctgaggtaattgtttcactatttcaagtactttcagcgatgcacaggtagataagtgagcctgaaacccatcgtacatttcaggagagcttccaggtcttgaaacctcaaaggtaccttgccagatgtaagactgctctggaataactaaagcccccaaagaacttccaacagtagaagattgatcaaccaaagcttgctgctttaagttcaggtcattcgatttagtgtcagggctgtacggattttgtgccactagacagccttgtgggctctccggcaaaaggtcttcggaagcctgaatcgccgctgcacttttacaggagatgttcccatcactttccacaactttctgttcatactgtacctcttctggaggcaaatcttctgaggaacttgttggcgcaatatcttggaaatcagatccacaagtctttgaagcacgtggaatggaaagcacctcaggtttagttgacatttcattatcgttattcaccaaaattagtggactttcacatgcaccatctgtgctatcattttttattttatccattgggattagtggatctgatgccttcaccacacaggtgtctttagaacaaacaactcctgttgaagtaatcccttgctcatcacttttagataaaatggagctatgcttattttcaacaattcctggttttttgctacttttaagtatgcttggtccaggcctcgggctgtcttggtcatttcttggatcccctgattttattgaactatcaggccttggagatgaagaaatgtttggtttttgaagattaaatgaagcccccctttctaacaaaattgttggtttcacgggcttcaatattctcggttgttcattttgagatgaatgaactgattgcttttgctttgatgaacttgagcctttgcaaattgaagcctcatgcttaagaggcccagatttcataactttccggatggactctctaggatctcttggtgaatgttttgaaggcttcaacttgctcaacacaggttcagctaattgcttgacctttggttcattactggagttgttgaaagatggttgctttgataaaaggcctcgtggtgaaggacctggtgttttaacatttgccaagttccccaaggaatatgaccgaggtaaggtcacggaactattaactgcttgagacctcattggagcattatcaggcgactttatacttcctttgttagagcttttaaatgagttctccctggagaacacatcatgattcctagggctgtccgccttcaggagcctgggagtagaggataaagtattttctgcatatctcttgcatgatttaggtggactccgtacaccatcatttgatagaggtgattccatatcagtggcaactcgcaacttcttacgttttaacaacacttctgaactttgactcctcttgtctaagctttgattcttcttatccaagcttccagacgttggtgtcctacaagaggattgtcgtgcttccaagctagatgtaacaacttgcaacttcttgcgatttcccataattcctgaatttttgttcttcacatccagtctttcagcagttggggtggcacacttcacttgccgtgcttccagatcagatgacgcaagatgcaacttttgattgctaccagccaagggatcatttactggagtgccacaagtgatttgttgactgtccaaatcagtcacaacaaccttcaatgtcttagagttgtttgtactttctgaattttggttcttcccgtccaaaaccttattccttgatgtgccaccgttgcttcttgtttggttttcatcttctttaagacagcattcttcgcataaccattcaccatctggaactttctctaacttcactcgcatgcaataagtatgctctgccccttcaaggcacctagtgcatgtagccagaagatattcccttccaacatctccacatatatcacaaacattaacatctattaagccctctgaattcccagagtccgtcatcacatcattctgtgtattcaactttctaccactacctgtatccattgaacaaccttgattacgttcttgtttatcattgtcattcctattgacagcatcattagattggatgtcagcatgttctagacttccatttcttgagcatgaggtgccattttccagattctttgttaaagatccagccttgattttatccctattactggtaccacaactagtcatcatgctgtgcctctcaccaccaagcacagaaggatctgattttcctcccagtgaacgctctacggtcttgtttgaagaagctttctcacaaggttggtgagctaaattattttgtgcattcccaaattcatgtgttggtctcttaggagataatccatgtgatgcactgagagaggattgggtacgcagcaacctcttggttgcaaaaggagactcggcaggcaatgatctatcagatgaacttcggtgcatggcatgaacatcagatctcttctttcctgtagattcttcggcgcagtagtttcttagtctgttaatgccattgtccttatagttaacagtaaggtcacgacttgatgctgatgtagatagtttatcctttttcttgtctaacagaagcttgcttgctgctgatactccagtaacacatgagttgctatcatcatggcattctactataggtgatctagaaccgtgatttactagccttctacgttttgctggcttgtcaacctcggaatctgctgcaacagatgatcttgcgatgactttattttcaccattttcagaataggaagcagggcttgaagtagcactgaattcatcgtcattttctccccccttagccttggtacggagccctttatcaacacgaacaaacgaactgttttttgtttctgaccttgcaaagcatgtttgagatgatccacagtccatatttgaatccgtgagtgcaatatttcggtgtaggcacgaggagcaaggagcacaacagacattacaagtgccagattctgtcttcacattaggactgtcgagtggtactggtctttttcttgctgtaagcttgtcccttattgtagacagcattgtgggatcagaatcacctccaagcatctccatcttggcgaccacttcccgatgccccggcccctccacccgtcgtccactgccacgcccctccactgattcctcggggagcgcgagatccttgtgtcgcgtgcgatcgtagagatccctgacggtgcgctcctgcggcgccctcat

SEQ ID NO: 22085 - DNA, 772 bp, Oryza sativa
  unsure (1)..(772): unsure at all n locations
  Clone ID: TF_LIB4371-013-R1-K1-G11
atttggtgctgggcggggacgacggcaaggagtgcacctacggcggcggctacctcaagcgccaggccgtcttctcctgcctcacctgcgtgccagcgggtgtcgctggagtctgcaccgcctgcagcctcgcctgccacgacggccatgaggtcgttgaactatggacaaagcgaaagtttcgttgtgattgtggcaactcaaagtttggaagtcatgtttgcaaactttgccctgagaaagatccagagaatccagtgaattcttataaccataacttcaaagggtcctattgcacatgtggcaggccttatcctgatccagaagctgaaaagcaagttgaaatgatacaatgctgtatttgtgaggattggttccacgaggatcatattggtcttaactccattgaagagataccacgagatgaggaaggggagccactctacgaggatttcatatgccccaaatgctcacctaagtgctatttcttgaaattatatccggatactatttgggcatctaataagcagagttctgcaccacaagctgagactaccaattcaactgttatgaatggaaattcaagccttggtgacatagagaaaagtgaaaatggtgctcttataaatcatttgaattgtgaaaagacctctgacaatgagaattgcccaaaagacagtgtagctccagattaggccagtctggatgacagttctgatggcanatgtaagctaggaatgaacatttggtcaaatacaccatcagctgattc

SEQ ID NO: 22086 - DNA, 1813 bp, Oryza sativa
  Clone ID: TF_OsC3201_1
ctgcaggaattcggcacgagggtgtgtgtgtgtgtgaaccactctcggctctttggcttctgttgtttaaaggagcggcacaaagggttttttttttttgggtaatgtaaattaccacgtcacaaagttcttttgatttgatacaaaggagcaaacattttgttctgctgccctggagcatctaccagaagctcagttcggagcatttagcattactacctctgctaactacattagaagtcgagtacaagctaggtaacaggacacaatagccatgacatagcgaacgataaattcacgggggagtggccagaaaaactgctcgatcgaccggcagtgggatatattagtctcaaacagaaccccaagcagctgagtttcatgacaacctctgttttttcttcttagcaagattctcaaaaacagctcgtatatcttcagatgtgaccggttttgatgaatcaaaagtttccagaaaagactgaagctcattcttcatgtcattgatgccactcaaaatctcaatcttctgtacatggtcgagtgaattaagaaagtttgcttcaactccttcctgctgctccaacttcttttccctcttctgcttagcaaccttctcatactcctcaatagagtcttccttgtctataaggtacgcaacaccttgttgtgcatagaagtcggtgcaagtttcacatctacagataacctctctccagctttttgacataaaaaacggcatctttttctctgaatcagctgatggtgtatttgaacaaatgttcattcctagcttacatttgccatcagaactgtcatccagactggccttttctggagctacactgtcttttgggcaattctcattgtcagaggtcttttcacaattcaaatgatttataagagcaccattttcacttttctctatgtcaccaaggcttgaatttccattcataacagttgaattggtagtctcagcttgtggtgcagaactctgcttattagatgcccaaatagtatccggatataatttcaagaaatagcacttaggtgagcatttggggcatatgaaatcctcgtagagtggctccccttcctcatctcgtggtatctcttcaatggagttaagaccaatatgatcctcgtggaaccaatcctcacaaatacagcattgtatcatttcaacttgcttttcagcttctggatcaggataaggcctgccacatgtgcaataggaccctttgaagttatggttataagaattcactggattctctggatctttctcagggcaaagtttgcaaacatgacttccaaactttgagttgccacaatcacaacgaaactttcgctttgtccatagttcaacgacctttagcaaaaagaaccatccaagcatcagttgtgtgcgcatcacccagtcatatagatacttaatacagaagatggcaatagataatttggcaactgctaatgcaacgcctaaaataactcttgtagcgctcatccttctcacccatataaacattgacactaatcccagctcatggccgtcgtggcaggcgaggctgcaggcggtgcagactccagcgacacccgctggcacgcaggtgaggcaggagaagacggcctggcgcttgaggtagccgccgccgtaggtgcactccttgccgtcgtccccgcccagcaccaaatccgcctccagctcctcggcctcgatcccctcgatgtactccccgatggtgaccgtcggctccgcctcgtcctcgaaggcgcccgcaccgccctcgccgccgctcccctcgccggccat

SEQ ID NO: 22087 - DNA, 2695 bp, Oryza sativa
  Clone ID: TF_OsC340224_1
atgtcgtcgtcggcggcgccggcgaggaaagagaatggcaccgtcgccgcccccgccgcctcatccgccgccgccagcaacacgttccacgtgctcaactccggcagcgccgccgccgccgtcgcagccggacgtgcgtatgttcagtcgccgcgagcgacggcgctgcggtcgccgcaggtgcgagccatcaccaactacggcatgttcccgaccaccggcgcttcggcggcgaggacggccatggcggggcgaacgatcaatggtggcgcgtcgatgctgacgacgacgacgacgacgacgacgccaccgcacctgatccagcagctcatggtgttggctggctggaccacccggagtccgtggctccagaaccacgcgtccatgtcgccgcggggctcgccgtcgtcgttctcctccgggagattctccgacccccgtgggatgccgtcgacgttcgcttaccgaacacccggagctagtagcggccgcgttatcgacaacggcgccgtcgccggccgtggcaagcagatggccggaactagccgctcacttgagattatcgccgttgataccggcgccggaagcagcaagaacgcgtcgccggccggcggccatgcaaatgccggcgtggtggtgaaacgtttggcccctgtgctcgcgatgccgagtgccggagccgccggcaaagggaaggaggaggcggcggcggcggcggcggctccgtcgccaaatggccgcggccgtaagcgcgcgccgcccaaggtgagcaatgtgcccgcggccgggatccgacaagaagccgaggaagagggccaagaaggcggcggccgctggcagcaaggtgaccgtcccggctgacgtgatcatcgtcgacgacgacgtcaaccagccgagctcgaacaccgacgcgcaaagcaacgccgacgacgatctgaagaaggcggccgtcgcttcccctgcggcgacgcggagcaagaccagatcaaagtgcaagaccagcagcaacagcgccgccgcctcgccgagcgccaggtccagcgccatcgccgccaggaagaagaacaacgccacagcgaccggcacgacggcgacaccaccaccaccggaggcgaagaagcacaccgtgctgacctggctgatagacaccggcttcctcaaggacaaagcgaaggtgttctacgtgccgggcgacgccggcgccgccgagaaggtcatctccggcatggtcaccaagacgggaatccgctgccgctgctgcaacaccgtcgtccccgtggctgtgttcgaaacccacgccaggtgcgagcggccagggcagccatgggagaagctgctgctcatgtccgggaagccgctgtcgaagtgcatgcaggaggcgtgggcgcaggagcgggtgaccgccatgcgcgcccgggagaaggccatggcgtcgctggagcaggagaaggagaagagctcgcaggccaagaggaagctcgcgaagacgaagaagatgcagctcctcgacggcgtcgtcgtcgtctccacctcttctcctcgtcatcaggtgaagaagaacggcggcggcaaggattgcagcgacgacgcctgcggcgtctgcgccgacggcggccagctgctctgctgcgacacctgcccctccaccttccatccagattgcctcgccatccagttcatgatcaaatcttggttactgtttgacagacagcaactgacaacaatttacggccagcaaccgtggctccagacggctcctggagctgccatttctgccgatcatcagtactgccgtcctttgcaaagccctgggttcgagatcggcgcatactgcagcgaaacctgcaaaaagatgtcctctcatctatcagatatgataggagtcatgaaccatactgaagatggcttttcttgggccctcctgaagattcagaaggatgagctagtcacttctgaggacatgcctgtcattcttgagagcaatgtgaagcttgcagtagctctgggtgtactcaatgaatgctttaatcctgtgcaagatcgaaggactaagatcgatatgctccaccaagctgtctacagtctaggatcagagttcaaacgagtaaactatgagggattctacaccatggttcttgagaaggatggagaaatcatttcagtagccttgctgaggttccatggcaggaaactggctgagatgcctttcgcaggcacgctgccagcttaccagaaacaaggaatgatgcgtcgccttgtcaaggctgttgaaaaggtgttggcgtcgttgcaagtggaaaatctagtgatcccggccgtcgctgatctagtggaaacctggaagagatccttctccttcaggccaatgcaggcagaggtcagggacgaagccaagaagctgagcttggtcgccatcaccgggacgacgctgctgcagaaacccatctctgctcatcagcagcaaccagttccatcccggaaaggtagcagcagcagcagaagcaagcgcgcgtctgctccggcgacggtcaccggcagcagcaaggaagaggaggagcagatgacgacgacggcggctcgcctgaccgacgacgagctggcattcctggagatggcacccttgtgcagcttcaccgacctgttggccggaggcgtctacccgacgggtctccagcttctccgcggcatgaagtga

SEQ ID NO: 22088 - DNA, 595 bp, Oryza sativa
  Clone ID: TF_OsC3802_4
ggcagcaacagcatcatcatgcggcattcacttatcaataaacaggtcacagaactcagggacacccaaattatgaaactacagttaagctatcatcaacatcatccacgctgggaacgttttcctgtaccaggcaaaaagctaaaacacgctgacactcatccagtccacactggctacaactgaacgagccaacagcatcaatgaagttcgttcttttgcctagactgatggaaacgttcccaaattcgggcaaatgataagttaacgcgatcttggacctagcctagctcttcatctgcactgtacaccctccacgttttgactttgcaccagcaatgaagagctgacgccataaacagtgcatctcctcaccacggatggctcgtgtcacagcaattacctcttccgcttttttggctcaaccttagaatcagaatttgatgatgctggatatgaatttgaaggtctcttcgtgccattttctttgacacaatctgcgcacaggaaatgatctaattttttggcctgctcaatggtcattcccatacaagatggatggaaccagtccttgcatccctcgcactgcaccatt

SEQ ID NO: 22089 - DNA, 4225 bp, Oryza sativa
  Clone ID: TF_OsC359_8462
atggatgtggattttcatcttgcaaaaaaaaaaaaaaagggcggccgccctttttttttttttttcacaaaaagaaacgagtatattatatctgatcacgatcatccttacaacctttctttgaaaatgtcaagacaacagaagtatatattgattacaattaccaaccaaaaatagggcgcctttacaacactggatgcactacattactaacactaaatgatccatttggttctagataagtaaaaaagagaaacaaggaatgaacaagcccttcaatgggcacccacacacgtttcactacataaatactgtgcatcacctttctactccatagcagatccattcctgcctgccttattgagacacaagtttgtacatgaacagcaatgccaacaccttctgttcagctcacccaattaaatttaccaccaaagcagtaataaagaatgctggacaatcaaacgcagtttggctgtacttggtggccgaagttcacaaggttgccgcagcctccggtttgcccaaatattgcagatatgaggctgagctaccaccatgggacaaaagcaaaacatcacctttcgtgtttctatctacacagaaccaagtgtgtattccttcagcacacaccgatggggggagttcccaactccctagttgcaatccaaaccacactcttccagaagtggaccatcattctttgctaagaaaggatcaatccggacccagaggagtgagaagattgaagccagaagaatggaccagacaataacaattgttggcgtcctgttttgccttccaaccaaacctttgaggaatgggtaaagatggacgatcacccaaaatgcaaagaagagcttcccgaagaggggtccccatgattcatacccgttattgattgcattcgaaacaccagcaacaaccccaatgaagttcaataagagtagagtggttggaggtatcagcaaggtagtccatttgaatgtatatagctctgagaactcttcatcgtccccaccttttgatgtcacagtgaaactcgtatctataccagctatgaccttcaaaagtccctggaacaaagcaaagaggtgcgaagagacccctccaatgacccaaaattgttcatttctccaccaatcatcaatgccaacaccactccatctcatttccaggatgccagtagcaaaaatgcagataaaaagtgacatgaaccagagactggcaacattcgtaagctctggagtgataaacttcccagttagcaaacagatggctggcaatgtacagtaagccaagagtggaatggatgtaaaaggatacacgatggaattaatgtaggaaaatctttccaaacattttagtccaccaccatatccataccaaagagggcaatggttgctgaagaatatttcaacagacccaagagcccaccgaagaacttggtgaagacgatcagaaagattgagtggtgcagaacctttgaatgcaggtagtttaggtatgcagtaaattgaccgccaaccatggcagtgcatcttaaaaccagttagaatatcttctgtaactgatccgtagatccagccaatctctttcccccagtctgtcttatcttcgtacccacagcttatgacatgaattgcttcctttagaagagatgctggactcgcacttttcaaggttccaccattctcaagaagtgtggatgcgacaaaaacagaagattggccaaatttcttttccagcttctgttgatttacaataccagccttttcattttcagctcctggagcaccctcctcaatttcaccaagtgcatatgcaggggattgattttctgctctcttgaagaaagatcttttcttcttctctgttttaggtttcgtagttttcttcttagtatgcctgttaccacaacagcagcagcagcaccatttaggccagcagttgcaggtcctcgacggaggcttcttcgttttgggggcatcataaccatagagagcttgccgtctgaagacacatccagtaccaacatagatggggccttgaattccatccagacctttcatgttgatatcgaaaaagacaacgttccggttagcatatcgatcatgtcggtcaataccatcaaacctctgagggaactgcacatagcacactttcttccccaccaaaggatccatcatgaaacacatcgcttcccttatggccttgctattgttgatgtagtgatcacaatccaagttcaataggtatggagcattcgaaagaacagcagatactcggaccaatgcgttcatggcaccagccttcttgtgatggttatagcctggccttttttctcttgaaacatacaccaatcgaggtagctcattaccttcgatgtcatggccgccactttggccaaggaagacctgaatcattccagggtgatcgcgaacattgtttccaggccagggagttccatcttgcattgtccaaccttcctcgggaactttctgagctttagcaaccaatgcattgattctcaccttgaattcctcatactctctcttcattgctctcctctccctaacaaagtatggtgccaccttatccttcaggtagtctatcttctgttggaagtaccactctggagcacgtggttcaatactgtactttttgcagaaaggaacccatttctttgcaaattcagatgtttcggataatgcttcaaatgtcagcattgcagcaccatcatcagagacatagcatgaaaccttatcaactggataatctaccgcgaggatagatagaacagtgtttgctgtgaccaaaggaggttccttcaagggatcaacagtactgacaaagaaatcgattggtgcaagttgagatgtttggccttccttgtcaaacctcaatgtcaatcgatcaaggtaagtctctctctcgataggaaaccacttggggaattgatcaagaatccaagacatggcaaaccagatttcacaaattacagatatcagccataaggcaaaagcatcaggcactggatgcatcactcgatagtggaagaaaaaccccaaaaccaccagccgaattatgataaccattctataggggttaatctgacttgaaggaattgggacttttctggacaatggctgcctagcttcatccatttttgtccagccaaagtgataaagcaattctacaggggagaaaatcagtggtagatctccatcatcaccatcgccatcccagtctttaccaccaccatcatttctcatctggtgcagcctctcctgcttctgcttccagctctccatcctctccttccacgcaacactaccataaccgtatgcagcaagatccttggatgggtccatagatcttggttgaactgtagcacaactacctttagctgattcaggtagattgggatccgcataaggaagcgggtggatcctctttcccccgccgcccataaaagatggcacaagcgcatgctgctccggcgggatgtcatcaaccatctgcccatcggtaaggaggggaacattggggttgggctggaatggctgcggaacaccgttgacgtcgaccccaccacggccatagctcatatgggcgtggagcatcgactccgcgacgtactgcgagtcattcctgtccctccagttgaactcgttctccaggtcatccacaccgtcctcctcctcgtccccgggcacacgagcgcaaccaattcggcattgcgggtgtgacttgcccctgaggcgcttgaagcgggtcttgcactgggggcagttctgcgtgccctcgcggcgctcgtactcgtagcagtcgcggcacaccgggaaggcgcactcgttgcacgccacgaacggctcgccgtcggggttgagccccacgtcgtcgccgcaaatctggcacacctgcccgttctgctgccggagcggcttcggcccgggatcgccgtcgcggcggatgacgacgagctcgttgcggttgtgggagccggcgaccagaccggcgctcgcctccatcgcccctcctcctcctcccccccgctaatcaaccacgcacaccctcaccctcgccctcttcctcctacgccgcccgccgaccgctcctcgccctacaaccagatctccatctctctctctccctccgaatctcccggggattccgcgccctggcaaatgcgcctcccccgcgacggagcagagaagagcgg

SEQ ID NO: 22090 - DNA, 5202 bp, Oryza sativa
  Clone ID: TF_OsC187381_1
atggggaggaggaaatcgcggccggcccgggcggtaggcctaggccccggcgctgccgctgccgcggagcccgacgcgccgagccctagcggcagcggcggcgcctccaaatcgaggcgcgcggcgaagggcgaggctaggaggagagaggatgtgtgcttcgaggtggatgatagcacgtggtgtttgagcgacggcgaccgccgggacctcgcggagttggtcatgcgcgacgtgaggatctccggcgagggagagggggcgttggacgtagcggctctgcacgaggcagagagggagaagaggtgctcgttgcgcctgcgggtgcgcgacgcgccggaggagggtttccggcttggccagtggcctgtggtaccttcagattgtgtgatcctggagtatgccatcgccggtatggttttctctggatgttttgatggtcccgatgaaggtgtatcaggcctcgcccatttggttagattgagattcgtgacattgcgtgttcatgcctttgctgtatctcggtctgctgattccgtgtcggttgcatcatttagagttagattggggttgatggagcaggcttttgctacatgcgaatcattgttggaggtgacaaggcatccgtggaggaagagtttcatgaatatgatggcttgggttcgtcctgaggtcatgacctcggctgcaatatatgggatggatggtcttgcccggcctataaatggaggtgctaatggtgattttaccccaaagaaggattctcagtttgatcttgctgctttctacgaagccgttaagccctcaatggaggctggactgttggaagaggagcttcccgatttgcttcctcatctcagaacctatcaacttcgtgcagcgaattggatggttcaacgtgaaaagggaaacacaatgatttcatcaccaaatcaacattatgttcattctgcaccttattgtgttcccatagattttatgcacaagaaatctaggatgttctacaatccattcaatggaaatgtctcgatgcatccagaaccttctccaccttatgtctctgggggcattttggctgatgaaatgggcttagggaaaactgttgagcttttggcttgcatttttgcacatcgcaggccatattcagcagactgttctgtctcttcgaatataaaaggagcagatcagataaagaggcataaaagagaaagagttgagtgcatttgtggagctgcaagtgtaacctctgcataccaggggatatggatccagtgtgacatatgtgacgcttggcaacacgctagttgtgttggttactcaccaaaggaggaaatgcatgttgatgatgatgatggtgatgaagcatcaaacaatgaaaaaggaaccctaaagtcaaaaaatagaaggaagaagaaagacagacacacaagaccaggatctctgaaagtttgcatttatgaaggtgcaaagaacacggacttaacatctacccaaaaaagtgatatggctgagataagcacagctgacattgttttgacaacttatgatgtcctgaaagaagatctatcacatgattctgatcggcatgatggtgatcgccgttttttgagatatcaaaagaggtaccctgtcactccaactgtcctaacaagggtccactggtggcggctatgtttggatgaagctcagatggtagagtccagcaaaacttctgtgactgagatggcaatgaggctaaatgctcaacaccgctggtgtatcacgggaactccaatacaacgccggcttgatgatctttttgggcttcttcgctttctcaaaactcatccttttgacacatatagatggtgggtggatattattagggacccatatgagaagggggacatggtagctatgaattatgcacacaagttcttcaaggaaatcatgtggcgctcctctaaaattcatgtttcacgggagttacagctgcctccacaagaagagtgcttttcgtggctcatcttttcatcaattgaagaatatttctatcagaagcagcatgccacttgcatggaccatgcacatgaaattataagacgtatcagagatgatgccaacaaaagcgagccaatatcagactcgaatgttgtatcaaatttgtacctctccaatgatgacattgccaaactcctagtcccactgctcaaacttcgacaagcttgttgccacccgcaagtggggagtttcggtctctgctccctgcagcgtactcctttatcaatgggtgaaattttacaggttcttattgggaaagcaaaagtcgaaggggaggaagagctcaggaaaattgttgtcgccctgaatggtcttgctggacttgctgtcattgaacaaaataatcaagaggccatctctctgtataaagaagcactagctttggcctgtgaaaattttgatgatttccgtgttgaccctttgttgaatcttcatatcaaccacaatcttgcggagctgctcagagctagttctgagtatttgcaagaatgcccactaaaagaacaaacctctgaagtccatggtgcgcgaaaaagaaaggaaactagtcccgctgactcagaaacatccaaggaagacaaaaacatcaatacacaagtatgtggaagtgaagagatggatgtagagaatgattctggatgccacacgtcatctgtctcaactctcagtatggagttacagaatcaaaatatgaattggtggctgtatgctttggattgcattgaacagaacaaggattctgctgatgagctcattaggaagattgatatttcttccaataaaagcaccactggcttgggttcaacagggatgtcttccagggttcaaaccattgctgggttgaagtataccattcaaactggtattgattctctgcaaagttcaaggcaacaagtgatggacagacttttagaacttgacaaaacaatggatagcccaaaggatgaagacattgagtgtcagcgatattgtccaaattgctatgatggtaatggttctttatgcatccaatgtgaattggatgatctgtttcaggggtatgaagcacgtctgtttcttgttaagaaatcaaataatgattctgttattgcctcagtagaggaagcaagggacttgcaaaggcgaaaatatgagttgaatcagttttttcgtaatactaaaactaacgagggatctgaacctggtgacgacaataagaatccaagatctgctcgagaaggttttctggtctacaggcatccttctcgaattgagacttccttaagggttattctaacccactcaaagacaataatgggagagcaatctgctaaaattgctaaaaagaatttgctgctttttgaggctatgcgcaaggagttctctcaagcaaggaatctatcaatagcacagacccagttactgcgtgcccatgatgagatcaagatgtctctctcacgcctgcagctcaaggagaaagatgatgaacccagtgcagtcaatattgttactagagaagagcttataccatacaatgtgcagtttacaagtgaaaaattcttgtctttgtcatctttagctcgtataagaggccaactcagatacttaaagggattggtgctatccaacaagaaaccactgggcaagcatggtgaatcactgcccgagtcaggcaacagtgttgctatagcaacttccatccctgccacagggcaaactgcttctgatattatcaatgaaccatgcccaatttgtcaggagaagatctttgaccagaaaatggttttccaatgtggccatttcgtttgctgcaagtgctgtctttacatgacagaacaagctgcagcccactttgggaggagcaaaaaatggattatgtgccctacttgccgtcaacgtacagatcttgaaaatgttgcttttgtagttgaaaaccagagaggaaatgctgatagagaaattgaggatttggcagaaagcgctatttctgtccaaggttcatatggaacaaagattgaagctgtgacaagaaggattttgaggatcacttcaactgacggagcagccaaaatacttgttttttcaagctggaatgatgttcttgatgtgctagagcactcccttgccgctaacaatatctcttatgttcggatgaaaggaggaagaaaatcgcaaacagcgcttgcccagttcaaaggtctggcaagtagtataagtggagagaaagcaaagaagtcattttccaagatgcaacctgctcaagtattgctaatgcttatccagcatggtgcaaatggtcttaatcttttggaagcacaacatgtaatattagtggagccgttgttaaaccctgcagctgaggcgcaagctatcagcaggatccatagagttgggcaagacaaaagcacgtttatccaccgttttattgtgaagaatactattgaagagagcatctacaaattaaacaggggcagagctgtttgctccacgatacaccgtaaatcaaaaaatttcaaagatgagcttgttttgacactgaaggatattgagtctttatttcctgtggcaacacttgatcagccttcagaacaggagaataagaattacggtggggccggtgggcatatgagaagtttacctccatctgttgcagctggcttagctgctgaaaggaggttattggagcaacatgacaaccagcattaagttatcagctgacttattctttcaactggaactcggagaggcaatgaaagaggttgaaataattgatgctgtagatattttagttaattggatttatcgattgccttcttagttctaaattatgttaaaattacagaaggtagggatatactatggtctggagcttctcggatcattatattagaatctggcatcagtgatagaatgtttaggacacccccgagcatcgggtatgtacttaaggagatgttgtgaaatttagttagttagcctgacagaagcatgtgtatcattgtataaaacccgccgtcttattttccttttgatttttgataggtaataaatatccttaacatgtgtacatgtttatgaacattgctttagtaaatgaaagatcagttcagatcatttttggtcaaaaaaaaaaaaaaaaaaactcgagactagttctccctcgtgccgattcctgcagcccgg

SEQ ID NO: 22091 - DNA, 3788 bp, Oryza sativa
  Clone ID: TF_OsC1163_1
cgcgatctaggcttgccgcgcgcgcgcggatctgcgagctgcgtagccgtttctcgctgtgagtggaggaggaggaggaagggaggaggatggcggcgaacgcggggatggtggcgggatcccgcaaccggaacgagttcgtcatgatccgccccgacggcgacgcgccaccgccggctaagccagggaagagtgtgaatggtcaggtctgccagatttgtggcgacactgttggcgtctcggccaccggcgacgtctttgttgcctgcaatgagtgcgccttcccggtctgccgcccttgctacgagtacgagcgcaaggaagggaaccagtgctgcccccagtgcaagactagatacaagaggcacaaaggtagccctagagttcagggcgatgaggaggaggaagatgttgatgacctggacaatgaattcaattataagcatggcaatggcaaaggtccagagtggcagatacagagacagggggaagatgttgacctgtcttcatcttctcgccacgaacaacatcggattccccgtctgacaagtgggcaacagatctcaggagagatccctgatgcttcccccgatcgccattctatccgcagcggaacatcaagctatgttgatccaagtgttccagttcctgtgaggattgtggacccctccaaggacttgaattcctatgggattaacagtgttgactggcaagaaagagttgccagctggaggaacaagcaggacaaaaatatgatgcaggtagctaataaatatccagaggcaagagggggagacatggaagggactggttcaaatggtgaagatatccaaatggttgatgatgcacgtctacctctgagccgcatagtgcctatcccttcaaaccagctcaacctttaccggattgttatcattctccgtcttatcatcctgatgttcttcttccaatatcgtgtcactcatccagtgcgggatgcttatggattgtggctagtatctgttatctgtgaaatttggtttgccttatcctggctcctagatcaattcccaaagtggtacccgataaaccgtgaaacataccttgacaggcttgcattgagatatgatagggagggagagccatcacagcttgctcccattgatgtctttgtcagtacggtggatccactaaaggaacctcctctgatcacagcaaacactgttttgtccattctggctgtggattaccctgttgacaaagtgtcatgctatgtttctgacgatggttcagctatgttaacttttgaggctctgtcagaaactgcagaatttgctaggaagtgggttccgttttgcaagaagcacaatattgaaccacgagctccagagttttactttgctcaaaaaatagattacctgaaggacaaaatccaaccttcctttgttaaagaaaggcgggcaatgaagagagagtatgaagaattcaaggtacggatcaatgctcttgttgcgaaggcacaaaaagtacctgaagaggggtggaccatggctgatggcactgcttggcctgggaataacccaagggatcaccctggcatgattcaggtgttcttggggcacagtggtgggcttgacactgatggtaacgagttgccacggcttgtctacgtctctcgtgaaaagaggccaggattccagcatcacaagaaggctggtgcaatgaatgcattgattcgtgtatctgctgtgctgacaaatggtgcctatcttctcaatgtggattgtgatcactacttcaacagtagcaaagctcttagagaagcaatgtgcttcatgatggatcccgcactaggaaggaaaacttgttatgttcagttcccacaaagatttgatggcattgacttgcacgatcgatacgctaatcgcaacatagtcttctttgatattaacatgaaaggtttagatggcattcagggtccagtttatgtgggaacaggttgctgcttcaataggcaggccttgtatggctatgatcctgtactaactgaggctgatttggaacctaacattgttgttaagagctgctgtggtggcagaaagaaaaagagcaagagctacatggatagcaaaaaccgtatgatgaagagaacagagtcttcagctcctatctttaacatggaagatatagaagagggcattgaaggttatgaagatgaaaggtcagtgctgatgtcccagaagagattagagaaacgttttggtcaatcgccaatttttattgcgtccaccttcatgactcaaggaggcataccaccctcaacgaacccagcatctctactgaaggaagccatccatgttatcagttgtggatatgaggacaaaactgaatggggaaaagagattggctggatctatggttcagttactgaggatattctgactggatttaaaatgcacgcaagaggttggatatcaatctattgcatgccaccacggccatgcttcaagggttctgcgccaatcaatctgtctgatcgtcttaaccaagtgctacgttgggctcttgggtctgttgagattctgcttagcagacattgtcctatctggtatggttacaatgggcgtttgaaacttctggagaggctggcttacattaacaccattgtttatccaattacatccattccacttatcgcctattgtgtgcttcctgctatctgtctcctcaccaacaaatttatcattcctgagattagcaattatgctgggatgttctttattctgcttttcgcctccattttcgcaactggtattctggagctccgatggagtggtgttggtatcgaggactggtggagaaatgaacagttctgggtcattggtggcacatctgcccatctcttcgctgtgttccagggtcttctgaaagtgttagcaggaattgataccaacttcactgttacctcaaaggcgtccgatgaggatggtgactttgctgagctatacgtgttcaagtggaccagtctcctcattcccccgaccaccgtgcttgtcatcaacctggtgggcatggtggcgggtatatcatatgccattaacagcggttaccaatcatggggtcctctctttggaaagctcttcttctccatctgggtgatcctccatctctaccccttcctcaagggtctcatgggcaggcagaaccgcactccgaccatcgtcatcgtctggtcgatcctcctcgcgtcgatcttctcccttctgtgggtcaagatcgatcctttcatttcgcctactcagaaagccgtcgccttggggcaatgcggtgtgaactgctgatcggcaccgttacgaagatgaacttcaatcaatcaaggtctacccccccttgtgtaaatacctgaggggggctagaatgggatcttctttttgtgtagatgaagaccttttttatctaagttatgccactgtttattagctacttcagtgctggcgctagctgctgatacgatggaactgtgaagccttattttgcctgcgaagaagccagcccagcagcgtaaattgtgaatttttttcttcttttgtgacacccgttattttagtcatttgtttgaggggtcgttgttacacatactatgggatgttatttatacggatatattccaattacattcttttgcggtgaacattttaattatattcgtagcatataatgtaaggcaactcagtatttcagctgttcacttgacaagttgcaacacatataaaaaaagagttgtttgttcaaaaaaaaaaaaaaaaaaa

SEQ ID NO: 22092 - DNA, 4021 bp, Oryza sativa
  Clone ID: TF_OsC71795_1
ttttgttttttttactagacagcgatattatattattatatatcactgggattgggggtacatatggtccatatggatgaagctacatatcacgaaactaattacagtcacacgcacgtaactgattcccaaaggctacaagaataaaacactggaacactagtcaaataagccgaacccgtaatattaagggcttgggatatcgcaactataagatcctccccagacggcccaagggaatggatccccgggccgccgctctcggctcgtgggtccccgggctccaggctctttttttttttttttttttttttggagtaaatatacacattcattgaatttggacttttgccacggcacagaaacactgaacaaaatgtgcctttgttcaatacaatcaagaaaaggaataataaaaaggaatgaaaatcctctatcctattaatctagctataataaggaactatacaggtatttacgggaacatgtcagattgcctacgtaaggtttttgctatgcctccatcgaaagtcgaaataggcgattcaagaaaatacgaggataaagttgatccccaaaccaccaccatctgcatgccttcatgcaaatactggggaaaccagcgaaactatgctgctattgccactactgtgccacttactatggtcaacaccagcttattgcatctctagcaacaaattgtattgtctaacaaaacttctacaagttcacatgaagctcatccagatatactaaggtctgtcatgcttctgtcagcaatatatgcctttatatccctgcatctgggagctgaacagtctgcattgtcacaaagcagtgagtgcgtgaacagcagtttccacatgaatacacacatatggcaacctcctccaccacgggcacgggtatgacatcgtacaccatggaagaacagtttctttaacgtcaaacaaagtttggaagtgcaacttcgatcaaaacatcttgatgcatgcaccaagccttcaaggtagtctctttcaaatgcatgcttttgttttgttgtagctgggtgcctgtccttcagaggggtattcagctcctcagcataacaacgttcacaaagaaagaagtttttgcagctggtgcaaacccaactactaccagatacaataggatggtggcaatgcttgcaaaattgcttatgcacaagtaaaatatcctcgaggtttcctttccggtcatcacgtttggcaacccgtagaagccttcctagttgagtttctttcttctgtgaggtgtcatcatctttcttttcaaggagcctctctgcttccccaggccagaaatcattatcacagtatggcaaccatgcagctgagatattggtcttgcattcattggtgggctgaaggaagaagtcatagagtgtattccgttccacaactaccccctccttaacagccttctttaccaaattctggtaccagctccgaagcttgtcagactttggcatcttctgtattgtaggatgacaatataaaacataatcgtcacgctttgtagatgggcaagtccatatggaacagcttacaaaccctcgtttcttgcagaaatccaagtagccaatcaaaatttcatgatacacaaaggtacggagagcttctccactggccgacttgatttccggtctgaagtacttgacagaatcaatatatgcaagataaacgtgcctttgatttggtgatgggcaggctgaaccatactcttgcacatacatggcgaacaggcatacatctacaccttcattcttttgaaacaagagaatggcctttgatttgtacggaaattccccaggatattgttcttttttaaaaaaatccttgaaacgtggttggacttgcagtgttctatcagctgaagataccactctaacagtaagaccttcaactcctggtacctcatcaacactttttccagaagcaattgccctctgttgccgctcctgcacaagccgctcagaaagcctttgctcaatatgatcacttagtctagttcttggtaactcgcgtgctcccagaatagtagatggctcaagtgaatcaacatcttcattatccttttccttcaagaaacattttgcacaagtatattcagcctctggatccacgattttggggttaaaaagtgcgcagatttgatgctgccaagctttgcacttatcgcactggacccaccattctgcctcagcatctgtctctgcatagctgaatctcttctgatatttggctttggcactactaagatggtggcatctgccacatattgaagatttgtcatttccattttccacttcaacataataggatcctgtagaattaattattttaaaacagagcgcgcaaaatcgtggagggggctcaaagaggagtctttccatcccacataaattgcatgtgttctgatcaggcaagccttcaactgatagcagctcttcagtcggcactttgctctgagaagtatcatggttcagagtacacaagtgatctttaagctcctcagaagttaatgcataaagtactgaggcccctcttctcttccttgccctcaggctgtcccctgacaatgtttggtccaataaatcaacctttgcatccttcatctcaatgtcactattttcacgacgaaattcttcttcagtttgtacagcactccccgacaatctgaccatatccattccatgtacattatcggtgcaagcaatgttgtcccccaaggaagtacaacatggtgattttgttggtgaattagtgacttcagattgtactgtttcagcagatgcataagtctcattggcagcaggttgttgttcctttgaagcctccatttcattgacatggacaagatggggaacatcaactttcaagcgttttgctggataatgcttgccagaagatccatctgaagcaggtgaagtcggctttgatacagtactatttgatgtctgttcagctctatccactgtcttgcttacagggctacaagcaccataattagtcatgaagccctgctgatgatgcataaagtggttgcttaaatttgagcttttctccctggagaaaccttcatgatcagaagtatgcccaagtttttctttcatttgaatgcatcgatcccgtttgtgctctccattgatgtacggatgaatttgagcatgatacaagtcacggtttccagtggtaatgtttgactgatctgattgctctagtgaccgactccacgtctcttgcttcatctcacattctatgtattgttgcaacaaaggtccctgaccggttgtgggatacaaacttttattgtttgtggaaaggttttgtccgttcactgttgagaaagaatccatcggaagtgttctcattgcactagaacatgttgtttgatcccacactgctgacaaagaactagaactcccagaggttgatggttgtgaactatcattttgatacgcatcacctgagaaatgttcttttatatggccaatatgcagtacatcaatactagggctacatttcggtagagttgatgcacatgaggtaaaaatggtgtttgctaatctttcaggcatctgcttgggtttatcagccaacgaatgagcaaagttagcagcacccatacagttttcatattggttatatctaccccgaaatgatgcagaattgacgatagcattcaacctggttcttaaagtttcaagatccatatacttaatctttgaatcagctttctcaaaaagatgtcggtcaatacattttccaatttccataagaaaggataggtcaaagttgcagaattccttccgctcatttaggtactctacaattttacggtgaataatattgcgaactacggatgtatcttgatccatattatccaactgaagaatttcagctgcagattgtgtccagccacttgtggggtattgctgggtaggaaatccacttgctgcatattgctgttgagtcccttgcagggtctttgccat

SEQ ID NO: 22093 - DNA, 3077 bp, Oryza sativa
  Clone ID: TF_OsC48275_1
gaacgtcaagtttaaagggacagagagataaacaataccatgcccaggcacgttggttactatttttgttccatgcaaaatcatgtacatctcctccaggaagttgtaaatcttcatattgtgatcgtgtacgggagttagtggttcatttgacggactgtcaaataaaggactgttcatatcgacactgtagggagtcaaagatggtatctgatcactataagaattgtattaacgagcattgtcatgtttgctgcaaagcaaaagaaatgttgcgtcgctcttctgaactggcacataaacagaatcctgctgaacctatacttattactcagcacaatatgaatcaaagaagtgccgatagggtacatggtgatagaatggacattgaccaggcagttgaaacctttgatgaccaaccaccagcagcaaagcgtccaaagttgcagcttgtgtctcccgatgcatctgagaatgtccctgtctgtcaaaaaaacccagggtttatgttgcaggaagcccatcctagacagcttgatcagaacaaaaagatggtccctgatcaagaggtagacgtggggcttgatatccgacatccacaagttactttagtcagctgtcatggtagtgatgagaaaattggtgctgcgcaaaatactgttattcctggtgctttaaacaagatacattgtcatgtccagcaagaaactgttgtggctgataaagagagtgtgactgttgttgatgttaagaaaaaaacaggctctgtggatgtcacgatctccaaaactgggaaaccaaaggtaaaaggtgtttcactcatggaattgtttactccagaacaaatacatgaacacatcaacagtctaaggcagtggattggtcagagtaaggctaaaagctgaaaagaatcaagtgataggatattctgaaagtgagagcttatgccagctttgcaaagttgaaaaccttacgtttgaacctcgaccaatatattgttctccttgtggtgctcggataaaacaaaatgcatcatattatactgggtctactgctatgggtcgcctttttttctgtatctcgtgttacaatgcatctctgggcaacacaattgaggtggagcttattaaactctcaaaagcagatcttgagaaaaagagaaacagtgacgaaccagaggaagggtgggttcagtgtgacaaatgtgaatgctggcaacatcagatctgtgcacttttcaatgccagaagaaatgatgttgaagaagcagaatacacttgcttcaaatgttatattgaggagtttaaacgtggtttgcgcatgcctttaccagagagtgttgttcgtggtgccaaagatctgccaaggaccctgcttagcgatcatatagaagaacgactttttaaacgactcagggaggagagacaggaacgggcaaataagttaaagacaagtttggatgaggttcctggagcagatggacttgtggtcagagttgtttcatcagtggacaagaaactggaagttaaaccacattttttcaagattttgcaagaggacaattatccagctgagttcccttacaagtctaaggctattcttttatttcagaaaatagaaggtgtggaagtatgcttatttggcatgtatgtccaagaatatggtgcagaatgcaaattcccaaaccaacgtcgggtttatctgtcatatcttgattctgttaaatactttagaccagatatagaaacagtgtccgggcaggccttaaggacatatgtgtaccatgaaattctgataggttatcttgagtactataagcagcgtggattcaccagttgttatatatgggcttgccctcctgttaaaggtgaagattacattttgtattgccatccagagattcagaagacaccaaagtctgataaactgcgtcagtggtacttatctatgcttcaaaaggctattaaggagaacattgttgtcgagttgacaaatctctatgatcaattttttgtcactgcaaaagaatgcaagataaaagtatctgcagctcgcttgccatattttgatggagattattggccaggagctgcagaagatattatcaaccaacttcaactagagggtgatggtaagctgctgaagaaggggagagtaaataaaattatcacaaaacgagctttaaaagctgccggccacactgatctaagtgggaatgcttcaaaagaggctatgctgatgcaaaaacttggagaaatcatttgcccaattaaggatgatctcatcatggtccatttgcagtattcgtgcagtcactgttgtacctttatggtgtctggaagacgctgggtctgcaatgaatgcaaaagtttttatatttgtgacaggtgttataatgcagagcagcggcttgaggagaaggagaggcacccaagtaatagtaaatgtttgcatatactccacccagttgaaattgttggggtctctgaagataccaaggacagagatattatcttagaaaatgagatctttgacaccagacaggcattcctgagtttttgtcaagggtatcattatcaatatgacaccctccgccgtgcaaagcattccaccatgatgatgctataccaccttcataatccaactggaccagcttttgttgccacatgtaatgtctgcaattgcgatattgaaaatggtcaagggtggtattgtaaagattgcccagactttgatatgtgtgcttcatgttaccaaaaacatgaggtgccaatcatcatcacaagttaacaaaccatccatcatctgcagaatgtaatgttcaaaacaagggagcttggcagaagcacgtcctgcaggtgcgtgtatggcttgaacttgcactgcatgcatcatcatgtcatgttcgtaattgccaataccctaactgccgaaaacttaagggactctttcatcatggggcgcagtgcaagatacgactaactaaaggttgtaaacaatgtgcgagaatgtggtatataattcgactccactcccaatcttgcagacaatcagattgtgctgtgccaagatgccgg

SEQ ID NO: 22094 - DNA, 702 bp, Oryza sativa
  unsure (1)..(702): unsure at all n locations
  Clone ID: TF_LIB4309-026-R1-K1-A8
cgtttacaatttgttcttgcaatgtgataagtgccgtatgatggtacatgctagatgctatggtgaactcgaaccattgaatggagtcctttggctttgcaacctgtgtcgacctgaggcgcctcgtgtttctccacgatgctgtctttgtccagtaacagggggcgcaatgaaaccaacaacagatggtcgttgggctcatcttgcatgtgctatatggattcctgaaacttgcttaaaagatgtgaagagaatggaaccgattgatggattgagcagaatcaacaaggaccgctggaaacttctatgcagcatttgcggagttgcttatggagcttgcatacagtgttctcatcctacctgtcgtgttgcatatcaccctctttgtgcacgtgctgctgatctttgtgttgagcttgaagatgatgacaaaatccacctcatgttacttgatgaggatgaggacccatgtattcgtctactttcatactgcaagaagcacagacaaccatcgactgaacgtccatctcttgaaagtaaccttgctaagcctgctgtggtagttcagacagatgcagttccaccatccggttgtgcaaggactgaaccttantatatccatgggagaaggggccaaaagcaacctcaagttatggctaccgcttctgtaaacgtttatatgtagagaatatgccttatatt

SEQ ID NO: 22095 - DNA, 2467 bp, Oryza sativa
  Clone ID: TF_OsC29983_1
gggagaccaaactatccacattttcatcctctttatccccaaatcttattagttcttcacaccaccaaatgagcacgtacacccatcagaatgtattcagtactcgttgccaaccctcggtataacttaacccactgcggctcaaagcctcaaatcaaataattaagcaagaagaatcggcaggtactatgtaccaacaatcaagctaacaactacgagagctaattaacacgatgaatgcttcagagtgcttcaccgtggtctcctcgccggagcttttggaaattgccaagatcagccggcggtgagctacctcgccgtcaccggggggcttgcccgatcaccggggccgtggcctttgccggccctgaggcgaagggagatggttctgggagtgctgtagcatctcaaccatggatggcgtctggtaggagtagatgacggtgctgctgtccgtcgagtcacctcgtgctgttgccctctgccacgagtgtgagctcagcccggacagcatgtaagccctccctgaagactcgtagagctggcgatttgccatcctctcctgcatctctcgcagctccgcgtcgagggacagcgacagacggtcaccgctccggcttgcgaatgactgtgacagtgtcctccggcaatcctcaagaatggccacggcctcagagagagcacccttctcggcagcagcccttgcacactctatggattcagcagcttgtatgcggttcctctcgcggtcaacctcaatggacacatgctcagatatgttggatgttgtcggccggttgatcttcacctcgtcaccttgaatcttgattgtctcacctgtcaccggatctctgtaggcacaagaaaccttcagtgctgaggtctgatgacgagattgtgggatgttcacggacagtaagatgtctctctcctcatcagcatacaggtgaccaatgtcgacggaaccgtttcgtccatctcttgccaccttacttgggtagctaccagatttgatggaagaaagttgaacaccaggatgaacacattccatgctaactcgcatctcttggatgacaatgctaagaagcccaccaatgcattgagcaaatgcatcttgcattacaccttcatcctcgataaaggaaaaggtgccaccagaagcttgagcaattgagtgcaaggaatccgagtcatggtctgctccaaatccgaaggcatgaagaggcaccgtatggcgagcatcatttataatggaagatgggacaagtgacttgtaatctggtgaagccccctgaacacttgaggaaatgttgtatgtatcttggccgtccgacagaagaatgatgctgcacactgaattcttgtaactgcggtcttcaatcaccttcatagctttcttcagtgcatcagcaatgtttgtaccgccgctagcaccaagtgagttaattgcctgcaatgcctgctgcctgccatgatgtgatattcgctgaaggtggaacagtcttctggcactagatgagaaagcaataacagaaagacgatcgcttggtccaaggtgctgaacaacaaaacccattgctcgctttaggagcgctagtttggtgcctgccatgctgccactaacatcaagcacagtaacgagatcaaccggagcacggtttcttgaagatccagctgagctttcattcgccaatttacctgtgccctggtctgggttagcactaggagccttcagatggatcagaatagcaaaatcatctttagatgaggactgcggtatggttgagaattctggatatgtgtttatctctgcagtcttagtagatcgaacattaagattgtcaaaaacttctggctgctgcaaaggttcatcatcattgaagtctgctggctcagaagtatgtgggcgacgaactcgctgatgatggtttggaacttggtggagaagagccatattggcatcttgttgggtcaatcgagctcggctaactccaattcttccatgcggaatgttagaagatagcgatcgattgaagggtatctctttccactttgcccgacaaattgggcagaaataattcccatgtttcacattagatgagatgcagtgaaaatggaacatatgagaacattcagctgtgaatagggcttgaccattcccatgccgcatggagtcaaagcatattgcacatttcctcttagaggaggatcggctgctccccgacttggacctccgcaccacgccggggagcggcagcggcaccggaacgtccgacggcgccggcaccgactccggccccaccgtcaccgcggcctcgccccggcaccgcgcgccgctcgccgccgccggcagccgcctccgccgctcgctcgagcagtcctccctctccccctcctccgcctcgggcacgtgcacgcacaggccgagccccagcgccctcttcgccttcctccacgcgtcctccat

SEQ ID NO: 22096 - DNA, 4872 bp, Oryza sativa; identical to SEQ ID NO: 12674
  Clone ID: TF_OsC94386_1

SEQ ID NO: 22097 - DNA, 2392 bp, Oryza sativa
  Clone ID: TF_OsC48959_1
gttttaccaatattaaatacttggtgcagatacaactatcagccacctcctgggaagccgaatcatacttgtggtggtgctgatagatgggcagatgttgttagcaccgatgatactagcaactcctcctcctcttcaccttctgcctccacctccacctccaagatggagctcaagatgtccaagaagatttccttcagtaggatccccaggaacctcaaggacctgctcgccactggcttgctcgagggccaccccgtcaagtacatcatgaggaaaggcaaggttgtttccccttattatttcgaggtgcatgctgggagtactaaaaagcacccctccgactacattttcctagaaaatggaaacaatctgcatgatatattgagggcgtgttctgatgctaccttagacatgctgcaatctgcaatacagaatgcgattggcccagctcctaagaagaggacattcagatgccaaacttgcaaaagtgagctgtcctcttgttgcactgggaaatttgctttgttatgtgattcatgtcttgagtccaagggatctcaaaacagtaccaggtaagctttgtcacagttccacattttgccagcgacagaaaatttggaggacatcaaagattggccggaatcctacttcctctgctaggagatccaagaatgaatccccaggttcaaagtattgcaattcatctgctaggggatccaagaatgcattcccaggagtgaagactactagcacgggaaggattacaagaaaggataagggattgcataagttggctttcatgagtggtgttctgccagagggtaccgatgttggctactatgttggtggaaaggttagcccttcgcagtttgaagcccatgctggccgtgctgctcgacgcaaaccgtaccacaacatatatatgtcaaatggtgtttcattacatgaactgtcagtttcactttcaaaaggtcgaaatatgtcaaacagacaaagtgatgacttgtgcagcatttgttcagatggtgagtgtgttggctttactactatcccaaggggaacttggtgttgtcggtattgtgagaatagacaacagagagaaagttctttggcatataaccacaatgcaatagctgctgggaggattgacggaattgatccaatggaacaaatatttacaaggtccatacgcattgccacaacaccagtgactggatttggtggctgtgcacttttgtgcaggctccatgatttcagcaaaaagaaattcagtgcgagaactgtgctgctctgtgaccaatgtgggagggaattccatattggttgcctgaaggaacacaatatggctgatttgacggccttgcctgagggagcatggtattgtactgcggactgcgttaggatcagcgagacactgaaggacttacttagccgtggagcagagcctatttcttctgtagatgtagaaattataaagaggaaatatgaacagaaagctctaaataaagatggagatcttgatgttagatggagggttttgaaggacaaaagttcagcagacagtaaattggttctctccaaagcagttgcaattttccatgaatcatttgatcccattatccaaattgctactgggcgagaccttattccagccatggtttacgggaggagtgtaagggatcaagattacacaggaatgcattgtgctgtattaactgttggcaacactgtagtatctgcgggtcttttccgtgttatgggtagtgaaattgcggagctacccttggttgctacaagtagagatagtcaaggcttggggtatttccaagcgctgtttggctgcatagaacgattgttggcatctctgaaggtgaaacattttgtgctgccagctgcagatgaagcggagtctatctggacacagcggtttggattcgtgaagataacccaagacgagctgcgtgagtacctcaagggtgggcgaacaaccgtgttccagggaacatcaaccctgcacaagctggtcccaaaattggatggctagctctgtgaatatatgcattggaatgtgcagggagcgttgaggcaggtccttgccaccctgatatgaagcgtggtgaagatagggacgggacgggacgggaaccctaagataaaaaatcccttctgtgaaaattaatgggtgcgtccctttttgatattttttatttgtcagtggtggaaaagaatatcgggaggatgtgttttcttgtttgtttgtttttttacatttgcggcaggagttgtctgatgtcgtgtgagtgtgtggttagtctagctagctattcatcatacttcatgcagttggtacttgttttgtggataaatcccctgttttgcataaaaccaa

SEQ ID NO: 22098 - DNA, 489 bp, Oryza sativa
  Clone ID: TF_jC-osflLIB3477P005f01b1
ctagctctagatcgcgagcggcgcccttctttttttttttgggcaagaaccggaggcattaccatacaggcatagactaaaaagacacatcattaatcagagagttgtagacacttaaccaatccatccaaccaaggaggcagaagatggcctatcgatactactattactgtggcactaccaactatgtccagtatgatacacgaagtaacgtacctgccactaatacagcggggcaaccagggctgagcgaacgactgtcacccactaagaattgaggttccccaagtccaccggtaaactactatgtattctttgccaatactatcacgatcacattataaagaaaaaatggacgctcattctctggtactcttgttgctgcagccaggacacttgaaatgcttgatgcgctccatcctggcaggggagattcggacacatttgacgtggaaccaggtctcacaaatgtcacagcaaatgcagaac

SEQ ID NO: 22099 - DNA, 4425 bp, Oryza sativa
  Clone ID: TF_OsC4410_1
ggaaccgctatgtcaaaagatccgaatatatgaacgttttgatataacagggtcaaataaaaaaagatataacaagtggggcaaaaggtactatttaccccttacttaagggtgttaactcgccttatcggaataggaccagacaattttgaaaagcaagttcaaataagtaaagtatgaaaagtagggctaaattggtagttaaaaatgtacaaaatgggactgcagttcagtcactgaaatgctcttgatcgctatgcattaacatacatcagttaactacccggactagggttcaattttggttccttcaggctttccgttggctgactacaagagattaaaggggtcaagagggccaacaaccttctactagtagggcacatgcatattcacaaaagacctgcttctacgcatgaagtagccatcttgtaggctagcctgacctggtatctgatggttagtctgttcaaggtcagggacatacctatctgtaactgtccctctagctgaactcctgtgttcccagtcgaaactgtctcgacggcggtaatctggtccccatccatgatcattcctacgcctaccataagccgccgcctgttcctcctcaccaaaatttgtctgaggtcgatatgcaccattgtggtgctcctgaggataatatctatcaacaggaagagtgtccattccatggtagccgcaccctgactgggatccatatccatcatactcggtattgtatctagtaccatcgtactcggtatcgggtgaattaccacgaggaggaactgtgctccagtctctttcagagctgaaatgccttgatcttctacgtcttcttggataagaaggggacccacgccttgcagtagcactataatcaggccttcttgaatatggagcatgaccatttcttctttccactggtacctggcgtctagctgaattttcgctcacggtatcccttgactctagtattctatttgatgtccccctctttctggacttgcatactgaagcccctcgtgctctttgatcatcattatgcgaaggacttttgacgtcaacacattgaggatgagcagttctatcatcttcatgatgaccatctcgcgcgtttttcatgcgaacggcttctcttttcctatccaagtccaatctcttaccatcagtcacctccttttgttccctggtttttcttgaattgtcacctgaagtatccatttcagttcctctgagattatcattgccgtgaggactctttggctcatgttgaagagcataattgtcatcaacatctacagccacattgtatccacattcttgctgagtatctactctgttggtagttgtcttgtgcacaaatgcaacatctacatgcttatctggaggtagtccatcaacaagatctggcttcactgtccccttgttgctgccatccctgggaatcttctcttttcctgatctcatgttctcttcatgtgtactatccgtcattctgttttctctcttcgagatctctgtcttttgacgtgctgcagagttatgcccacatgcattctctccccgatgcacatcactctcttttcctgatgtcaagttatttccgcctccacttccattagcatgtttctccttatacaagctttgtagctcatcattctgctcttgatttgcatgaaaagtaactacattgggaattatcaatcgttctcctgaacagtgctcagatgtttgttctctctcgctagtgtcttcttttccaactgtgaagatctcgttatcccccttagcacctttgtccacagaagaatccttcaacatgacactatgtgccttgtgcccaacatttaaatggccatgttttccagctatcctcatattctcctctgtcttgtcagggaaactccacaaggaaacacagagaggaattacatgcaaaccattctttgcgtcgtcattcacatccacatcaccaggttgatacaatggcttcccaaagatgtgctgattatattcccatatcaaatgatagggctcctccttgcaatccaatctttcaatatctgtgggggaaactattataataagccttggcttaaaggttaatactttgtcaacaaatttgttcgctgaaacggcttggatatcaagaggaaggtccaggaccataactagatttaatccatgaggtaaatcctttggttgcatggtcacccagttgctctcatcaaaacacagattgttcttatgttggaagagatcataattcttgaaattgcaccctttagacacatcttcaagcttttctttcatcagtcgactaaaattatccatgttgaagcagagatcaactatctccctcacgacaacaatggacctctctaataacaccccatctggcaattttccacagctttccgtgttgccaggctgcacataccaatgaagtttatcagcaatctgaaccaaacactctgacaaaccatctatctcaatcctgggctgcctcagtacatcctttgtagccatatcttgggatgtccctgcagatatttccttttctgctgtacttgttaccctcttttctgtttcaccatccaccgcacaagatgcactctttgatatttcccccataacaaatgaagacggagttccaggttgcccttccttcccttccacggtttttgcaccacttaatctagcagaaacatcaaccagaggtacttcaaactgcagatccttttttaagcgctttactgcacacccatgttctagtgcaatatgctcagatgagctattccttgctactcttctggtttgcttgctttctcctctaggtgacacatttgccaacttagtggattttgttgaaaatttattaccgctctttttccttttgccagtcactttagcatccttcttagaaagatttttcgttttcttgatttttggaatagaagggaactttatatgctccccactaggtgttccagtagtagcatctattccatggtgtaaacagtagaagtaactcctttttttaattttccaagcaagttttggggcacctttgtcctttgtttcaaaggaaatttcgctgtgaaaaataccatttgatgccatgagaacatgatagcttggtaaacattctgtgtgatatgatcttggacagcgtctgcagactgcaaactggaattcacttcgtgtcctgtcctccatctttgcacatttaaagcaccaatggacagggcatgtaaatgacataccatctgcgatcatttcctccaatttacaagcaccatcagtgtcttcaggctcaagtagcactgcgatgcacttggggtggtagaagtgcccacaagattctttattacattgaaacaccatcaagccatggcgtattgttgagaggacaccaacatatcgcgcatggtgaatgatatccggcgatcccttagcatttggaccataagatggctcaagctctccgcatttgaaacattgatgttcattatgttcacaattctcacacaagaaagttccactttcctttagctttagctccacagaagtgaaacggagagttctgcatttggatttcctgccatgcttcaccctggcatggaaggacctcttgcatggaccttcacagctaagcaactttccaccatcatcacatatggcacatatcatatctgtatcatcatcagttgcattaccatcagtatcagtatcttcatcagtactatcatcattattatcatcactgctgtcgctattgctgtagctgcagtcatcactgctttcaagtgactcatcactgacaataaatcgatcttctgtacacgctctccttggtatgggctcaatggccttcctggaagcatcctcaataaagcatcgtataatcttcgacttcactaaaattggatccctctccatgaaaagcttgattagatgatggtgcttctttatgtcatccccattaggtacaggaccaaatttattgaaaacttcaccgaggtgatcaaaaaggcttctctgttgtttcttgggacacttcctgacaaagtggagcatttgcactgtgatcaatattgatcgaacttttttttcataatagcacatccgtggtttcaacagttctatccatttcccgtcactcgaaagcactgagatctttggcctctgacaatcaagatctaccctccaagctatcaccttcttgaacacatgacggttattatctgtaaatccacgcaagttcagttccttgtaatcagaacatgagacttcttcgttctcatcaaactttatgggcaagacactgaagcagactggcttgtcctcgctttcctcaaaatagtagatgtccacatcgttaaccggtggctccacgtcatcgtcgtcgtcaaacat

SEQ ID NO: 22100 - DNA, 1611 bp, Oryza sativa
  Clone ID: TF_OsC134975_1
tagtggatccccgggctccacccccgattgtgctctctctcctccgctccgcggcgccgctctccttccgccgccgccgccgacgacgacgacgacctcctcctccgggtcgacgaaaccctagccgcggcgcggaggcctgctgcttccggctcccgctcctccctgccgagttcccgcgaacccttcgctgccggtgaaggaaggcgaggatggacggcggctacggctcggtcacaatcgtccacgacgcgcgctcccccgaggacgtcttccaggacttctgcggccgccgctccggcatcgtcaaggccctcaccatcgaggtggagaagttctacaagcagtgcgaccctgagaaggagaacttgtgcctctatggactgcctaatggaacctgggcagtgactctaccagctgatgaagttcctcctgaactaccagagccagccctcgggataaacttcgctcgtgatggaatgcaggaaaaagattggctgtccctgatagctgtccatagtgattcatggttactgtctgtggcattttactttggggctcgttttggatttgataaaaaggccagggaacggctcttcatgatgaccagtagtctccccactgtctttgaagttgtgtcaggaggtgtgaatacacaatcaaaaaccgccaacggcagtagcaaaaacaagtcaggctctaagccaccaaagcggcccaattctgacagcaagccacagaagcaggtccaggcaaagtatgaggaagagaacggcggcagaggaaatggaggtgatgaagatcaagctgaaaccatttgtggcgcctgtggtgaggcctacgcaaacggcgagttctggatttgctgtgacatttgtgagacctggttccatggcaaatgtgtccgaatcacccctgccaaggcggagcacatcaagcattacaagtgtcctggctgcagcaacaagaggaccagagaatgagcgtccattttttctttctaatgtgatcctgatagtagtggcaaaaaatagatagtagtttacccgtgaacttggggaacctcaattcctactgggtgaccgtcgttgcggcagccctggttgccccgctgtattagtagtagctacgttacttcttgtatcatactggacatagttggtagtgccccagtaatagtagtatcaataggccatcttctgcctccttggttggatggattggttaagtgtctaaactctctgattaatgatgtgattttttagtcaaaaaaaaaaaaaaaaaaaaaaaaaaaaaattgcttctaattcatttttttccctgttgatttgcatgaccttttctcaaactggtcattttaattctatctgatctatcactttactaaagaattcccacgtggctctatactatgtgcaaggatgcgagtacttatatgctgattccagagtcatggtagacttgtgagtctaggttgttctactgacacctgccatgatttaaatctgataattgatcatttattaatgatccgctctgctagctatgttaagtgtcacataacccatatttttcacaatagactcactgtgtcatgcatttatatgaaca

SEQ ID NO: 22101 - DNA, 3946 bp, Oryza sativa
  Clone ID: TF_OsC463_6
atggctaagcctctccgctctaccgtcctcgtctgcgcctctgcggcgatggccccaacctccgcaccaagattgcccacttcggcgccgccgatctcgccggcgagctcccggaaaccgaaaccgaacagggcacgtgcgggtacattgtgccggagctcatcgcgggcggagcgccatcgcggcggtcggacgagtacgcgctgggcggcggtggcggcagaaggaggaggggaggcgatgcggcggtgggtggaccggaggctgagggattcgttcccggtggacacggtggaggagatgacgacgctggcgctccagtgcgtagccaaggacgcggcggcgcagccggagatgtcgtggcctcgtgggtcgccgccaaggtgtccaagctcttcctgcccagagccacagagacaagagtttggtggtggcaacccgctccggcggctgcctctcgtctctccaccaccccgtcccgccgattttccgcctcgacctggtggtgcagtgctcgattcggcagttcggggcttaccgagggcgcagggtgtcgatgtgcagcccgaggaatcgcatatccgaaggggagtcgaaattagggtttccctctactcgccgccgatgaaggggggccgcttgcaccgtctggagcggccgcccgccgcccacatcaccaccgccgcagccgccaccacgcccgctccggcgcccgccgatgattggggggatggctcgtggacggtggactgctcgtgcggcatcacgtacgacgacggggaggagatggtgagctgcgacgagtgcaacgtctgggtgcacacgcggccaagcgcgccccctcctccgccgacgaggctgaggtcgccgagctcctggccgagctggcccacccaccgcccacggccgttgtaccgccgatgggctgaagtccctctcccctcccgtgtccatgtccacgggcttccaggcggtacagacaccgccctattccgcagcgccgcaccctcccctgtattctcgtccgccctatggcgctgtgctgggtacgtacccaagagattcggcttccgctactgcgaattcccctactgggctgatgacaaggacggtgccaacgctctatttgcgctggctagagagaagcgcaaggaaaaggcagagactaggttccctctccgccttggagccatacacaaggacaagaattatgtcaggacgctgagcatttgcggcgataaggtggatggcgttgagcactctgtggacgatgacgcaaagaggacatctccaccaagtgatgcaaagaagagaggaacatccattagcattgtagagcctgatacttgggacaatggttgtgagaagaaaagggattttgatgtgccagctagtgaggatcagcatgccaaaacaaacatggtaaattctgatttgcacgtgcttgttgaagctaagaagaagagggcttcatcctcagaacgaagtggggataagaagtgctctgcctcgaaggaaattactgggatgctaaagaaatatgaacctaaggagtccaagcgattggtgatatcctcaggagttgcaacaacggcagctgtagcagagcaagaagtgcactcacgatttgtgaagctctacccacctcacttgagtgcgccaggtggaggagagatgcatggcagtgagctgcacctgccaatgggtggaggagcagagtggcaaagtcaccagcagacccttgcatggcgaaggtgcaaaccaggcgtgcaccagggtagcgtgtatgaaggactagacgggaatcaaaatgtaggtttacagactggagtaagatcgaatggagttgtgaaaagggatgatgccaaacgatcaaatggagatgtccagagcgatgctgctcctgagaaaatgaatgagggtctggatcttcagaagcaatcaaatcaaacttcaaatcttctggttgttggtggtgtaccggatttacagactaaccagtcagaatcattgactatcaagaaggaagcatctacagatgatcatgagagaaccgaggctatccagtttgtaagtgatgagcataaaagtggaaaacaagatactgcaatgttatcaacccttcagaggcattcgtccaagttagcatctgacttagtttatcaacatccaaagtctgaaacacaaaatccgatgcacacaataccagagcatccaaactcaagtttaggtaatgtgaaagtttgtacagcatcttctggtcctaactctaccacttttgatttatcttgctctttgctatccacagaaccatcatcagaagaaactactgttcgtttggtaaagaaggatcagacaaggttggtctcatccgctgacagcgaaaatgattttgcaaaaaaatctgagagttcccaggatcgcacaagatcctctgataaagttcaattgaaaggctttgttccgtctgcgccaaaatcatctcaaggaagtagaacatatgtatcttctgccaaaaatagatttatagtgccaaaggagcagttgcaaaagacatcaactgaaggaaacgctccaccagggtcattacaaggtgaagtggcacccttacattctcgtaataaggcaatgcctttgagcttttaccaaagaaaggacaagatccaccaccgctctattcatatcacacaggacacttccaatagttcagcatcggctgagctgcaatctactgaaacaacagcttcattgagcgatgaacagcttgcattgttattacatcaacaattgaacagctcccccagagtaccaagggtgccacgttgtcatcaagcatctaccatgcagatgctacatccaactggagctagtgtgttctcaaaacggtcttcagcacatggaggaagggatcaagcactggtcttaaagaagaggaacaaagatgatgcatggagagataatgatgagaccaagaagacaggaaaggtgtctagtgttgaacggaggcatagagatagtagcacagaacgtgtccttgctgcaaaagactcatgcaaatttactgaaaatatagaatcagaacagagaaatcgtggcatttgttcaactggagccacctctggcgtaggaaatgatgctccaatagatagaggtgtttcacatgatttacctgggttgattgaggaaatcattagcaaaaatacaaacataacatatggtgaactgtgcaacgctattcgccagcattggggggatttaagtaaacccaacgtggaaaacaatgcataccccaactatttacatgctgttaacgattgtcttaggaacaggaatgactgggctcaccttgttgaccaggctgcaatgatgaatccaaacaagcgccggaaggtagaggaaagtgactctttgtcagcagatgtactggcaaccgagaagacaaataaagaggctaaaaggggtccagaagacacaaatgctgaatcacaccatgaaattctgccaaggggcaaacgcaaggctcggaaatgcaggcgtcttgaactgaaagggaggagagtcaacgatacgaggaagagatctagctttgattcggcctctgatgatgatgataccaccttgtcggattccagtagtgacagaaatgacacccctatggataagagcctagaagatagttttgttatagctaagaatgcagattcaagttcatagaggtggttcaatgcagtgctgctggcaatacattcgaatggagttggtgaagaaagtcagatttagcgaccgcagatcggttcacttgtaagttgtaacagtagtgtaacatagttaatccttttctcgcctaactgtaatgcaggtagatttgttgaagtagcgtatcatgtaagcaatttgcaatttgtagcgtctgatgattgcgcccaaaataacaagcattatgtgt

SEQ ID NO: 22102 - DNA, 6409 bp, Oryza sativa
  Clone ID: TF_OsC158862_1
atgccaaggaagaaggccagctcgccctcgccgacctccaccgccagggagactagaagctcctccgctcgtggtcatgcatcaccaaccccaaccccaaccctcaggaggtccacccgagaaaccacatccagattttcttcttcttcttcgtcttccgcaaacaagcacgaaggctcccccgccaagcaaagtgccaacaacaacaccgcaaaacggaagatgaataatgctgccgcagatacctccaccaggccaatcaagaagaacaaaaagctaaacgcaaagtcctatttagcactcttctccacaccccaacaaaccgccaaatcccctcctgcccctggaggaaattcccggctgtattctaactttggcaatgtagcccctcctctcctagtccaagtggatgacgacaatgcttccacggtgcctatgcaagacagtggcactcttctggagcatgaagaagctgacacacaagagcaaggttaccagtctggcttgcacaaagttcctgaggtggtactggaggagactgatgtctccaagaacaaagctgatgaacatgcttccacttctgaggccaagaagacaattgaagcaggtgatcccagagagatcaaaggggcttctacttcaaatcaggctttagtaacccattctgatggaacagattacaacgagtacctgtgtgctgtttgcagaagtagggaaaccccaggaattctcaagtttaaaatgaggcagctcaggagatgccaccatgaaaggctgtgggagaggtcttgtgatggaaaagattgcaaaaatcggtaccatgattcttgtctggatcctcccctgcaatatgtgtcgctaggtatctggttgtgcaccttatgtactaaaaagaggctccagtttggtttatttgcagtcagtgagggcattgaatctttgtgggatgttaaggaagtgaaatggaaagatctgggctatgagtatgcaacatgggagcttgagacttcatcatttttatgtacccctgaggctaaggatctgaaaaggaactatgagagccgccatgaagatgcaagaagaggttttgatcctgcaaaaataaataagggtaagcaatgtctgtttcagaaacttcagaagctaccggatgggttcccccctggtttagacaaagatcatttgagttcacttaaccggctccgcgagttctggcacaattctgatggtgctatttgtctcgatgatcaggagagagtaatcaaaaccattcttttttctatgtccatattgcctgatgtctgccaaccacttctcattgtctctacttctgcttctctctcattgtgggaagctaagttcaatcgcttggcaccatcgatcaatgttgttgtgtataatggggagaaagacgtacgcaaacagattcaagatttggagttttatgagaacggtttggtgacgtttcaagttctcttgtcccatcctgatgccatcctagaggacattcagaccatggaatcaattgtttgggaggcagttatggttgacgattgtcaaagcttgagagtttcaaaatgccttgaacaacttaagcatctttctaccaattttaggatggttcttttgagtttcccactcaaggagagtattcctgagtacatcaacctgctgtctttcctcaaccctgaaggaagtgtcatttcgagtagttcaaatggtgattttactgatacaggtgatatcttagcaacgctgaaagaaaaatttgctcgtcatgttgcatttgagcggaaagcagattcttcaaaatttttggagtactgggttcctgctcgtctttcacgagtgcagctagaaatgtactgttataccttactttcaaactccccagcactccgatcacactcaagaactgatagtgttggtgctcttcgtgacattcttgtatccctccggaagtgctgtgaccacccttacctggttgatcaatcactgcaaagctcacttactaagggccattctctgactgatattctagatattggatctggtggcggggctggcaaccctatgggtgacattttggatgattttgtccgtcagagatttggttttgagtcatatgagcgtgtagaacgcggattgctagtgccgaagaaacaaacagcactgaatatgttcaatgacaaaactaaggggcgttttattttcttgattgatagtcgtgcttgtgttccaagcattaaattatcatctgtcgatgccatcatcatatattgtagtgattggaatccaaccaatgacttgagagttctccagaggatcagtatagagtctcaatctgaatgtgtgcctatttttcgcttgtattcgtcttgtacggtggaggaaaagactcttatactagcgaagcatgatcatattcttgacagcaacgtccagaatgtaatgcctatcgtgagccattccctgcttagttggggtgcatcgtttctcttcaatagacttgaggagttccaaaagcatgactactccagtaaagattctgaggatgatggtctcttcatgaataatgtatttttggagtttgcagcgaaactatccaccaacgttgaagccagcactaaaatggaaaatgcagtcatatctcgagctcagcagagtggatcgttttattctagagatattgctgttataagcgagagggagggaatatctgcagttgatggtgatttgccaaagttctggaccttctggtcaaatttactaggtgggaggtctcctcattggcaatatatatctgagccagtgcaaaggaaccgtaggaagatacaaaatatggaagaccaaatgagaatacctgcagaagaaactgatgaagcaataatgaaacgtagaaaaatcggagaaatcatggattcatctccgaagatcctacctgtcaaagacaatgatgctgtgctgcctgaaaatagtacagcatccagttctcatgaaacatcagttgatgacacttggcaagagctaggggcagaaagccttcagggcacacagaaaggtcttcacacccaactcaagccagagctgtcaaagttgtatgaattgttggaattgccggagactgtcaaatgtttatgtgaggaattacttgattacattttgaagaatcatcaagtcagtcaggagccaaagggcatattgcatgcattcaacattgccctgtgttggcgtgctgcttctctcttaaagcataagatcaatcgaagagagtcacttgccctttctgtgagaaacttgaactatgagtgcgatgaagtgctcgctgaatatgtttatgagaagctaaggatcctcaagaaaaagttttcgcgtagagcaagtgaaacaagcaagcagagccaatctactccagtaaataacacatcatcttacaaacaacagacctcaccgaaattgagaagtgacggatcaatttgtcatcaggtaacgacaattgatggtgatttggaaaatgtttcacatgaagaggctccacatgatatcttgaccgaggagatgatattagaacagaaggaattgatatctgttctagaaactcatagagaagaacatgttttaagggatgaacttcttgaaagaatcacagagaaaagaattaatttaattaacatggttttctccttaagagaaaagaatattcaggataaacaaggaaacgagaccacactgttagacatgcacaagcaaaaggaagtggcaaagctgcaagaaacatgcaatttggtcgtggaacatcttcgtaaaggtcacattgattcagaggacagggatgccacggtgaagctaataattgaatggtttactttgcttctgtatgcatttttgaatcacatgagatgccagcataacaagttgaagatgcagcaatcaacttcatggaacaaggagttacaattgaaggaaattttccttcagcaagcaaaatctggccacttagatcgtagctttgatcaacaaattcctttaccagattcatgctttactttggaagaattcagccacttcaaggaaatagttggtaatttccctgtcggtgcagctacttcagcaaattgccagcattctttggcatcaaccatggaaattgcattggtccggagtgtcagtccatctgaagttgggaattcagaagcagcgataaatggggctgttgaagttcctgtccacaccgaaaaaagaccaacatcagaagttgggttgtcgcagaacaggatggacaatgattctgatggcattgactcacaaggagggccacctctggctgttcaacattcattaagttctaatcctgcaattgacaattccaataatttggaatcttcagttgccagccatagaagcgaacatcttggggatattgcagtggaagttaatgccgacaattgtggcactactcttgcagattcacctcacttagaggcaccaactgtggctgccctgcccagccagagtgccttgccaatggctatggaagttgacattcagacagatcatgtagttcagtctgcccagcagaacatagtgacaggacgagttccacaagaagaagagcgagaaggttcgaccactgtaacatcagctcagcctttgcaacctgaaatgcgaccatcaagtccagtatccggtattttgcgtgaaagaacaaatcctgatcagaggagggaaagtcgtcagccagaggctgcacctagttcggtggatccaacacaactctttcccgtggcatcactgatgtttaatcacccaccacttggcaatgaaccattgaaaaatgagctgcacagattacaagtacacatggattctcttaataaaatctacgaactgaagaaatcacaacttcaaacggagtgcagccaagaaatcgagaagataaaacagaagtatgatttgttaattaaagaacaagactccgctcatcatcagcacaggaagacactggatgacttgtatgggaaagttctcctaaaccaatcactagctgatgattttcgggtcaaatttgtatcaacatctgcagctcaagccagagccgtttctcctccactttgccagacaactcgccagacagctggggtatctcagcaggtaccaactaggccttcggtggctggatcgattgcattgccagtcggttcatcatcagctagtcgaccatcgctgcagaggcattgtgctcaaccatcgcatgtggatcggtcatcatcatcgggggggagtcattcatcatcgccatcttcacaagttgtacgacctcccccagcaatactaggcagcgttgtcagggcaacatcaactccttttagtcacacacctgcagcccgtggaaactatggagttgggagtgaagtagcacgggcaccagctccccatctccagttcaggctgccacgagcacatcccacggcccctgtaaatcagcagcagcggcagctcccagttaggctagagagcacatgttcaaggacacagttgactcctgtgagcaccccagtaaacgcaaggcagttgagttcacaatcagtttccccggtgagcaattcatcatcatcgtcaagctcacatccaggtccagcactctcaaatccagccttggcagcaaattcaagttcaaatccagttttgagtgcaggcacagtggcattgccgccaagtccacacccacccgagtcgatagcagcaccaaggggacagcaaaagggggcaccgtcaggcttgaatacagtgcctgttgtaggctcgggtttgccgccaagtaggtccatgtcagattcggtgtcgctggatgcatggcttacatccaatcttggtctgaaggacggtgaaaccagcacacctcgcactcgcatggatagtcatcgtacagtagatgtggtgtgcttgtccgatgacgaaccagaagagcactagagctagagctagactgacctgacttttgtagtacagcagtattttcttggaatgccattttttgcctgcctggcacaaggagctgaatttggccggactggtggcttgcatgtatatgttgttactactagtttgttattagtagtaccattccattctagcttagcttgtaagctgggtgggttggggttcccttccctccaggccttgtgcagcatgcctagtaaggtctgctagggtaacttaggttgttgtaaatagtactaagtaattagtactgtacaagtaataacttgctaaccagccacccaggaagtgaattaagcatggtggtaaaaacctccttggttgcttgattggttgtagtcgacgaccttttggtttactaatatacttgtgtcaaaaaaaaaaaaaaaaaaaaaaaaaaaaaaaaaaa

SEQ ID NO: 22103 - DNA, 4845 bp, Oryza sativa
  Clone ID: TF_OsC11584_1
aaactatcccttctgcaacgcttaacctatcccacgcaaaggcaagaatgtccaaagaaaatacagagaatttatatgtacaggcgagaaaggcatctttgtatatcctcaaacaggtaaatccacccatgttgccgttcacccgagcgacctgaggcggagcaagatttctggtaaagatcccacaccatacattcatctgtttcgttctctcgttcacattaactcagtttgcaccgttctacaacttcagcccaattggatcatcgtttgcttggaaccctttgtagcagcaaaagactggccagccccacttgacgcttgtactttctggctgtgaagaccaaggaaacaaacgtcttctggcctttcttgagacaagattaaccatcttgatctcagctgctcctatccaccaggctcttgtggttcatgggcctgtgtatttcgattccgcaacttgtctttagaaagagagtcacgaggaacatatgcataccccttcggaagacgttggttctgtgtagaagcttgatcagatgtcataaaaagctccttttgaaatgtttccctattcttcttatccttcgtcttcttttctccagcttccaatttctgtgaggtaactggtcttcgcgggagctgcttaccagcaagtgatcctctttcactaaacttccgtttgaacgatatcagtgtccttgagctatcagctgtgtttatctcagcatccctgttattcagagaaaacctgatcgcctttttcccagaaatagtactgtccactgtgacatcatcagacctttgcatggttccactgtatgatttgttgttaacagaagtagtggcagattctgaacttgctccatgtgtaaggtaggagaaaacaagagtatccttcgttttggcaagtatgtcatgatcacatagaaccctctcacgcttcaccttttctctcttaattatcctctcgcacaagagtcgcaatttttccaactcaaccctcattcttttcatgttgttgaactcctcaagtccatactgttgcatatcagcctccttttgctctatgctgtgtttgctacaatatgccttgtgttgcaaaataccaccagatccttttgtgttcatgtagaaaccagcatgtctagcacaataaggatgaaaagtggtttggcagtccccattattgcactttagacatgcgccaacagtatgaaggcagacacagcaagtatctttgtcctttacaagactttccattcctttgactggactatcttgtcccctcacatactcagtctccaacaaccactcagcacagaaagcatgaatccactgtccatctgcagtctttctaaatgcacctgatgtgccatggcacagatcacactgcactaaggacaggtttgtgccattgcaatctgattgatcaccaacacaagtgtcttctggtgaaatatcttcgcaaagttcacacttccaggggccagaaatattctcaatatttctatagcaacctatgtggactgcagccttgcatctggagcagacaaatatccggttcaacacagtctcacttcgcatgcatacatcacagtatagtgcattttctttggaataatttggcatatgaaaagtgctgcggttattatcttgtgaaattttgttgttgggtggctttgacaaatccttgagtcgtagtagtgaagaagtccgctggccaacgtttggaggtccagtgccaaattttggagaattctcttgcttagcaggtactacatcatcattggcatcttttctcacagttgagttacgtgaggaggccacaactgcagctgcagctgcagccagaatggcctgggcttctttatgtctcttctcttttctcccacgtttcttagcttctctaacatcacggagaaactgattgacaaaaataaaatcccattttctcctactgaaagcatccaactcacgagagagattctggacaacctttgctattaaatcttcatatctgtgcttcagaaaggcagcagtgtcaagtagcctggcttgcaagtacagcatttccccttctacttcatcatcaggtgagtgctcaaggatacccaaggattttgctcttgaaacttgatccatcacatctgttgtttctgtaagttttatcgaggaacccacacgccttctctcatcgggataacataacggatcttcagggtgacatggtgccagcttatcttgcttgaacgtgttgtcccaaagctgagtcatcttttccttgatgagtggatggatataatagtgtgaatcattgaagttggaaaagggctgtccaggaacatgatctgcgttgcaatcatggttattcccaacaccattttcaaccaagtttaactcatgttttacattatcacctggaggaaaatattgattcaatgaagagacaccctccagctccgagccaggttcagcctcagttaagttatatcttttctttccaggagatgtacctttattttcatttggtatcgccatggaagttccaaattgtgtattgccagagatgttgttcgatatcaatcctccatgctcttcctttggagtacctttagcacaatcttcagcaggggaagaacactcacgctcagcgcctgcttcagccatcttttttattccattctgcaaaagggttgttactccagttgcacagacagctgtgttatccctcataatcttgttattatctttagatcttgttgatgaggatttcatcacagcagaatctgacaagtaagctgttgttcctttctcatcattcggaaccaatgaattcttcatgtttacactatttgtatcctcagacctgcctggtttgctattatgcaccaccattgggccccctttaagaatctttgcctgagcagctggtatatgtgcagaattttggagccacttgataattttcagtttcagaccatgggaaaaagtggtggtttcacccacaagagcagcttccaaagattctgaagaaatacccacttcagatgctacatcaccaacactaacctttccttgatcaattagctttctaagaacaagagcaacatcagcagagtttctcataaggttcccaccaaccgagagattgtcagtatccacttccatcccttggattgctagggaatctgaacttctaacagtgtggggtaaagaggcttgctctatggtctctactttgataaggttactagagttaaagctagtggcttcatagttcatgaatttatccttgttcttgcgcgtgaatcttagttttggtacctttccagtgataaggtttgcatcttttagccttgcttctgtaggactctggtgagatgcacagttacttctctctagagaattggcatatccaatagtagaatgctttgagcaaaatgctctcagctcgacattaggatacccaaattttccccatatctccatttgatgcttggactctcgtgcacatataggatgaaaaggtgttcggcatgttccatgactacatcggacacatacaccatgcttaaccttgcaaatgctgcacaccaatttccactgattctcctggacacttccaacattagtaacaggttccattgattccatgtcttccacaagagctcccggtgtccaaaggctacaaaacaagtgcacaaatttaaggttccccccatgcgctgtttgaccaggctcccctttgacaggttttagagcgcctttctcttttgggcatagaacacaaggcatcgacaaggtgttgtccgcatctttcttcaacgactgcagtgactccaaatccttacaccaagtgcacaaccactggccatcaggcacaacatgcaaaccataacacttctggtgcacagttaccttacagcggttgcaattgagcatgctattggacaccgtactactctcccccaaacaacaaacatcacatacagaactagcctcagctcccgagcgcggtagcagaacaagctgctctaaccctgcatccacacctaaaagcttcctcttcttgttgggccgttctgaagtgagcacaaaccgttcctttgatcctagcaaccaattcagtgatgattctccctcttcttcacattttgatgatacaatgccagcactgctagtagcttgctccacttccaatggccaattctcctgttgcacaaccacctcatgtatgccctgctctacactctgctcaccgcgttccttgttaccaacgaactgtcgcacaatcacctcatgtatgccttgctcaacactttgctcacttcgctcactccgttcgctatgctccttgttactgactctttcttcaccacccagacccaagtacgagcttgtttcagccacagccacatcaaatgtctcagctgtgtccatcaattccttgccactgcccacaaatggtatgaggatgcacgaatcgagcccgccatagccgaacggaaactttggcattaacatatcaatatcatccaaattcaccggccggaaatacgcctcgaactgctcccacacgccagtcttcgcagagggctccgtggctggctgcggcgggagctccacatcagccacgtcctggggctgaatcttcttgtgcttcttccgcgcgtcgctctgccccgaccagttcacgagccgcgcgggcagcgtgggaaccctaggcgccgtcccctcgccctcgaacggcgtccgcaccgacagggccttcctggcctgcgcgtacaggtccaccccgacgcccggggcggccccctccggcaagccctcggcgcgggccat

SEQ ID NO: 22104 - DNA, 3157 bp, Oryza sativa
  Clone ID: TF_OsC85093_1
ggggcaaaatggtttgcattagaaaagaacgactgtaatcgataaattagtgccatttacagggatggaagctcgcgcttctgagctatagctaaacttattttctaaatgctatgttaaagaatggggaagcaacaaagaacaaggtaaagcatataccaccagccaacccagaaaaaagaaagaaagaaagaaagaacagtaaactaatggccaatttgacatctacagtaaactaattcatgaatttacgacaattagccgtttggcagaggcaaggaactttgcgatcatcagcctcgtcagggtcaaataagtagtcatacgttagctcttcgccggctgagacatttttcttggttattaggacaatacggctcaggtcatgccccacactcataagccttgcatggaagtttggagtgcaggactgaccaatcaagagtgccaagtatcgtttatctgtggcatcaacgactacttcctcgctgattttgaaaagataccaatctttgccttgtacacgatattgttcttcccttaaatcagcaacacttcgtctgacctgctcacctctatactcgagcaccatttctccttcttgaatgcccctacgagcaaaaagtccccatctatgaattcctgacctaccaaagcatactctggtatgctctgttttctgcagatagtgtagacgctccttaaaagtagaaaaggactctggatccctctcttccctaggtggattcaaactgtcgatttcatcccatcgatgttgacaggatccccttacacggtgtgcaattgctccctcccgagatctctttagttctttcttaacataaaaccgacatcttgctgcagataagttctctgaaatttcaacttctgacactgaatccttgggaagatctttcctaatcagccttgaagcagctacagtgccattgctctgaacaagtttttttgaagagatagttccagcaggagtttgaattatcaaaacattgtcaggattaggggcccgatgatgagcacaatatgaaatcttgtttgttgtctgtttgccgtttttttccaagcagcgtatctccatcctatagcctgcccttgatgcacagatggcatggtaataagttgagcacctgtagcactgtgtacacgaaccatgtatttgcctacaaatgacacacatcttcatgaatagcaaaggcgtaatattcaatatcccaatagcaggttccatcagctcatcactagcaaaagcaacttgtggctgaaaccatgcacatgtcacatgtacccacaagttatcaacatttgttggcttcagtgcaccaccttttacagggcaaagacaacactcccttttttgatcaggtgtttcacaagccctacaaacccatgaggtgaagtcttgctttcccctcacgccatagcattcctgatgaactgctatctggcatctgttacagattacaattttgttgtaatcccagtcttcaacccatctacagactgcacatctttctgttgtccattttacatttacagtatcatatggttcacttagcaaatcaagaagcttttgtttcttcattttctgagaggagcgctttgcaggatttgtggaatatgaacttgattgatgttgctctatccattttccaaacggcataagcgtgtccttgattttaatacttgacttccagtttttacttctgcagccagcatgccgttcccattcattgaacaaaaatttttgtcccttgcatggaccacaatggcaagaaattagttcaagatctcgtaggtaagttccttccatgccaaaacagataactgcaactttgtcaggcttgctacttttccatcttcctccacatttatgttgccagcttttcaaacatacaccacaatactctttggaccgcagtatcttagcacactgtctgcaagcaagttgttccattacatacaccatcatgcttgggtctttatttggaaagcaatttccacaactctcacattgaagtgctcttttgtaacgtgcaggctgtcctgttgtgttgccatccattggaacttcgaagaatccctgatcagccaaaaatgcctcttctaatgccctctggaaatcaccaggtttgcaactgcttagttctgtctgcccttgaaatcggtccatgtagtccacaaatggaaatatccctccttgcctcacccagatgaacttcttctcatcaccgaattctgcagcccagccgaacagcatcacacaaagcacagcaccgctgcgtggctgtggtggcaatgcctgggcagcagctggctgtgctggatcgaccaccacccccggccacaccggctgccgcttcccgagccttgcccacacaatgtcgccatacacaaaatcattcctccagtaagatagctcttcctcctcctcctcctcctcttcttcttcctcctccgcctcctcgtcctcgtcatcgtcatcgtcatcgtcatcgtcatcgtcatcgtcatcgtcatcgtattgccttttcatcagtccctttctatggtaatagctgtatggttcaccgtgtacagaagtgaccgtgctgagggacatggagtacttcctggaggcaacaaagttgtggccttcctcataatcatcatcgccattttcatctaactctgacattgttagactcctatcagcaattgcacctttgcgatataacacctcgcttttgggcactagctgcacagccttggccggaacaggtggcttcgccggcttatccttcttccaggggtcgatgagcaccgagtcgttgaaccgcgagggcagcacctgggccctcccgcgcgacgtgcgcaccaccggcggtcgagacgccgccgcggcggcggctgctgcccgcgaggcagcggccggggacgcgacctcggcctcctcgcaccagcggaacccgaaggcggcgtaggggatgccggcgaccggcacgtcgccgagcagctccacggggaagaactcgtcgcccctccgcctcttgggccgccgctcgccgccgtccccatcgtcctccccgaccccggcgccgcccccggcattgcaccgcctcagcgagaggatctccgaccgctggttccgcttaaagatcat

SEQ ID NO: 22105 - DNA, 5091 bp, Oryza sativa
  Clone ID: TF_OsC12404_1
atggaggggttggtggggagggcggtgaggaaggagttcccggggttcggggtgttcgacggggtggtggagtcgtacgacgccgaggcggggtacttccgggtgatgtacgaggacggggactccgaggaggtggagcttggggaggtggtggggttgctggttggtgggtcgccggttggggtggagatggcgcatccgctgccgttgacgcccgggcggcgcccgaagaagcggcggcgcggggatgaggaggggggcgttggcgtgggcgcggtggtggcgatggaggtggattccgtggttctggctgtccccgccggtggcgcggagcccgcgtcgccggtggtggtggtggaggggagtagtagggatgaggtggatggggacgtggtgtcggagatggcggagaagaggcggagggtggtgagtccagggcctgagtcgtccgggaagccgcttcggcggagcgcgcggcaggcgaaggcggccgcgcgggtggccgaaatggaggccgccgccgctgtggcggccgccgctgaggctgaagcagctgctgccgcgatggccgaggccgaggcagaggctgctgttacgccaccgcagtctgggagtaagcgtaagcgtgcaagcggggctggcaggtatcggtctgtcgcgaaggatttggagaaggctgcggtggagaggctgcctccgaagccggagcttccaccctcgtcgcagagtttggatttggaaggtctccctgctctcgacgtctttcaagtgtactcctgcttgaggtcttttagtaggcagctgttcctgagcccgttcctgctggagacatttgtggctgcactgcggtgtatatatgtgaaccctttgattgactgggttcatttttctctcctgcgagcgatgaagagtcacttggaagatctcgccaatgaaggagaccctccggcaatgcattgcattaggaatcttaactgggagcttttggacctagcaacttggccaatctatcttgctgagtacctattgactcgtggttcagaactgaggtatggtatgaagcttacagacctaaagctgttgaatacagagtactatactcagccggcaatggtgaagttagagttactgcgcgcactctgtgacgatgttctggaaattgaggctatacgttctgaagttgtttcaaggatgtctgagttggatgggaatgatgagctttgtaaaagcactcgtacaagaagaaaaaggagggcttctgctgtcaagaacctactgaattcttctcgggctcctgaagattccagtgacactgaagatggtaacagcgatgagtgttatctttgtggcatggatggtaatttgttatgttgtgatggctgtcctgctgcatttcactctaaatgtgtgggggtagtggaagatttattgcctgaaggtaattggttttgcccggagtgtttgatacagaagaatgatggattcaaaaatatggtaaagcctggaagaggagctgaggttctgggaatggatccacatgaccgactatactttggcacctgtggctatattttggtggttgagtcaactgctgaggattctctggactcgacatgtcattactatggcatttttgatcaccattcgcttttcaatgtgctaagaacatgccatccctcgtacagttcaatcactaacatgatatctttgttttggggcactgcaattgattcttttgattccaatggtcgatgtgaaaataacaaggaattcagtatctttgatgccaagatagactgtagtcatttattgccatcgaagcaacacacagaacatgagcagcttaagtcagataagaatggctcctgtgaacaattggcctgtgggaaagctcatgcctcggatccagatcggctggatcatgacacctctcaccacaagttctccttgagatctgcggttatttctgaaaatggaaatgcaactagtgccaagactcagcaagatgtttgttcttatgctaatggattgcctgctgagaataagatagaccaatcacctcacaaaaagataagtgattgttatatccattcgaaccctgctatgtacgtaaactactacagttttggtcaaatagcagcatcagctgctgaagagttgaaggacaagctatcggaaaacaaagaaggaaagaaagttggtcaggatgcagcttcattccagctaaaaacaatatgtaagaaatatgccaatatttttgctctgacagatcaaaagttgtctgtagagctgcgaaaggaaaaatgtggttggtgtaattcctgccaaatcagtggcggtgttgattgcattttcagagtcaccgatggcaaatgcatggagggtcttcagtcagaaaagaatatgaacagccatattattcttgccatacatatcatcttgtcaattgaagaacggctaaatggtctactgattggtccatggaaaaatccccaatttagcagttattggcgtaaggcagttctgaaggcttcagatgtgtcatcattgaagcaacctctccttatgttggagtgcccggtgcgacgtgttgccttctcagtggaatggcaaaaaccagcagactctgttgaagttgttgggtctgcagctcatgtcttggttcgtacatctaataaatcctcgagacatggaagcactagaaagccagggagaaagccatttattgttgaactcaaagttgactctcgtgatgttggtgtttactggcgaaggggtgggagattgtctcgtcaagtgtttcactggaagaggttgccaaagtccttgacatataaagctgttcggcaagcggggcgaattaaaatcccaaccatattatatagtgatggttcacagtttgccaggaggtccaaatacatagcttggcaagctgctgtggaaatggcagaaaatgtggcccagtttattttgcagatcaaagagcttgaattcaatatcaggtggactgagatattgagcactctccctgctagccttgcaacaaaggaaacccagaaaatagcacgtcttttcaagaaagttatagttcgcagaaagcgtgtagatggaacaaatgtggaatatttacttgattttgggaagagggagaatattcctccagttattgctaaacatggaaaaaaacttgacgaaccctctaatgagaggaacagatactggttaagtgaaggacatctccctctgagtcttttgaaggcatatgaagctaaagcattaactcgcttactgaaaaagaaagatattgatcaccttccaaagaagatgattgacttgaaacccccaaagccaaaaaaatcaggatttgatgatctcctagaaaaagcaaaaaagcaagtccttgggctttgtggccattgtgacaaagaagtaaagatcagtgatgctgtgaactgccaatattgtgaagcacttttccataaaaagcacttcaaggttcctagaggtgctactgatgcttattatgtttgcaacaagtgcctatctgagaaggtcttgaatgtgaagtctccacagaaaaaggttgtatcaaagaagaactctctgaaaaagaagacaaagaagcaatcacttaagattgtaacaagaagtaaacagattgttgccaaatccaagaagaagatgggcaagaataagggcaagcgtggccgacctaggaagtacccgctgaatgagtcaaagaataaattgccagagttgcgtgtgaaagaaccagccaatgtgcccaagaatgagccagctaaacgtatatcaaaaagattatattcaaagtacatgaaaggcaattcaaatatatctgagcgttcagcaaagaggaggaggactgcttctcattattcatactggttagatggccttcggtggacacaaaacccaaatgatgatcgggcaatatcttttaggacagaaagagttgtctttccctgcgaagatgctgatctgtctgaagtttttccagtgtgccgtctatgccagaaatgctacagtggagaatctatttatattgcctgtgaagattgtggagattggttccatggagacatctattctattactcttgagaatgttaataatctcataggtttcaagtgccatagatgccgtttgaaagatgtacctgtttgtccgtatgtacaaacagataatatccttatggctcaatctgataaggatgacgtcacaagcagatctatagaggacaaggaagacaggagcccaacagatctggttgcccatgacagtctggaagggtctcatggtcatatcattgagaaagaggttaatgatcatagttttgaaaaggaagttggtgatcatatttgtttgcaagcgcaggaagatcataatgaaaaggagctcgacagtcatagcactgagaaagagctcggtgatcataacaagacggaagagtttgatggcaatatgaaagtgctatttaatcttaacagtacaaaggagcttgatagtactagcactgagaaagagcttggtgatcataacaagatagaagagtttgatgtcaatatggaaatgttcttcaatcttaacaatacgaaggagcttgatagtactggagaaagcatatgtgctggtggagaagcacactgtctgcatgagctcaacaaccatgaaattcttaaggagtgtcatagtcttgacaataacctgggtgaactcgataatcaagactgccaaaaagagtgtcataatcaaaatagtctaaaagagcttgaaaatcatcgaagttcacaagagcttgatagtcataaaagtccagaagagcttgataatattataagtccaaaagagcttgactgtactgaaaataatgaacactctgctgcagtgacgcagtcggatggttttcttgatgaccccttcaacattaggatatctgacaaaggactgatcatagcatcagaaaatggtaagataaaggaatctattcctttgcaaaccaagaataaacctgaggagaatcctgttcctgctgatcatgacattgatcttcaggtggtggtgactttatag

SEQ ID NO: 22106 - DNA, 2474 bp, Oryza sativa
  unsure (1)..(2474): unsure at all n locations
  Clone ID: TF_OsC54697_1
atggtggtgaacagccggccgctgaagagggcgaggacgcgggtggaggccagggacttcgctgggttcccgcaggcggtggacggcggggctgccaggacgttccggtaggcggtgagggggttcctcgcgaggtacgcgcggctgctgcctctcccctctatcttctcgccggcggccgccgcggcaccgccgcatctgttgacgtggagggtgtcgctgcgggtcggcgaggagggggacgaggagggcggcggcggcgccgtggagctcaacgtcgttgaggaggatgtgctccgatcgcgatctgtgtattgtgaccagtgcagagtcgtgggatggagtggtcacccggtctgtgggaagcggtaccatttcatcatcgagaacgacaacaaccaggtgtgcggcaagcgccacagctgctgcctccgctgcgggactcccacagtcgctggagaatcaagatgcctcctatgcaactttgatatggatggcgaggagctggaggagtgcgggtacatgcatctggacgacaacacccacctgctgcacgctgtggtgcatgcaaatggttatggccaccttctgagggtaaatggccgtgaaggtggctcaagatgtctcacgggccgtgacataatgagtttctgggatcgcttgtgcaaggtgctacatgtgaggaaagtaactgtcatggacatatccaagaagcatggaatggaatacaggcttctgcatgccatcacaagtggccatccttggtatggtgaatggggatacaagtttggcgctggtagctttgcactaacctcagatacttaccaagaggcagtggatacgctttccggtatacaactcgcgttgtacttctcacatcgccagcccattcggacccctctgcagaacacgattgctctgtactgggcactctctgatcgccagcttgtgactgttcgggacctcttccggttcataatgcacctgcttcatcaagcacgcaagaagaacgagacatcaaaacccacaactgatgaacacaaagaagttgcatctaatgtgctctgcaagtggacaaaggaagatattgatcgggcagaaactgcaatgctcaaggtcctacgggttgttcagcctggacagtgggtatcatggcgtgcacttcggggagctgcatcgaaggctgttgattcacaggagctacttgactattctcttcgaggactgggtggaaaactgatggacgatggccatttcatagctgtccgctgcaatgctgagacgagtgcaattgaatacaggctggaagataactccaaccagtcagttgatgcggctgcgtttgggccttctgttgatcatcttctgcacgatctgaagttcctctataacgctttgctgaacccagaaaccatgttggcttcacagccagaggttataggtgcatcatcacacagtgcagcagcaaagattctcgactgcaagcagttcatcaaacattacgatcagcacaccccacgggctcctttgaacccattcctactttctgtgaggtgttccattgaacttcttgatcacccaaaagactacactgcaccaccggtggaactagtgcttttaccagcaagtgctacccttgctgaactgaaaatacaggctacaagggcctttcaagaaacatacctcatgttccaaagctaccaggttgaacagctccctgacttcccaaattttagtgacacaaccctcgtgaagcatgtgcttggctcaagccagctcgtgagggtaagaggaaggtgcactggggataaccgaagaattgtgcaattcaggatggaaagggggttggagaactggacggtcgactgcacctgtggagccaaggacgatgatggcgagaggatgcttgcatgtgatgtttgtggagtttggcaacacaccaggtgttcagggattagtgattttgatgatgtccctgagaagttcatctgcaggaagtgtgctagtccacgcagaggaaagggtcgtggtggtggaggtggcaatggtggtagcagaatggatgtgagcgctgcagggaggtgcaaggatgagataggatcatctgttggcggtgcaggcaaatttgggcgcatggcaactgttggatgactgtacataatgtgtgaaatgtaaatactgaggggagagtggggagtagcacctgaggcctgtgtgaaccttcatggaatcttgtctttctgaccagtgatatgatgttaatctatcctccttggaagcaaaaaacaaacagaattgttcagcacgctcaattccattcaagtgcagcataaagagggtgggatgaaagatgacaatcttgaaatgaataataagatatctaacgaacactcattaaattcttccaggcttccatgtcgtggctttacactatgaaaggcagccanatagtagaaagtggctcgtgccgaatt

SEQ ID NO: 22107 - DNA, 567 bp, Oryza sativa
  Clone ID: TF_uC-osflM202003g05b1
attattcttagaaaggattgcttccaaggaggatagattaacatcatatcactggtcagaaagacaagattccatgaaggttcacacaggcctcagcgctcacatccattctgctaccaccattgccacctccaccaccacgaccctttcctctgcgtggactagcacacttcctgcagatgaacttctcagggacatcatcaaaatcactaatccctgaacacctggtgtgttgccaaactccacaaacatcacatgcaagcatcctctcgccatcatcgtccttggctccacaggtgcagtcgaccgtccagttctccaaccccctttccatcctgaattgcacaattcttcggttatccccagtgcaccttcctcttaccctcacgagctggcttgagccaagcacatgcttcacgagggttgtgtcactaaaatttgggaagtcagggagctgctcaacctggaagctttggaacatgaggtgcattatgaaccggaagaggtcccgaacagtcacaagctggcgatcagagagtgcccagtacagagcaatcgtgttctgca

SEQ ID NO: 22108 - DNA, 5441 bp, Oryza sativa
  Clone ID: TF_OsC15358_1
atgctcgcgtcccgcatcccgctcaagcgctgcaccgccgccgccgtcgtccccctccccggggagttggagatggaggaggggcccaccccccccgccgggggtggtgaggggagcggcgcggcggtggtgcccgccaagcgccgccgcgagcgggtggtcccctcgcggtttagggactcggtggtgtcgctgccgctgccgcccgcgaagaaggggaggcccgcgaagaaggcggccgcgcgggagggcggggacggggaggtgtacgatgtggaggtgcgcgcggtggagcaacaaggcgcgacggcggcggccttcggcgccgtggagaccgcggtgtggcccggcgacgagcggccggcgcagacggaggaggagctgtaccgggcgtgcaggaatatccgcaggagcagcagctccagcgggttcagcggcagcgtggtgacgtcgctgagcaatgccggcgggagcgtggcgccggaggggaagcccgtggtggtggtggagtgcaagccgaagagggagggcggcgataaaaaggaggatttttactggccggaggatttcgtgctgggtgatgtcgtgtgggcgaggtccgggaagaagtgcccagcatggcctgcggtggtgattgacccactgctccacgcgccagcggtcgtgttgaactcctgcatcccgggtgcactctgcgtcatgttctttggattctcttctggcgggcatggcagggactatggatgggttaagcaagggttgatctttccatttgtggactacttagaccggtttaagggtcaggctttatataaactcaaggcaaacagattccgtcaagcaattgaggaggctttccttgctgagcgtgggttttgtgagctcgaaacggatgaggggtgctcactagagaagtctgtcaatgaccagtctatccctgacgggttactggaagggagtggttctaacaatgagcaggaatgtcaatcggaggctcaggttgttggcaaatcaactggatgttgtgatagttgtggtaatcgtgttccacccaagatcgcgaagaaaaagaagcaagcgggagagcagttactctgtagacactgtgataagctattgcagtcaaagcagtactgtggcatatgcaagaaaatctggcaccacacagatggtggaaattgggtttgttgtgatgagtgtcaaatttgggttcacgtagaatgtgacctaacatgcatcaacatggaggacttagaaaatgccgattacttctgtccagattgcaaatcaaaacgcaagacagtacctcctgttgaacaaatgaacactccgaacagttcagaatgtgctagcacttctaaggaaaaactgccggaaatgatacctgtgttctgctttgggatggacggaatgtatttacctaagaagcacatgatactatgccaatgtaattcttgcaaagaaaggctgatgagtctgagtgagtgggagagacatactggttcaaggaagaagaactggaagatgagcgttaaacttaagagcaatggggatccattggtaaccttgttggatgatattccctgcgcaaatgtgaagtcttctacaccaagtattaataaagaagagttgctgaaattgctaggtacattggctcttgagtttatgttggtttatgcagttgcaaattcttttagacctgtcaatgctagatggacaactgaacgttgtgctgtttgtcgatgggttgaggattgggactacaataaaattattatttgcaacagatgccaaatagctgtccaccaagagtgctatggagcacgtgatgtacaagattttacaaattgggtctgtcgagcatgtgaattgccgaaacaaaaaagagaatgttgtctttgtcctgtcaaaggcggtgctctcaagccaacagatattgaccaactatgggttcatgttacatgtgcctggtttcaacctaaagtctcttttcctgttgatgagacaatggagccagccatgggcatattgagcatcccttcagagtactttaagaaggcatgtgttatatgcaagcagatgcatggtgcctgcactcagtgctacaagtgctctacttattatcatgcaatgtgtgcatcaagagcaggatatcgcatggagttgcaatactctgaaaaaaatggaaggaacataacaagaatggtttcctactgtgcatttcacagtactcctgacccagataatgtcttgatagttaagacgcctgaaggagttttctcaaccaaatttttgccccaaaataatgagaaacagagtggtacaagacttgtcaggaaagagaatctacaggagaaagtccttcctgctaaaatttctgactgtccagctgcaaggtgcctaccttatgaaatgctgaaaaataagaaagaaccaggagaggcaattgcccacagaataatgggaccccgacatcattcccaagagtcaattgagggtttgaacgcttgcatgaaaatagaaaacaaaagggtctcttgtggtcgatctggaatacatggatggggactctttgctgctaagaaaatccaggaggggcaaatggttatcgaatatcgcggtgaccaagttagacgtagtgttgcagatttgagggaagcacgatatcacagggagaagaaagattgttatctgttcaagatcagcgaagacgttgtcgttgatgcaacagagaaagggaacatagcccgcctaattaatcactcgtgtatgcctaattgctacgcaaggatcatgagtgttggcgatgaaaagagccagataattcttatcgccaaaagagacgtctccgctggcgaagaactaacctatgactacttgtttgaccctgacgagtccgaggactgcaggtttttctctgcagttcagtttcagtttcagataggccgtgagtggcgctgctgcagccacccgagagttgaaacggacctcaaaacacttgctagaagattttggaaagttgctgccccttactggtggtcagaagataaagtgcaagcgaggctgaggcttgctgcagtatttgctcttacattagcaactactggaattagtgttggatttaactttctgggtcgtgacttctacaatgcccttgctgacaaggaccaggaacaatttaccaagcaactgctgtattacttgggaggttttgctgtaggaataccgattgtttatacaagaattatatcacatatcactagattttccttctttgtcttgagagactatgcaagggagaccctttctttaagatggcgatcttggatgacaagttattacatgaagcgctactttaaaaatagaactttctataagattcaatctcaatcactaattgataacccggatcaacggatcaatgatgatctcagtgcattcactggaaccgcgcttgcattttctctgacatttttaaatgctgccgtggacttgatatcattcagtaacatcctttatgggatctatccaccattattcattgttcttattgtctactcccttgggggcactggaattagtatcttccttggtaaaaatttggtcaacttgaacttcatgcaagaaaagaaagaagcagattttcgttatggacttgtccgagttagagaaaatgctgaatcaattgctttttatggcggtgaagaaaatgaattgcaacttttgttggatcgattcaggagggcttttgaaaaccttagcgaattgctaatagcatctcgtaatctggagtttttcaccaatggctaccgttatttaatccagatcctgccagctgcagttgttgctccgatgtacttctcaggaaaaattgaatttggagtaataaatcaatcagtgtctgctttcaatcatatccttagtgatttttctctcattgtgttccagtttcagtcaattagtgcattctcggcggttattgatcgtctaggtgaatttgatgatctgttggatggaaatggttcatctttatccaagcctgataacattgatgggatcaacataattttcaagagcactggtcctactgtactgagttccaatggatcaccgacacaatctaatccatccatggttcttgagatttgtaatttgacattattaacacccaggagtggaaacattcttattactgacctcactatggaactcaaagaaaaggaccacctactggtaatggggcccagtggaagtgggaaaacctctttgttacgtgctttggctggcctttggaccagtggtactggggacatcatataccatgtgagaggttccatggagcttcaaacatcaaattcaggtcctgatgagccatccaacatacagtcaaacggtgaagaactgctacaaagttcaaagcagagaagggataatggtatattctttgttccacagagaccatatatggttttgggaacccttcgtcagcaattgctctatcctacatggactgaagatgtttgtcattcatcaaataatgatcctcaaagtacagaccctcttacctttgaagtctccacatcagatggagttggttccaagtctgagatgcccacaactgatgaactgatcagagtacttgaggctgttaagttaggctatatattgcctcgtttcaatggtttggattctatgcatgattgggccagcgttctctctctgggggagcaacagcgtcttgcatttgctcggttgttacttgcaaaaccaactttagtcctccttgatgagtccacaagtgcactagatgatatgaatgagcgtcatctatacagtcagattgaagctgcagggattacttacataagcattggtcaccggaaaacactgcacaagttccacaacaaggtcttgtacatttcaaattccgattcaacggatagcaacccacgtaattggtacctaaagcccacagaacagatgtcgattgaagagtcatcctcatttgcttcataagaatttcatgatttgagcaacatttgcccctgagcagttttgtcgcaagatttcacccatacgtgaagtgtatggtgcccagccaagtacccaaaatatgtcatgctgattgttctaaagatgtgatgcttgagtagttgagttgtatgaccaaaattgctagtatgctacaaaccaactcgaggcgtggcacagattttagcacctaaaggttgaaagggaagctcatctgttcttggatcgttataccacgaagttcagaatgaacatcatatgtagatatgcagtcctctgatctttttgagtttcttttagaaatgacgacggaatatctgaaactgtctctttgttattacgtgtgtggtgtgtccttgtaactatactgggaattacagctcttatatacatgcagtgtgtgcagactc

SEQ ID NO: 22109 - DNA, 3084 bp, Oryza sativa
  Clone ID: TF_OsC247488_1
atgaggaagggaatatgcaccgggcatattacttatacggggcggacacgaggcccaataacggagggcaaggaagcatcatcggcaatctgccgaggaagcgccaagcgtgaaaacggaacgacatggacgatggaaatggatgggggagatgaggcgaccagctcaggcacaagggaaaaccttggtatccctgaacgcgctgcaagatatggcgcatcattcccgtgtgtggaggagcatggagagaccaaagtcgggcaggccggggtccaggctcctagtagagaagaatgttcaccgggattcaagtggcagtggatcacccactacaggcactcatggggaagccggagggtgtgcgactgcgagctagggtttggggcggcggggagggggagggggggaggattggcggaggcggcggcggcgttggaggggttccttgcggatccatggctgctgaggccggcggcggcgggggagggggtgggggtggaggaggagggaggggtggcgacggtgcaggtggaggtgccgccggtggaggcggcggaggagggggaggaggaggccggcagggcggccgtgctgcggcaggcggccgccgcggaggactacgcgcggaggctggagggcgccgccgccgcgggtacgggtctcaggtttatgccaaatggattttcagtgcttcttacgctttgcttttttatttggggtgtagatacacacgactatgatgttgtcaagttggaggaaggagatgaagaggactggggccaagaagatgtgggcaatgctgctgtcaaggttatgtgtcgtatatgcttttcgggagaaaatgagggtagtacaaaagctgccaaaatgcttccatgcaaactctgcaacaaaaagtatcatagaagttgtttgaaaaactggggggaacatagagatcttttccattggagctcatgggtctgcccctcttgccgcagttgtgaggtatgtcgacgacctggtgatcccaacaagttaatgttctgtaaaaggtgtgatggtgcttatcactgctactgtcagcaaccgtcgcacaagaatgttacccatggaccatacttatgtccaaaacatacaaggtgtcacagttgtggatctggtgtacctgggagtggccatagcacaaggtggtttctgggttacacatgctgtgatgcttgtggacgattatttgtgaaaggaaactactgtccagtttgcttgaaggtttatagagattctgaagtgataccaatggtttgttgtgatgtttgtgaaaagtgggtacatattgagtgtgatggcatcagcgaggaaaaataccagcaatttcaatcggaccaaaaccttcagtacacatgtggagcatgccgtggcgaatgctcccagattagggacacagaagatgctgttagggagctttggaagaggcgggatgtagttgatcatgaccttatggctagtttaagggctgctgctgcactgccttctttggaagatgtctcaccatctcatcctaactcagatgatgaaaaacttggtgcatatgtaatgaaaaatgatggtagaaacacactcaaattctctttcaaaagcaacagtactaagcctgcattagattcatctgaacaagagaagaatgctatcaagagctcagggtcaaataagaagcattccaagaagaaagggaatcaaaataataaaacagttagcgagcaggatgagatatttttggagaaaaggaatgaaactaaatcattgggtagtttgggagatcaaattgcagatgttactcgtgataagagttcatttaaaaatgatgccgatgcgtttgtgctgtcttcagctcaaagtgcagagaaggctttgaaattacaatctgccaaagctgcagcacataatgctgatatgatacccaaagtcaagattaaaggaactaaggttccgagtttgcatttcaaggatgtaggcgaggaaaatgctgccaagagtgacacagggaaaggtaccaagttggttattcatatcggttcacgacacaaaagtaggagtggctctcccaagtctgaaatgtccaattctcagaaagagcaagagctggtttcaatgcatggagggaaagttgatgtgacaagccagttcaaaagctctagaagtgaaataaaagaaaaaagtgtaatgaagctagttagagagactggagtacaacaaaatagccttctaggagatctaggtgcttcaaaaaagcatgcaaccggaaaaaggagcaatgctatagtttctgcaatggaaaatgcaagtgaaagtggtaccagaagcagatcgtttggacaaaaacaatctgttaatcatctgactgagaaccaggggaatgcttcattttctgtgaacaactctcctgacagcttgaagccatcattgctcaagcttaaatttaaacgtccaatttttgagcagccaagcactcagtcttctcaaccagaggagccgggcacctgggcttcaccgcaagaggagttaaatgttgctaaaggccagagatcaaagaggaagagaccttcattagacaagatggatggttcggaaagtaaggctccagctgccaagagacatgagcagagcacaggagaagaagcaatggatgcgaactggatcctgcgcaagttgggcaaggatgcgattgggaagaggattgaggtccagctagcttctgatggcaaatggcatcagggggtagtctcgaatgtaatcaatggcactttgtgccttcagttagataatggtaggtctgagaacatagagctgggaaagcgggcaatccgcttgatagcacaaaggtcacataccggaaagcgattaacccattttgcgcctcaggctccagcatttggatcgtcgcagtctctgattcatgggagattgggaggtctgaagcgcattggcttcattttgacttctggtagtgtaggaacaaacaactgggaaggctttttaggggccaccctggatgtagaagaaatgcctgatgatggccatgtacatgtagctgtagctgctgaatga

SEQ ID NO: 22110 - DNA, 593 bp, Oryza sativa
  Clone ID: TF_rsicef_7783.y1.abd
gcacgaggcacctatgtggatagtagttctgaagaaagtgaagatcaacaggtgaaaatatgtgacatatgtggagatgttggtgaggagaagaagcttgctatttgcagtaggtgcaatgatggtgctgaacatatttactgcatgagggtaatgatgccagaggttccagagggtgattggttttgtgaagagtgccgaactgagatgcagattgaaaaagaaaagagcatacttgagaaatctcaagtgaaggttagtacaatttctgtagggagtaaggtgaaggctgcaaatgtgagtagtaaagacctaaatgtgagtaatacatccagtaagagtacaaaagaagatgcagaggaagggattgtccctagtggctgtacttctacaggaaaggaggaagacggtagatcatgcattggtggcagtgaggctgctaataaaaacgaagagcagacatccagtgggagaaatgatgattttaatttgaagatactacatggagagaggcatatgcaaagccacaataatgatgttccatttacatccgtggctcatgacatatctaatatggctgtaaagaataaaag

SEQ ID NO: 22111 - DNA, 2662 bp, Oryza sativa
  Clone ID: TF_OsC348_1
accaccaccaccactctcgctcgctccccccactcccactcgcctgaaaccctagcaaggagctcccggcggatggacgagggaggcggcgctggtgctgcggctgccgccgccgggaacgcggcgggggcggcggtgcaccacaacgcgcggtccgcggaggacgtcttccgcgacttccgcgcgcgccgcgcgggcatcgtcaaggcgctcaccaccgatgtggagaagttctaccggcagtgcgaccccgagaaagagaacctgtgcctttatggattgcccaatgagacctgggacgtgacccttccagctgaggaagtacctcctgaacttccagaaccagcactgggcataaactttgctcgtgatggaatgatcgaaaaagattggttgtcgctggttgcagttcatagcgatgcatggctactgtctgtagcattttactttggggctcgctttggatttgataaggaagccaggagacggctcttcaccatgattaatggtcttcccactgtatatgaagttgtgacgggaattgccaagaagcaaacaaaagtctccaacggcagcagcaaaagcaacaagtccaaccctaaaccatcgaagcaatccaattctaacagcaagcctgcaaagccacctcagccaaaagatgaggaagacagcggcccggaaggcacagaggatgaggaccaggcttacatgtgtggcgcttgcggagagacttacgcgaacggtgagttctggatctgctgcgacgtctgcgagaagtggttccatggcaagtgcgttcggatcacccctgcgaaggcagagcacatcaagcagtacaagtgccctggctgcagcagcaagaggagccgagaatgaccacgggaggctcccggttgacatgttttagaatcgttaggaattggtgaagaggcggagaaccgcttcacccgcaacctgctgccgtgcagcagcagacccggcgtgcaggccggttgttgtattagtttcagtcattgtgttgtacccgacatggtaagtagctattgtatttagcaggcaggcaggctaactgctgtggtcgtagtgtgatgtgaacctctctcgctccccccactcccactcgcctgaaaccctagcaaggagctcccggcggatggacgagggaggcggcgctggtgctgcggctgccgccgccgggaacgcggcgggggcggcggtgcaccacaacgcgcggtccgcggaggacgtcttccgcgacttccgcgcgcgccgcgcgggcatcgtcaaggcgctcaccaccgatgtggagaagttttaaaccatctttttttccctcttattattactgtacatctgccgaaagaaatcctttcttgcagacgacgaatcaacaaattttacagcggaggagaggagatcgtatcatctcgctgccaccagcggcagcgagggtgttttgttgctgggcatgtccatgtcgagctccaggccgaagagcacgccttggtaggcctcgacgccatgcttgaggaagtagagctcccgcatccgccggaagacgtcccaggtgagcaagctgtcggaggcggcctggtggcaccgccccgccgcgcgcttcacctgcagcgccgccgccacgcgctccagcccgccgtacagctcgccgccgcagtgccgcatcatgtgcttcacgtcgtacacctcgtcgccgaagaagacgcgcaccaggttcaggaactcggccatggacctcggcagcttccgccccatgaggagcttgaccaggtaggcgaagtcgtaggcggagtggaaggtgacccacttgacggcgccgtgggagcagacgaggcccgacgacatgagcagcggcgccagcgcgctcgccctgacgccgtgcctgcggtgcgcggcgaggtccacgccgtgctccgccagcagctggacggactcggcggcgtggcggtggacgcgctggtcgaagtcggagaggttgatctcgaaggcgagcgcgggcgccgcggtgggggacgcggcgagggtgatgcccacctggatgaggtggagcgcgtccacgttgcggcggaggaggtcgtaccggtcgccggcggtgagcagggcggggtgcttggtcgggcggtggatcacgccggggaactccgtgtccatggacacgtacgggaagtgatcgatcgcgttgcggatgatccggaattcctcctccacgttgtgcgcccacacccggcgtatctccaccggcggcgcaggctgcctcttcctgccaacgccggcggcggcgaactccgacggcacgaacgccatgccaggcggcggcggctgctgcttcttccgacaggcggcgaacaacaactccggcggcggcttcttcctggcggcgacaaactctgacggcatgtcttaactcaaagattggatggatctcggcaacgaattcgaagcgcgatgagcaattggaatttggaaaaattcggaccgaattggagatgcgagttcgccccgtatgagaaagttggatactctcggtgttcagtagtgattaagttatgggttagtgtgtatgattctatgataactgcctcccctttcatgaggtttctaccccaaactccccttaatataatatataaaaaaaaaaaaacaaaaa

SEQ ID NO: 22112 - DNA, 1180 bp, Oryza sativa
  Clone ID: TF_OsC348_2
cgctccccccactcccactcgcctgaaaccctagcaaggagctcccggcggatggacgagggaggcggcgctggtgctgcggctgccgccgccgggaacgcggcgggggcggcggtgcaccacaacgcgcggtccgcggaggacgtcttccgcgacttccgcgcgcgccgcgcgggcatcgtcaaggcgctcaccaccgatgtggagaagttctaccggcagtgcgaccccgagaaagagaacctgtgcctttatggattgcccaatgagacctgggacgtgacccttccagctgaggaagtacctcctgaacttccagaaccagcactgggcataaactttgctcgtgatggaatgatcgaaaaagattggttgtcgctggttgcagttcatagcgatgcatggctactgtctgtagcattttactttggggctcgctttggatttgataaggaagccaggagacggctcttcaccatgattaatggtcttcccactgtatatgaagttgtgacgggaattgccaagaagcaaacaaaagtctccaacggcagcagcaaaagcaacaagtccaaccctaaaccatcgaagcaatccaattctaacagcaagcctgcaaagccacctcagccaaaagatgaggaagacagcggcccggaaggcgcagaggatgaggaccaggcttacatgtgtggcgcttgcggagagacttacgcgaacggtgagttctggatctgctgcgacgtctgcgagaagtggttccatggcaagtgcgttcggatcacccctgcgaaggcagagcacatcaagcagtacaagtgccctggctgcagcagcaagaggagccgagaatgaccacgggaggctcccggttgacatgttttagaatcgttaggaattggtgaagaggcggagaaccgcttcacccgcaacctgctgccgtgcagcagcagacccggcgtgcaggccggttgttgtattagtttcagtcattgtgttgtacccgacatggtaagtagctattgtatttagcaggcaggcaggctaactgctgtggtcgtagtgtgatgtgaacctctatgagagagttggatactctcggtgttcagtagtgattaagttatgggttagtgtgtatgattctatgataactgcctcccctttcatgaggtttctaccc

SEQ ID NO: 22113 - DNA, 4738 bp, Oryza sativa
  Clone ID: TF_OsC11017_1
atgccaccggttgcgtccggctccggccggaagaggcagctggtgctggagtccagcgattcggaggcggatgagttctttgtctcgacgcggcgcaaggaggatgatgatgatgatgccggaaatgccggcggcggaagcggaggaggtggtgatcagggtggggaaaaggtggtgactgttagtcctgagaaggtttctggtgccaagtctactgatgaaggaggtggttcagacaagagcaagggaagtgaggtgggtaagagtgttttgcaacctgatgtgaagaggatcagaactgaggctgcccatggtggcggcagcggaagcggtgggagtgtatcgaaggatggaaccggcgggaaaatgctgcgcccggggttccccaagtggcgatttgagaagccggaggtaagggcagggcgggttcttgatgagaaaggtggggtcgagacgaaggtaagcagttcccaaaaggttaaggaccatgcatcgagttcggtttatgagagaagacggccagagccactgaaacctgagaaatcgacgccatcgaagactaaccaagaggttataagggtacaagggaaaagcggtgtcttaaagatccgtccgaagaacaataaggtggctagtgaaactggtgatggcaagaacctgccgaagaatgctaaggtggatggggatactggtgatggcaaagttctgccaaagaagactacagtggaggaaaatggtgatggaaagattttgaccaagagtggtgttttaaagctcctcccaaagaacaataaggtggccaaggaaaccagtgatggcaatcctcgaagcaagaacactaaggtggttggggaaaccagtgacgccaagattctgatgaagaacaaggcgaatagggaaagtggtgatgataaggcaccgaagaactgtacggtgaatctagaaactagcgctggcaagattttgtccagaaacactaaggaagatttgaaaaccagcgatgtctgtagacaagataaggagaaaagcgatgcaattgatgtgtcccaaaaacagggtgcagatggtgagaagagaatcacagaaaaactagtctcccccatcctattgaggaaaagtgacccaagtgtagtgggaatttctttgggccagaaaatgaagcagcaaaattcaaaggcgcaactgaagatatcctcactaggccaacgtcagccttcacttaatttgaaagatgagaagaataagaaaaaaagattgcttgatcataaaatgtcaccagaaaatttgtccaagaaagcaaaaccaaatgccattgatcaggatacatctcgtccttctcttgagaagcatggaataaagaaggaaaggaaagggcctcgttacacaatgaagcagaagctcaggggtcagataaaggacattcttttaaacaatggatggaaaattgatctaaggcgcaggaaaaacaaagattatgaagattctgtctatgtttctccacaaggaaatggctattggtcaatcactaaggcttatgctgtgttccaagagcagtctaaaagtgggaagcatacaggtaaatcatctaagcataaagcaggtgttgcagatgctgcctgtaatgccatatcagaaaatgatttagcaatgctacagaggaatgtggtgaaaaggaggaccaagaaagaacttggtgcttctaaaaagaagtatgaggacagcagcagcaggaactccaaagacaacaatgctggtagaagttctggaaacaagcatcaaagcagtggagttaggggatgtgcgcttcttgtccgtggtagtactcatagcatggaaggcaatgtggacggctattttccttatcgatggaagcggacagttttatcatggatgatagatatgggggttgtttctgaagatgcaaaggtcaaatatatgaataagaagggcacacgggcaaggttggagggtagaattactagggatggcattcactgcggatgttgctctaagattctcacagttgctaagtttgaacttcatgctggttcaaaagagcagcagccctatgaaaacatctttctggaagatggtggggctacgttgtcacaatgcttagttgatgcgtggaagaagcaatcacaatctgaaaagaaagggttttacaaggtagatcctggtgatgatccggatgatgatacttgtggcatttgtggtgatggtggcgatttgctctgctgcgataactgcccttcaacttttcacttggcttgcttaggaatcaagatgccttctggtgattggcattgcagtagctgtatatgtaggttctgtggttctacccaagaaataacaacatcgtctgctgagttactttcttgtttacagtgttcaaggaaatatcatcaagtttgtgcacctggaaccatgaaagactctgttaaagctgaatccaattcctcaactgattgtttttgcagcccaggatgtagaaagatttataaacatctgagaaaactacttggggtaaagaacgctattgaggctggattttcctggagcctggttcgctgttttcctgataaactagctgcacctcccaaagggaaagctcatttgatacattgcaattccaagacagctgttgctttctcagttatggatgagtgctttctgccacgtattgatgagagaagtgggattaatataatccacaatgtcatatataactgtgggtcagatttcaatcgtttaaattttagtaagttctatacatttattctggagcggggtgatgaagttatatctgcagcagctgtcaggattcatggaactgacttagcagaaatgccattcataggaacaaggggcatatataggcgccaagggatgtgccatcggctactcaatgcaattgaatcggccctttcctccctgaatgttcgaagactagtaatacctgccatacctgaattgcaaaatacctggactactgtttttggttttaaacctgttgaaccttccaagagacaaaaaatcaagtctctgaatatcttgattatccatggcactggtcttctagagaagcggttgcttgcaacaggcactattaaccaagagaacactactgttaatgatatgatggatgctcaaacacatgttgaagcaaccggatcccggacacctgttcatttttcctgtgaattaccagtgggtggtgatcctgatattaagcatcatgatgactctcatcctttagttgggaactccaaaggcttgacacttaatctgccttgtgttcctgaagaaaaaactgcagaattgacatctccagtattagatgttgttcagtgcatgcctgaatctgaaaatactcaagaaatgaaaaatggagaaacagatgcgacactgacttctgaggacataattgcagaacagaagtatgaagataaatctaattccagtcttacagattcatctgctattcccatgacagtggatccaggctcatgttcatccaatgagactgtgaaaggagaacatcacacatctagtgaaccttctgttgaagctattctagtaagagacaaacctgaaccttccatctcttgcaacgttaccaaccaagaagacaaaaactcttccatggttcctgttgatacgacagttcatttagccactatagttgggaatcatgatattcagaattcagtggaagtcaaaggtatggaacataatacagctaaggatcaaacttttgttagtgctgtagctaataatgttgctactactgaagatcccagtgattctgtagctgactgtgaagtgccaatagtgaggtctattcagcagaaggatgaggttatcgcagacaaaaatgcttgcgcaactatagatcaaactgctgttgacgatgtagctaataattttgttgctaccactgaaaatgacactgattctacagctgaacttggagtgtcaatggagagatgtatccagcaaaaggttgaggttatcaaagacaaaagtgattcaccattgagaacttctataagcaaagttatgttggagaaatcggatcaaatgaagtctactgaaagtgatagtgttaaaatgaaggacatggcgattgaggtgaaagtcacagttgagaacttcagtgaagcaggtaaaccagcttcagcgcttgtcatgtcaaatgacattaatggtgaagttatggctaagcctaatctaacttgtggggatgatcaacttcatggaggggatgggacatacaaaaatagcatggaagatgacctagcttccagagaacctgttaatgcatgactttgcatttcctgctacaaaatgtttaagtgagcagagcaatgggagggacgatctagttttctgcaagtagctgcctcagctcgttctccatggctacaacgaagtgtttagagttgcattttgcagcaatgaaatgctgatgtttcagaattttggtagtctgtcgatcatgggggctttttgttggtttagtaggcataagtagttcacaccgtaggacctcttatacaaaccccaaaaagtgggccaaatttttggtgtaaatacatgtgggaaattgctgttggcattttggtgcacctgaaatgttgtctgaagattgtcgatgaaaacagacttgcaggtagtgcctgtacagatataaaaatccatcctcatctgtttgactgttaaaaaaaaaaaaaaa

SEQ ID NO: 22114 - DNA, 3714 bp, Oryza sativa
  Clone ID: TF_OsC86365_1
atggatggtgttgacaaggataaagggaatgggaaggtgcatttcagggattcctctccccaggaagctttccgaacctacaagaggcgccggcagccacggccggagccgcaacagcaaccgcagccgcagccgcagtcagagccggaaccacagcaacagccacagccacagccacagccacagccacagccagaggcagaggcagaggcagaggcagaggccaaggctgcagatgttctggcacggcaggtgactgaaacattttggaaaagtagggacattggatggaagcatggcataatgatcgacgagaacagacaacactggaagtgcatgtattgtcacctgactagatatggtggtggtgtctctagacttaagcggcatcttgctggtgatctggatgtcaaaatgtgcccaaaagttccagctgacgtctctgaaaaaataagggagcatttgcggaagaaaagagaaaggcgaaagaagcgagctgcacaaaatcgtgataactgtgtgacggctaagagcacctctgatgatatcaagtctggcaaagatcctttacccgttgattcagaggtgctgactggagtagacactgttcttgaagaagttactaaccaaacgaaccatgataatcaggatcttacttatcccaaggctaccatgttgttacgagggataagagatattgggtgggagcatgcagtggatcttgatggaaataaaagacgatggaagtgcaagtggtgttctttatgtcgaagtggtggtgtaactacattgaaggctcatcttactgatagtagttgcccaaatattcctaaggaaatatcaaaaaaagtgttgaactttattgaagagaaaagggcagcacgccatctttttaatagcgctgcaaaatctcctttcaatgtcaaatttgacgaggatgcagttaatctctcagaaatacaggtggaaggtactccaccattgacagatgatcgacaacctttaggaaattccttgcatatacaaacatcagagtgcaccattaatgagtttgaaaaggtggcagctggaagcaaccaacagggtgcagaacatagcaaccaactacttaaccatggtgaacagctgatgaaaagcagcgatcaacctgaggagcactgcaccttggaacatggaaggtgccaagtacttgacaataataagcagcagactatggacaataaaactgataatccggaacacaaagaggtcttgaaacaccctaaaaaaactaggtttaacataaggaagcatatagttatcgttgatgaatctgcaaggcattggaggtgtagatattgtggtttggatgggtatggcaaaacgtctaggctccattttcatcttgctgctgtgtttcgacatcctaagtgcccaagtgttccaaaagaagtttttgcaaaggcacggcatcatattcacttaaagagaaggctcaatgtgaaaaaggctgggcaacaagctcgttcaaggccacatattcttgggcaatcgagtcagcaacagcagaacaacaatccggtactttccaattacccaacaagattgagggacaatgcatgggaacattcgcttattcatgacaaagagaagggccattggaagtgcaagtggtgcagtttagagggttatcatggcataactagattgaagtggcatcttgttgggtggcagaatcgtcctcaatgcctaaatgttccagaagatgttgctaaaactattcgggataaaatgatatcaagagagaagcagaaagaaggaagattgaatcttgatgttattgacagttgcaacatgccatgctcttctgagagtttacagtttgatcaagagaattttgctgaggtaatgcagggaaaaggttcttctgaagattttaatcaagctgaaagacaatcaaacacattgaacacagtatgcaataccactcatcctccacagaacagcaacaattatcagggacttcaagaaaatggattatatagtagcaaaaacaaatctgagaagcaaactgaaagatatgactgttggagtcactggcgatatgttttagatggactgatgcatttgccaggtgcactagagggtcctggcattcagagttgcatccgtgatgtacttctttacggttctgctgaatttggaactgttggggacaaagtggaaatggattccaacagaaaagtgtcaagtgatgggaatattgctaagtgtcagagtgttcttgtggatgttttaaagtcagagaattttgccttattgtgcaatgtgcttggcagaactgtccatcaagatgagcaaaggactaagtattttgattttaccatgattgactcaaggatgaaaaatggagattatggccgtgcaccattattattcaaacatgatttgaaaatggttgaaagagagaggggatcagatgatagtgaagagaatctgaagggagctgcggcgaccaatttggaacccatgaacatggtcaagtcaaatgcattggtactttcaacctcacaaggcttcaaccagttggatcaaccagatccaatggatgtttgcgatgaacaaaacggtactaactgcaatgaatgtggcaaggtagcgaaaattgatagcatcctcacatgcaagagatgcatgctagcattccacgtctcatgcattgaacctcctgtgccatccacttcaactggaagctggtgttgtaaaacctgcagcaccatctgtaacgaatcagctgaagttggcatggccttggtccattatgaaccaaatcgtttgcacggacattgcgtcgcatgcaaggaccttgagttttgcaggcctccaaggtgtgaggaaactgccagtgaaagggcacctgctgataactccagagcaattgtgattcccagtgcagagcctgttgaggatgtggaattgtcagatattgatgtcaggggcttatgcaagatgtgtggaaatcccgaggagaaggacaagagattcttggtatgtggtcacacccattgtctatataagtactaccacatttcttgcctgaaggctacacagatcgctagtgacaagcagctggacaagccctgctggtactgcccatcgtgcctttgccgagtttgccattctgacagagatgatgacctgaccattctgtgtgacggctgtgatgaagcttatcatctctactgcataacaccccgtcgaacttcaatacccaaggggaaatggtactgctcatcatgtgcgatagagagagcaaaggaggggatggcgcggcatgagaaaaggatgctgaaactccataggaaggatgatcctgggctgcaaggcatgagatatgaaatggtggacatgatactcgctgctgcggagatgcttagcgatgatgagcagcaggggacctgaatcaccttttcttttttcctgatcaaacagaatcatttaggaagttgaacctgtcatcttttttttttttgcttcacctcatttaggttatacctaattaaagttaaacaacttgtcgtcgtcggaagtttaagggatcgagttaagtactcaggtggttgaatattggttttgtctggggaacagtggtagcgaaatgtcgctatattgtgtacctgtgggtgcaattttgtgaacaggctccaattgaagtgaaaaatgctgaagaatttc

SEQ ID NO: 22115 - DNA, 5967 bp, Oryza sativa; identical to SEQ ID NO: 12702
  Clone ID: TF_OsC296057_1

SEQ ID NO: 22116 - DNA, 503 bp, Oryza sativa
  Clone ID: TF_jC-osleLIB3474049f11b1
aaacgaagtcttctgagcctcgggcgaagcagccaaagccgcagccccagcccccagtgaagaacgaaggccgcgaggaggaaggcggcccggacgacgaggaaggcggcgttggcggcggaggaggcggtagggaggaggagcacggggagacgctgtgcggcgcgtgcggggagagctacggcgccgacgagttctggatctgctgcgacatctgcgagaagtggttccacggcaagtgcgtcaagatcaccccggccaaggcggagcacatcaagcagtacaagtgcccctcctgcagcgccgccgcgggccccgcgctcgggctcaccaagcccaacgccgtcgagccgccgcaggtttcatttgctgctaaagacgtcgaattctccgaatggaagggagacatcctcgcaatcgcagtgacagagaatgatctggtcaaaggatcagactccaaattcgagaatgcggtgttgaagaagctcgacggccagctcggc

SEQ ID NO: 22117 - DNA, 459 bp, Oryza sativa
  Clone ID: TF_jC-osroLIB3475012g10b1
cccacgcgtccgcccacgcgtccgcccttttttttttttttttaacacaggaaagatgaagctttaaacacaggtaggttaatcaacagttacagtttaaaattaaattagagacaagcttacaaactagaaaagctagggcaagataatatctaagagatcatgacatccggagattgacaactccactctaacacagttcgacacagcttcttgttactcatgcccgggccctcttgttggtgcagtccgggcacttgtactgcttgatatgctcggcacgagcgggtgtgatcttgacgcacttcccatgataccacttctcgcagttatcgcaacagatccagaactcgttcttgccatcgttggttccacaggtcccacacaaagtgttgccatggacatcctccttttcctgtccctgatcatcaccactttccctcttgatccttgggggct

SEQ ID NO: 22118 - DNA, 2016 bp, Oryza sativa
  Clone ID: TF_OsC5969_2
aattgcaaaggctcacattcatatttgaatccatctttacattggatattgaaaatgaaacgacacatggtaccaatcactcatctgcaacgacagaactaaaaattggtgccgctgcaggctgctctcttttaaaccccctccccctccaaaagataccaaaaaaaaaacaaataatgtcagaataaaacgcggcgcagcacacaccccagctcctcctccggcgacgagaaaaaaaaatggacgcgcagtacaacccgcgaacggtggaggaggtcttccgcgacttcaagggccgccgcgccggcctcgtccgcgcgctcaccgcagatgtggaggatttcttccggcaatgcgacccggaaaaggaaaacttgtgcctttatgggtttcccaatgagcattgggaagtaaatttgcccgcagaagaggtgccacctgagctcccagagccagcattgggcattaactttgcacgagatgggatgcaggaaaaagattggctgtccatggttgcagtgcacagtgatgcatggttactttctgttgcattttactttggtgctcggttcggatttgataaaaatgacaggaagcgcctgtttggtatgattaatgatcttcccacgatttttgaagttgttagtgggaagagtaaagccaagccaccgagtgctaataaccacagcaatagtaaatcaaaatccagcaataaaacgaagtcttctgagcctcgggcgaagcagccaaagccgcagccccagcccccagtgaagaacgaaggccgcgaggaggaaggcggcccggacgacgaggaaggcggcggtggcggcggaggaggcggtagggaggaggagcacggggagacgctgtgcggcgcgtgcggggagagctacggcgccgacgagttctggatctgctgcgacatctgcgagaagtggttccacggcaagtgcgtcaagatcaccccggccaaggcggagcacatcaagcagtacaagtgcccctcctgcagcggcggcaacggcggtggcggcggcgtcagcggcaacggcaagcgtgcgcgcccgtcctaaggtgtggcacggcgagcccacccagagttaggatttgggctcgccgtctggtaggagcagtctgcatagtgcggtccagcggctattcttatttgcaatggctgtaactcgtgaggatgatttttaactttgttaagttattgtatggcagtggctgtaacttgtaagggtgtttttaacttgttaggcatgcagttgggcggccccttagggggctaagactgcttatccattgtactcctaatctaaccttaatttggtttttttttaattaataagaagatgaaagtaatcggctaatccacctaaagtactaaacgagaagccattataagccagtacctcgtgagagatgagagaagcaaaaacacaagcacgcatgcccggagtccactgataagtgacaacccctatgaagtgattagtgatattcgcatcatgttagctgaacagtacactactaatgcacgggaagacgactttgatgcaaaacctaatgacaaggacaaccagggcgaaggaaacgtggcctggggtggtataaacaaagaattgtacagcttacaagttacaatccagaattaacagctagcaaagcacatattgaatcatgctgatattgggatgaggtgtagcaaagcgagcccatcaacagttaagatttgggctcgccgtgtggtaggagcagtctgcatagtgcagtgcagcggctattcttatttgcaatggctgtaactcgtgaggatgatttttaactttgttaagttattgtatggcagtggctgtaacttgtaagggtgtttttaacttgttaggcatgcagttgtgctgccccttagggggctaagactgcttatccattgtactcctaatctaatcttaatttggtttttttttcactacagtagatggctgtatttagctggtctaccagcttact

SEQ ID NO: 22119 - DNA, 1301 bp, Oryza sativa
  unsure (1)..(1301): unsure at all n locations
  Clone ID: TF_OsC170376_1
gccccggcatcggccccgcgcgccgtcgactctcaccggtcctgctcggccggcccccgccgccggaggagggagagggtgctcgtcgctgcggtgcggccgcaatggcccccgcggcgcaggtggcgtcgaacccgcggacggtggaggacatcttcaaggattactcggcgcggcgcggcgcgctcgtccgcgcgctcacctcagatgtggacgagttcttcgggctctgcgacccagataaggagaatttgtgcctgtacggcctcgccaacgggagctgggaggtggcgctgccggcggaggaggtgccgccggagctgcccgagccggcgctcggcatcaacttcgcccgcgacgggatgaaccgccgggactggctctccctcgtcgccgtccactccgactcgtggctcgtctccgtcgccttcttcttcgccgcgcggctcaacggaaacgaacgttggcgcatgtgtctgcatgtgcacatgtatcccgtgctcttctttttgtttcctttctttgctttgagtgaattggagtcatgcgttctggatgtgctggctgtagtgtactggccgttctattttaagaagtctgcgtatgctatgtcctggaagcggctcttcaacatgatcaatgatctacctactgtatatgaagcattggttgacaggaagcacgtcagggataggtctggtgtcgatagcagcggaaaatccaaacattcaacaaagagaacaggcgaagggcaggtaaagcgctccagggttgtcgcagaggagtacgaggacgacgacgaagaacacaacgagacattctgcggaacttgcggtggcctctacaacgcgaacgagttctggatcgggtgcgacatctgtgagcggtggttccacggcaaatgcgtcaggataaccccggctaaggcggagcacatcaagcactacaagtgccctgactgcagcagcagctcctccaagaaaaccaggctatagagggtgtaaagttggtggtgtggtgccagtcgtccgtcgtgacccagtcgngagtcaaacgacacagtcgtggtccgtgccaccgtaggaaaaaaaaagagtgggtgaagctggtgtcgttcgggtccaantggtcggtagcgttagcgtagagtggtgaaaggtcagtcgtagacaacgttggtgcgtggtgtgggtagatgaggccaaaaagagtgaactgtaaaagacgggaaaaacgtattcgatctttagctttgttttataaatgttttcttcatngtccaaaaaaaaaaaaaaaaaaaa

SEQ ID NO: 22120 - DNA, 3313 bp, Oryza sativa
  Clone ID: TF_OsC1283_1
ccggccggggagctcccacgggtggagaggcagccaaggatacgatagcaaggaagagagagcgttgaagatgctgctgaccaccccgttcgtgtcgtcccctgtgagggtccagggcaatgggggcagcggcgcctcgccgtgggcgggcgcggcgacggcgctgaggatccaggcggcgaagcagctgacggggcgtgtggtgacgacgaaggcggacaagacggtgggggtggaggtggtgcggctggctcctcacccaaagtacaagcggcgggagcgcatcaagaagaagtaccaggcgcacgacccggacaaccagttcaaggtcggcgacgtcgtcgagctccgccgatcccgccccatcttcaagaccaagcacttcctcgccgtgcccatccccccgtgcgtcattcgccgcaagtcccagctcctcccgcatctccagtcccagtccctggcccaagacccgatccagtaacctccgcctccagcgcctacagcatcccaatggtcgtgaacaatttgataaaatcctcgtaggttgtttaaggaggggctgggatactaacaaaagagtgcaggaggcggcgtgttcggcatttgcaacgcttgaagaggaggctgctgaagagttagtaccacacttgggaattattttgcagcaccttatgtgtgcctatggaaaataccagagacgaaaccttcgaatactctatgatgctctcggcactcttgctgatgctgttggagctgagcttaaccaggcaaaatatctagatatatttatgccaccactaatcacaaaatggcagcaacttgccaactctgataaagatttattcccactgctcgaatgctttacatcggaccaggattttcatgctgagccagtatttcagagatgcattgttttgtgtctattctttactatacgttgggagaagcaaagagaagaaagctcatcgtgcagcgccagggtgatttttatgatgtgatggattcgttagttttgtatgctccactgctagtgatatattggttcgacaggctgctgtctgagagcatcatgtgcgttgtcctcagcacaagtgagtggtaagaaagaattaccacgacagacagaatgaaggctagtaccttcccttttggtttattgagtcgattgggtcgaagagctgtgcttgattgtaggttctattgtactggtcagttcagtggactcggttatgtttttttgtcactccactggcactggcactggcaccccagcagcaacatagagttgttggaaaggttttgtagcgtgtattttatgggtccaagagtttaggtgtagggtcttctctcttttattttattttttttccttttgtgctcgacagggttgtattgattcattccccaataaaaaaaaagtattgaacaaaaaaaaaaaaaaaagacattgtggccccccacatggaccatttcatgcaagcctggtgcaatgccttgtgcatgatacgagatgattgtgacaaacgtcgtcgagctccgccgctcccgccccatctccaagaccaagcacttcctcgccgtccccctccccccgcgcgacacccgccgcaagtcccagctcctcccgccttccattgatttttatttgctctggatttcgaacttccccagcattggcagctgtaattccatccaatcttttagttagcaaggatgttccaggaaataacatcaagttcacattacgaagttgtttcttctcattatcttcaatgggtttgaaaccaaatcctgacacccatgtattaaccaactctgggatggcagaaaggaccaatgtctcaacatggaatgatctaagcatcatttcaatggtgtccataagtcttcggcacattccttggcggcgataatccacagaagtagcaataaatggaagctcagctgctttggtcccatgtactctgatagatgctacacataaaatctcatcacctttctccaggattactgtatagaacccctggtaatctaagcgagcgaagtttgatctggtattgtacaagacatgcggtatcatgtctacaccagttctaggatccaccatgcgaacaaaacattcctccaatatagtaagagccacagctaattttgtattgcattctgtcatatgcgcaatcttcttggaagaatgtagcttctgcccatcagtgttgcacttcaatatgctccatgaaagctcgttgtcaagaaaattctctattccaacgtgattgtgtaatccaataaatatctctttacagtatctcccacaaaaccatatgttggattgtttatccccacaggggagcatctcctggtcaatgcaagtatcatggtatgaatctccacactgcaaacatttcaagatagccgagaatgttgaaacctccttttcactaagtggattcccacaactccggcatgtgcagttatggcagtaccaactgccttctggaagttcctggtcagacaaacaagtttgatgatatgttgatgggcaattgtcgcagcaaagtaattcaccaccatctccacagaaaccacacgtatcatcattttcatccatcgcctcaacttttctaccagatgcatcacatttcctacttagaaattcagcagaccaagcttctacctggcatagagtgtacgatttgccagactgtagaaagaggcccaatgaggactttggtaaactgcaaccgccatgaaccttgaagtctgatatagaaaaggtcttggtgcaacaattgcacagaatgccttcccaggtaacctgcccatccttaacaacttcgttgctcttcagattctggtactgtataacatcttttacggtcagaaagccagtggcaatcaaccagcagagaactgttttccgtgccaaacttactctcttcccacccaacagatttgatcctccttttccggacattcgagcaagtagcctgccacatttctttgagctcttaaactttgtaaacttctttgcatagccaagatccctatttttcaccatagctgtgatcaaaagatcatcgtcattgatacgtaacacacggggccttttcttggcatacttctcccaagcttgaggttttcttttagcagcaactgccttttgcgcctggcgtaccaaaattctgacagaggttgtcaagttggacaaagtgagcagaagcagtagagtcgcgggacaggtgaggcagaagcgtagtatcatagactgtgttgctgtagagtgagaagtggtctggtcctgtgacagacagat

SEQ ID NO: 22121 - DNA, 3288 bp, Oryza sativa
  Clone ID: TF_OsC45337_1
gcactttttagaccaacggatcaagtcagccgtaagcaaaaggagttgaggaaatgagagctgagataactgcctggtgacgtctctggtggcgacggcgacggggtcctccgcgtccggggtgctcggcgggggcacgttgatgtcgagcggcacggggccgagcttccacctgttggtgcgggcgccacgcatctcgcactcggggcatatccagtcctcgttggcggtggcgcggggccgacgcgcgccggggggggccggcggcggcggcggcggcggcatgagcggcggccagacgcggacgcaggcgaggtggaacccgcgctcgcaggagtcgcagacgatggtccccccggggttctcggggaggccgcacgccgcgcacgggggcggcgggttcccacgccctgcctcccccgggtgccgcgccgccggcggcccgaacggcggcgccctcgccgtcaccgactcgatcgcgctcgccgccgccaccctcagcgcctgcgcctgcgccaccgcgtcccgatggatccccatcgccacctcacgcgcctcgtaaggaagcatccccacctggctcaccacggcgccgcccacggcggccggggccgtcgggcgaggagagcaacaagcaaagcaaagcacgagcaaagcgaggagagggttaagcgaggagaggggaattcgcggagagtcgagtcggggggccaggtgtggggcggatgatgaggccgtggtggagtgggacccagatgtcggtgactcagatgcgggccgcaaaaggtcagaggtttctcgctgatgaggccttcctcctttgcggttgtgccgctgacgtgtgggctgcggtaggtgtgggacccacgtgtcagggagtcggatgggggccgcaaaaaagtcagaggtctcgctgtcgatgactgcgcggggggtggggtgggggagcgtggacgcacgggttgcgcgtgccccggtggtggtggctgtgtccgtccgcgcggctgtttctggtggtgatgcgctggtgtgttttggctggtgtacccggcgcgagaacccattagcaccccgggaaggggtatatgtgttctcatggtaagtaaaacgggttgatgtgtatctatcgatgaggatagggactttgcaggttgccttgttgtgcccataacccttacacctgctgcagcgcaccgcccttttgattgcgattcgaggatcagctggcttttcctttggtcttccaacctgcctccgggttagaatcggtgattgatgtaatgcctcgccttgtgatgggtcagttgatggagcagccacaacaatgtcaggtattggattgattgacatggcataggtcaagcggtagcactctgttgtgaaatacttggcacagaagtcaagtgggttatgatcagtgcgctcaaacaccgcaattgcatgtgagcatgggatcccagagacatgccactttctgcaggtgcagtcccatgtatcaatgttgacaacattgacagcgccatcgcatacctcaaacacattattgtttccgtcattgcctgttgagcaaacaacactgtgtgtaagagctttgcccatctcttcctgaattttctgattggttgatggagttagcggttccgtccatgaattcgaatattccctgcgcgtatacatcatctccatcaagttgcatctgattgtatcaaccaactgcactactgagagctcatatctactggggacccactgaagaattgtctcgggaacattgcaggtgtactggccaagtcgcgaccccttgaagaaggcatctgaccacttctcaggtttagtctccaaaagccattcagcaagcttatcagattcaactttgatgagttcaatacactggttgaattcatcaactttgcatgaatacatggctttcttaacatgctcaaccattgtatcttttagttcttcactccaactgtcatccaattgtgccttaaattcttcaataaaatagttgacatggtagccatgatagctatctggaaatataagagagacctcatccaacagaccacatttgccatttgatatgaatgttagttctccagacacaggcaatgaagcttttagctgttcaagaaaccaatgccaattttcttgactctcgtcgtccactacagagagtgcaactgggaacatatcgccttcaccatcaactgaggtagcagccaacagcttccaatgcttgttcggtttcacagatatcacatcaagaaagaggagaggtctgcagccatgcacaaaaccttgaatggaggcatgaaatgcaacaaagaagcggaattttgaatcttccaaggcctctactgttgccgcacttccagggtttgtctcgacaatcctttggcaaaaccaaggaagctggttgcatgcctcttcatgtgaactgtatagttctttctgggctattgatttgcctcgccaagcttgggagtaattcaggcttagcccatattcccgctgaagatcattagcaatatctcttggcctatagtttggactatcacgcaatttttccttaataacactggccacccacttttgagacgctagacgatgacttttgactgactctgattcacatgtatgacttccaaaaactttcttaatcatgaaatccttctttgcaggagacttggatgcatgtatacgccatggacatccttcagcggtacattccacagtgacacgagaagagtcattcttgacaaatctgtaatggaacctatgtgcaatggcatacttgtgtagtgcatcacggaattcctttggaccttcaaacacttgaccagctccagtaatcgcattctcccaacttgcacaaatcttttgcctcttagatccatctggagtagttgctgctacagcatgatctgcagaagcagcaggcaccacggcagatgtttttaccctgttgtcagccttcttcatgacataaatatatgttgtctctgactctgcatggaattcaaccatgcgttttaggtctttgtcattggaaattgaaatcaaagtcttgttattcctcggaaggaagtacttgaacacataggagtcaagtttgaggttattgagcgttgaagatatctcatgtttgaatgttttaaaagtccaatcacttttcacatgcatcgcgtgcgcctctccaccagaataggacatctgtccatcatcatcagttttgaattctccacctacttgaagaacagctactatctgtttgctccccat

SEQ ID NO: 22122 - DNA, 626 bp, Oryza sativa
  Clone ID: TF_OsC5969_3
ggcggcccggacgacaaggaagccgccggtgcggccgaaggagccggtagggaggaggagcacggggaaacgctgtgcggcgcgtgcggggagagctacggcgccgacgagttctggatctgctgcgacatcttgcgagaagtggttccacggcaagtgcgtcaagatcaccccggccaaggcggagcacatcaagcagtacaagtgcccctcctgcagcggcggcaacggcggtggcggcggcgtcagcggcaacggcaagcgtgcgcgcccgtcctaaggtgtggcacggcgagcccatccagagttaagatttgggctcgccgtgtggtaggagcagtctgcatagtgcagtgcagcggctattcttatttgcaatggctgtaactcgtgaggatgatttttaactttgttaagttattgtatggcagtggctgtaacttgtaagggtgtttttaacttgttaggcatgcagttgtgctgccccttagggggctaagactgcttatccattgtactcctaatctaatcttaatttggtttttttttaattaagtagatggctgtatttagctggtctaccagcttactactgcgtcctgtgttaagagtttgctttcttgctc

SEQ ID NO: 22123 - DNA, 4767 bp, Oryza sativa
  Clone ID: TF_OsC13101_1
atgaaggattacgataagtctacttcctttgaggtggacgactctaccattgatggtgatgtggagcttggtggagggctcactgtggtggggaatgagaggaatgatggaaggggtttcgttggtgagaatggagcctcgaacaagaggagtttgaggtataactcgatgctaatgcaggtgtgtgccgaaacagcggcttgtgtgtctctggatttttgcaatgatgagactttcgagaagtaacgttgtgataagttagcagagggtgatagggcagggttgcggacatctcttgcatacaatgctgagctcggtgcggcagaaaattgtgcgttagagtgcgatgctgggtttgatgcaacttgaaattccgcaaatcatgtgtaaggtttggatcttgctgaggttggaagtgttccattgaatgggatggacgcatatattaaggaatctgaaggttagatcggtaagttagatgactgactggttaccctttcagaggagccgaatgaatctgggggaggaacaagtgttgggggcatcaatgactcccaggaaaacaaggcggtgaatgggctttgccagggattggtcatagccccatttgatacagcaaacggtaatgcatggaccatcagaaaaaaaatctcagatagtggacgagaatctattgagcaagaggataccgtaatgtgctctaatgaagaacagaaagttgagaaccattgccagtttgacgataagcataaagaagctgaaatttctcagattgagctcgcagttgataaccacattatgctaactgattgcactaaccaaaagaaggggatcgacagtcctgtgaatgaaaccaagggggattcaactcctgacattgtttttataaggagaaaatcaataactagaaaaacatgtgaagcgaagcaggtgaaatctgaagatgaggttcgatttgagaagcgagttacaaggtctgctactgttagacagagagaggtttctgctagcatgtgcgtaggtgctacaaacgatgctaacttggaaagcaaagaaaggaaggaagatgttcatcattatacaaggaaagtgggcagcaccgtgcgctcaaaagttcatcacacaggggtggcagaatgcgacactgatacaaagaagaaactaaaaggaactgttaccactcgaagaaactcagatgccattgctaatgatgatcctccaagtatcacgcagaacaaggaatcaaaaactcagatgaagatcgatatcaagtctcaaccactcacaagaaggggcagcatagtaaataaaacagaagacgcagtttctgggttagaccagaatatctgtagttcagccatcactgataaaaatgatatagagctcacagattctgaaggagttaaatctgagaacaaggccgctgtgaggaagtcaatattatcagttggcgctaagattgttgccagtaagaagaggatattggaatcaggacttgataaagctagtggagagtcaccagttgcaataccatccctaaagaaggcaagagatacatcctcagacactgagctagagcaaccaaaaatgtcttctggaaagaaacttaccagaaataactgtggctcaagtaagaaaggtatgtcgacaagacggcaacatcagagtcaaacagctaagttgagtacatctgtgaattgctccaataaaaacgaatctaagctatcacagaatgaatccgatgatgatggaactggcagtgatacttccttgaagaacacttgtgtaagacgtactcgaagtggtggtgttgtccccaaaaaacaagaggattctagtgaatctgaggaaccgatcatactgagaaaaaatcatcaaagaggaaaatattctgggaaaagggctggatctacaccaaggaaagttaaagctcccaaaggcaatagaaaggaagtcaaggcttccagtttgaaatcttcgggtccaagtgagcagataaatacaggaagtcttcgtgaagaaaaacaaaaaataagtgatcatatcaagggcatgcttctagatgctggttggacgattgatctgagacccaggaatggcagaaattacttggattctgtgtatatacctcctagtggtaaaggatcttactggtctgtcacaaaagcttatgctgtgttccttgaaggtatggaatctgagaagaagggcagagctaaagatcagcgaccctcaaagaaatctgtaggtagccctgggaaaagtcatgtttcagaggaaatccttagcaaattaaaaagaatagtcgttaataaacgaagaaccaaagtagaacttcagaagttgaaaaagaggaaacatggtttactgaaaaagcagaaaacttccaagcgcaactcaaggggttccaaaaataaaatttcaaattctagaaagttgcatttaggcagcgaaagaaaaaagcgaggtggttgtgctctacttgctcgtggatcaaataaggatggtggaagcagcactaacggttttgttccatatgaatggaaacgtacagttttatcctggttgattgatcttgatattattgatatcaatgcaaaactgaaatgtgtggatgaaacccactcaaaagttttactggaaggtgtaaccactagggatggaattaactgcagatgctgcagcaaggtctttacagtacttgaatttgtggctcacgctggcgggccagtcagcaaaccttatagaaatgttcttgtagatgggctggacactgaccttttgcattgtctcattaatgcatgggataagcagtctgattctgaaaggcaggcctttttccctattagcactgagactgatgaccccaatgatgacacatgtggtatttgtggtgatggaggcaatttgatctgctgtgatggatgtccctcaacattccacatgagttgtctagaacttgaggaacattcaaggcaggatgctcaagacattgctgaggttgactcttcactctgtacttgttcccagtgcgaagaaaaatatcacccaggttgctctcctgagactactaacacatccaatgtctccagtcaggcatgcgatttattctgccaacaaagttgcagactgttttcaattagatttctgggcggcaatgatatctatggaactgtcaacagtgctctcatgcagtcattaagatatatctatagtttattttcctgtgatattcattataggggaaagctgtttgagggattgcgtaatcttcttgctgtgaagaaggatcttgaaccagaattttcatgcagaattattcagcgtattcatgaaaatgtaccagaaacagttgttgctttggatgagagggttgagtgtaactccaagattgcagttgctctttcgttaatggatgagtgctttcttccgattgttgaccaaagaactggcatcaacttgatacgtaatgttgtgtacaactgtgggtcaaattttgttcggatggacttccatgggttttatatctttgttttggaacgtggagatgaaataatagccgcagcatcggtcagaatacatggaaccaagttagcagagatgccattcattggtactcggaatatgtatcggcgtcaagggatgtgccgcagactgctagatggaattgaaatgatcctcagctccctcaatgttgagaagttgataattccagctatcgctgaacttgtggacacctggacatctaaatttggatttagttcacttgatgtttctgaaaagcaagaagtcaagtctaccagcatgttagtttttcctggaacaggtcttcttcaaaagccattgctaaagaaaacttcacctggggaaaattcaagctctcaagaagttgatggtgttttctctgagctcgagtctgggaaaacttccaatgtggccaatgaagactctctttgttctgcaaatgctgagactcaaggttcggctgccccatgttatggggacaacagcaaagatgctagtgcttgcaatgattgacatgcttcctttgcattattttgtccctgtcaaaaggtgcaccctggtagtttcaagcattgacagatactattgaggacatgaagcacaccgatccttcattgttactattattctcttttgactcggcatgcggttcgtcggttggcagaagtagcctggatagagagggcgagtttttgaagatcccttgcagagcagcagcacctcggttctgctcaatattgatgattcaattgactctttggtttcggtttgacttgaaaccagcctgtgcagggttggactccgatcacctaactttaagtggtttacctttacctgtaaagtcagcatgtagaactgagatgatagttttattccgtgttttttttttctggatggttaacttagtaccaaaggccaacgtgtgccgcaaaatcttcgtacatgtttctttacctgctatgtgacagtagctttgtttttgctagcccatttttttgcagccagatctcatctgtaagacactaatgcatgggcaagcagaaaaaaaatctcagatatgccacctgttctcatgttggaagtaaatctgataatgttatggcatctatcctcgtgttcatgcagatgcaaggtgcttttgttcgctgaatcgaactactgatcaggtgagatgtggtcaaagatcgcaaggttataatcactctggaaagcatttacttggaatcatattgtctatctgct

SEQ ID NO: 22124 - DNA, 2944 bp, Oryza sativa
  Clone ID: TF_OsC97719_1
atggggaagggaggggaaggggcggttcccgtgggggagagcggcgggcggcggcggaggaggccgggcgaggacggaggcgacgacgacgacgaggagtatgtggtggaggaggatgaggaggaagagtgcgacgaggatctgtctgcctcgagcgccggcgagggaggagagggcacagacgaggaatacgaagagggtgatgaggacgaagaggaggatgagaccccgcggccgaggcagcctgtcaagagccgcgagaatgggcggaaggggaaggcagacccacccgttgcgcgatctcgtcgacgtaagtacgaggatgacgatgactactcggaagaagaagacgatcgggtcgacgagtacggcgaggatcttgaggaggaggaagaggatcttgaggaggaggaagaggaggacgatgaggcgccacgatccaagcgcatgaagaaacgtggtggccgcaacgtggaggggaagcttcctctggagcgatcaaatcgccggaggtatgaggaggacatggactttgaccctgacatggatgaggaggaagaggaggaggatgttgatttcgatcctgaagtggaggacgaggaggaagaagattttgaggatgaggaagatgatgaattggaagcgactaaggtgagggttaagaatatggggcggcgaaagtctactttgaatcagcgacgagggaagatgaagagcagctctaaggtggccagtcggaaggtgggttcagtcaaggcaaggaacgctgcgtctataagacggaggcagaaaaaacgttcaatgcttgatcgttatgaggatgacgacttcattgtggaggacgaggttatggctgattggcaaccaaggaaaaaggctagaattaggaagcagatggaggttgatcctccgacaccagtttttgaggctgagatatggcctactattgattcagacacgacagacttcgaatttgtaacatccgatgaggaagcagccattgctgagcctactagggttattaagaaggggaggaagaaaagggtatttgtgtcagattcatcctcagattctgaattcgttgtatcagataaggaattggggaatttgaaggagtctgagcctccagagtctctgaaagtgctgccttcatcacccaggaagatttctgttacaggtaatggggagcacaaggggaaggagaaaaaggaaccacaggaggctggaagggcaacgtgcgggatttgcctttctgaagaacagagagtgactgtgcagggtgtgctggattgctgttcacactatttttgctttgcatgcatcatgcaatggtctaaggttgagtcaaggtgtccgttgtgtaaacggcggttcacaacaatcacaaagtcgtcaaaggaggatactggtttggaactgacaaattctgtaattagggttgaagaacgtgatcaggtttatcagcctacggaagaggaaataagacgttggctagatccatacgagaatgttgtgtgcatagagtgcaatcaaggtggtgatgacagtctcatgttactatgcgatatttgtgactcctcagcacatacttactgtgttggtttgggaagagaagtacctgaaggaaattggtactgtggaggttgtagactcgatggcgaagcacattcataccataatcatgtgaatggcaattctgggatgtttggtgcaatttcaccaattggcacttttgaaaggcaggggattgatctaaatgtatctccaagagagattcctaggggaaatcattctgttgagtctcaagcttctactgcaggagcatcaactccatctggaaggcagacaaacgcaacgaattttagaagacgtcaaatgcatgactggatacgcagtttgctttctagaccaaggacaacacttgggccagttatgcatcataatggtgtgcatcagagtggttttgtaccaagcactgaaccagaccacatgaacttttgcgcaccattagaatctgacactttacacaacactgggtctgtaccacaaagtgaaccaagccagaacttccatgttatgtcagaagccaacacttcagagacttcctttggaaggcatgcagctctttctgaaagacgtcaaatttatgaacgttttttcatgttgctatctagaccaagcccgactattagaccggacttgtgccataatgcctcagagcatggtagttctgtaccaagagttgaaccaaaccacatgaactttcatgctccgccagtagccaacagtccacaaactctgcttgatggcattccaaaccgcagcaatggtttttcttttactcaggctcacagtaattttgtagatggaaacaacttccaaggaactgaaggtgtctagagcaacagcaacttgtcaagcaaatatgtatgcagagtacaagtacttgctagaagaaacccacaaacatattcaggggagtaaaatgtgcccatcgatgagaggcttatggaaatcgagacaaggggacgctggttgtcatcccttcatgtcctcctagcaattgctgtcattctccgggcaattattcttgttgaaaatagctgttcatcatgctgcttatctgtcagcaatgtgatcgatgacataaacggcatgcttttgtaaagtttttctgttttagactaggcatttatatctgctgttactgccatttgttcagtcgtaaaggcgacctaaaagatcacacaacggccaagataatttggatagcttagaatgtatagattgtgccattggggaaatcaggttttaggaaggccattcattctgttgacacgctctttcgcccatgaatatttttttttctaattgaattgccctatttgtctcaaaaaaaaaaaaaaaaaaaaaaaaaaaaaaaaaaaaaaaaaaaaaaaaaaaa

SEQ ID NO: 22125 - DNA, 1279 bp, Oryza sativa
  Clone ID: TF_OsC9817_2
ccggccgggaatccccaaatcgaaggatcgggagccgccggattggtcctcaaatcgaccccaaatcgaaggattgagccagggacgccgccggatccgtcctctaatcgaccgccatggcgatcgcccgcaccggcgtgtacgtcgacgactacctcgagtattcgagcacgctggccggcgacctgcagaggattctctccaccatgcgcgagctcgacgagagggctcatggcattatgggacagaccaaagaacagataaagtatctactcggagtgccatcccatgggttcgacaggtcaaacatggatgatgatgaatctgcctcagagagaatgaaaaaggacatcgaagctagtcaggacaatgcgttgagtctctgcaccgagaaagtgttgcttgcacgccaagcttatgacctgatagagagtcatatcaaacgtctggatgaagacttaggccagtttgcagaagacttgaagcaagaaggaaagatacctccagatgaaccatcaatccttcctgcaatttcagcatttagcagggatgacaaacggaggcctggtttcagtacacctcaagcaacaaagaagttcagagagagggaatgggacagggaaaggggtatggacttcgacttaatgccccctccaggtagcaacaagaaaacaactgcacctatggatgtggatcaaacaattgatccaaatgaaccaacatactgtatatgccaccagatttcatatggtgatatgattgcttgtgacaatgataactgcgaaggaggtgaatggttccattacacttgtgttggtctgacaccagaaacgagattcaaggggaaatggttttgcccaacatgcaggaatctttaatgagaggttctccaaagttgtgcgaagcaggacagtggctccactgctcatgtgttagttcggcgctcggagcggtttcagaagatgcatgagggaatcctcagtaatgagttggtccaaagttggtaggatgcaaaatggtgacaactttggaattgtagggtgcgcattacttgacagttaacagtgggttaaggttgttggttcaccaggtttactttagtttgtccatgtatatgcaaggggcaacagtaagactatatatataaacttgttcaaaaatctctccctgtgagacagttgttcttatagtggtgaaatgctttactgctcagtgcagctgctgtagtctcccaaatgttggctaccaagtatccatttccatagttggtgaagcttcc

SEQ ID NO: 22126 - DNA, 3312 bp, Oryza sativa; identical to SEQ ID NO: 12720
  Clone ID: TF_OsC60785_2

SEQ ID NO: 22127 - DNA, 5261 bp, Oryza sativa
  Clone ID: TF_OsC77457_1
ttagttcaattatctcctgcagcttcttgatctacataagcaggggattctttaccctacatcttctcggttgaagtgataatcgtaggtaatttccttagctgcatttacgtggcgttacgggacgaacactacgttcttcgggttccttattgagtttttttttgtgacatattttttttgttgatttttaaattaattctaaatccattctaaatttaagtttggatgtctaaattatcagtgccagattaagtccctacagtttattcatatatacagtgcgcacattacaatgtttaaacagcactacaaacatacgaccgaagtacactatcttagttcagatatctcctgcagcctctcgatctacagaagcaggggattctttgcccttcatcttctcggttgaagtgataatcgtaggtaatttcctcccccggatttatgtggcgttccgcgaagaacactaccttcttctcgttccttactgagattatttttgcgacacagtttggttggcaagagtggttgatgaatcttgcgatcccacccttgcgggtggcatcgatgatatgttcctttccaatcttgaagaagtaacaagcactcttatattgctgccgtttcccggactggtattcaatctctcttttgtcagcaacgcattgcccaacaatttcaccaacatactcattttcattatgctcgccttctggctcactttgcaacaaacccctctgatgagcacaccaaggatgaaagagaactgagcaattaacatcacgacaccccataaatgagcccccagttctgttacacattgagcattcggtatttcttttggcaggtgaagcccctgatatatcaaaagcactcattgtgattgtatttgggcattttgtaccaggtgtccacaacccacagaccacatgaacccactgccttgttcgtggaccaagtagactggaattgcgattagaggtccacgacttgctgataatgtccccacgtgcactacctattgaagcttcttttataccaaaagaagatatagcattgaagcttcttgatctgtgtccattaaatgaatcatgcctgacatattccccatgtaacttgcttgtacactcactgttcacatttcctgatgaataaacatatttatctgatctttttgcagttgcaatacccctcagcaagcttttgagaatattctgggctttcaatgcccttgtcatagctccacctccataaccacacagaacacagactgtgtcctgggtattgatcttgcagggcttacagaaccattgtcctcttggaacttttagaacaccatagcaagcttggtgcaccttgataaagcacttgctgcactctatcaactgattggaaggctccaggtttgagataccacaaacacaacatgaagcatctaaactaggcctttgtatatatctctccatcctattaagagatatgcatgctctttgattcttacttcctctacttcttgatgctgacagctgacttgtccccatatctgcaaggctaagaggctcatcttcttcaagtacacagcagggactttggcagtcagtcttgacgtgtggcctcgagacattagatgaatacctattctttttgggagaccacagttcatcttgtggactgaaacttctgtcaccagaggaagatttatctgcagaaccatctgaactcttttcctcagaaaaatggatattttctgtcttactgaggggtttgatagcatgacatctcttagcctttttaagaatcagattgagtggaacaattttgggagatttccgattatcattagttattcctgtagcaatcaaactagaatcaatactggcactcccactacaggcatcttcactgttagtttcatttacaatgcaattcagagacacatattttggcagtttgcggacaagcaatcgactcccttgctgttggcattttgttctatccaaagtggtcatattatcttcttgcttttttctatcagaggaatttgattctccaacataaatgccctcatcatctgaccgttcattgtcaacattgagaactttgcagttgctgtgaagccgtttcacatgtttattcagatgcgtgggaggatgtttcctcttggtttttgatactctgcgtgaaaatggaccagccttatgctgcggttgagaatccccttcccgggatgacagatcaattttcctagtacaatcatcggattctgatttgtttgcacagcacctcaatgttcgtgttttctttgacatttcagaacattgtccctcattctcatgttctttccgtgtacttccctcagaaatttgattatttttgtgcttcactaaagatggctccaggtgaaatctagaaaaactattttgggcttcttcacatcctgtactaataggcaaatagctggatgaggaacatttctcaattcgtgacccttcatcaaacacaagatttttgtgttcaagaccatacttgttcaattcaggtgatgcagaaaacttggtcacaacatcgctggagaatccagaagagaaaccggattttagttctttaaatattccagaatctctacaagcactcgctttctcttttacagtttcatagggccaatggccacctacagccgatgcttctgttacattcttcagctgctgtaatgtaggaacacaaggtcggttcaatacttcagtagagacctcattctggaaagaagctttagagtcgctttttctagcaattatctcgcttgagcactggcatattaatttttcactctcccctagcgtgcaacatctggcagcagcttgcatgccatcatccttgctcttttgtactgtatgatcagtttgatcgattctagcaacacagtgctttgtaaatccataacctgccaaacattttggggctaaagagcagcagcattttccatcccggtaaggactacattctgtattattaggtgcatcaagcagagtgttcttagtcaagctgttggctgtgtgtcccatagaacttctgtagtacccatcaatgggacatgcatggcaacaggactgcaacataagctctctagaacataatgaggatcttggtatgaaagtagagcgggtgcgcacttcatctagccctatgggctggaactggagtgccatcattacagaaatgagatcggcagaaattgccagctctaaaaccaagtttggaagaatcttcttgagctttgcaacagcatctatgcattgattttccgttctatcataaaaacagggagccccagtctcagaatgtgcaagatgggatttgtcagcaacatgattacaacacctgcaattcactggagaagaaacttctgcgcaaattttggagattccggcgttaggttgactaggcagcaaatgtggcaggcagtccccatttattaaaggctcttgactatttgcatgaagtacatcttgatgaacatatcccttggaagccactggaactggaagagacctgctatctgatatccttttcgtgtgaataatggcaggtgccaacttcaactgattatcatttgcccttgtctcaacttgtgtacttgcagtttttaaacgatcggaactatatgcaacatctggagccttaagaaggtaatgctcattactgttgagaacatcatcaatggactcagatgtactatttctctcaagatgtgaaagaaataatgaaataaatgaattctttgctgcatcatctgtaatctcattgagttcagaatggctggttccattagaaacatcaagtgatcgtttcctattacctgtaccaaatgatggctcaatgttttctatagttttgttggctttggtagtttgcttcggataagcatctgcaccaagtgattctgaaccatcttgaattattttgtgaggtacatcaggcatgcatgccctactgtcattgctcaaaactcttgtagaactaggaccaggactacgagacaagttatttaagtttttctccagaaagtttgcataatcatgtgccaaatgatttctactgtaagttattcccatgtttgctgttgaatatgttcgttcacttggcctgctaatagagttcatgttcatgtcatggatcatatgatttgctaagtttattttcgaactctgctgtatagctggattctttgagaaagcttcatgtaaaccgacactctttctataaaatgtttcatctggcttattcactagcttctcaacagaagtgaatcgtccaacctcattgtggatatcactggaataaactggattgtttatatgtccagtgctttttccatgtccactgaatagccctgttttttccatgttattgttcgttgtaaggagacttttagtccagtattcttctgaagaatatctcatatatgcccattctggccagtcccacttagtgtcagaaatggatgctccaacccccatgcagtacttgagccattgtacaatagtcatgccattatccataatgacaatttcaccagctttttctgcgggtcctcctgaatgctcacagaacttagccacagacattctcagccggtgacaaaagcaacgaactccaaaaatcccagcttcaccgacaaagaattcaccaccaacattcagacaggagacgcatatctgatcccctagaagcgcaggatgatggcgaggggttgattgggatggcaatttctgcactgcgcatgtgctcgagtcctgaaactggatggcgccttgggatatcccattgttaactgaacattcccctggaaaactaccctgcacatttgcacttgtgttctgaaacaacggccccaagcaggagggctgctcaacgctgctgctggcttccaagccgtgcctcggatgcttgggcagaggctccgcgcctccgagcggggaagcgcgagtaagatcaatgacattagcagcattgcctgcattgagcatgccaaacaacgccttccggtccgaaacatgggtggcatggggatggttcccagccacctgagcaagcaacgaggtgctcggcgccgctctcgcgggctggccgtactgcgagctcggatggcttgcggccagctgctccggcggcgccgctccctgtgcggcgaaggggcggaggatgtggcgcagactggcgctgtcaatctgcacacggacacagtagaacgacgccat

SEQ ID NO: 22128 - DNA, 3190 bp, Oryza sativa
  Clone ID: TF_OsC4368_1
acaggaaaagatctgaatattttgattatgccaccacaaagtaagttccaattatggtaccaaaaacaaagggaatgccaaacctatgtcaaaataaatgtacaattacgagggcatttttgggtaaatgtgagcaaagaataattagcatttctcacatgaaaaactgaggcaaatttttgcaattttgccactagccccgaaggagcacagttcgcaatccagtaccctggggcaattctaaatacaatcctcttattttggctgattgcccctcaacatcaacatcgtttacaactccacggcattatgggaatccacaattatggtgccgactaacaaaagtcgaatcaaaagaataatgtcagatatacatttacaattaatttttgtccttcttttgtaaaatgttgatatacacaataatgaggactctttcacatcaagaataacgattaggctcacaagattgtctaattgcaccgcaaaagcaccgtgcgcgcgtcacaaccctaacacactcataacctatcctgaacattcaggtccctgcacaaaggattcacgtgaagatgcccctaatctgagttatagggttgaactccatgaataaaccaattaacttcaccagagttttccacatatcaccttcaggcactaaagagttgtatatgcgccgctctctaatgtctgatattggtggcctgacgagctctccgatgtactcaatcatcatgtcgcctgccttgtgcgaaacctttgcaaagacaccaaatccatgaattcttgactttccaaaagctagtctcctcctgaatgtagccttcatgcttttatacttttcaatcatagaagacacgttgccaacagcttcttgatgtgcaacatccaaaaagccaactgattgaattggttcactgatagcatcatggcctactctattttggcagaaaccactaacaatataaggcatattctctacatataaacgttttacagaagcggtagccataacttgaggttgcttttggccccttctcccatggatattataaggttcagtccttgcacaaccggatggtggaactgcatctgtctgaactaccacagcaggcttagcaaggttactttcaagagatggacgttcagtcgatggttgtctgtgcttcttgcagtatgaaagtagacgaatacatgggtcctcatcctcatcaagtaacatgaggtggattttgtcatcatcttcaagctcaacacaaagatcagcagcacgtgcacaaagagggtgatatgcaacacgacaggtaggatgagaacactgtatgcaagctccataagcaactccgcaaatgctgcatagaagtttccagcggtccttgttgattctgctcaatccatcaatcggttccattctcttcacatcttttaagcaagtttctgtaccaaagttaggattaatataattaaaagcatgtcctgttactggacaaagacagcatcgtggagaaacacgaggcgcctcaggtcgacacaggttgcaaagccaaaggactccattcaatggttcgagttcaccatagcatctagcatgtaccatcatacggcacttatcacattgcaagaacaaattgtcttcgtattcctcatccatatcacaaacactacaatagtctagatctttccaatttacatgaacagctctatacccacgaaaggtgtctccagcattttcaaaatactttaagcatgaccttgcattgggtaactcctgaataagttgccgtatttgtggatttgaaaagccaaacatataggaaccagatccctgacaaacatctctgtccaatccagaggccacattgcgctgtttttcctttaatctacaatatatctccttccaacatgtatttggggtagagccatcaatctgtgttccatcttctgatgtgaccctaaacaatggccgagcttttatatctgaattcctcagtacctccattttgtaaagtattactacatgtggatctttcactgatctgaacttcctgaaagcagtatacccttcaggccatatatgctttttgttatggaaatagtctgagtcagttactatcctacctaatttgctcacacgaagatttcctagttctattggagtcatctcatcataatcccctccgctttcagctgttttatcttcagataaattgtcacaagaatgtacatctttattggaattagcatcagaactgcccttttccatggatttctgtagttgcaacatattttctgggagaagctgtgtgcagagaaacctggcaaaatcatgagtaccaaagaattgaacaagtatcgactgatctagtcggcctggcttcaaagccctgttagcaggaacatttgattcatccaccacaacagctggccacatggcatgacctgtaagtttagcccacacaagatcacctggatcaagaccttggtaatcatgaaggctaacagcaagggcaagcaactcatcatagcccctcttgttcagattggaaattccaaatttcaagttcctgcacttcatttcttcagatgaaatagaaaattttatcctttcatcagctaggttaaggtcctctgattcgccatcatcatactttacttttgccttgcatcctaatcccacaaaggccagtggatccgcagcctcaatttccaactccaaccatctcctcccagccgaggaggcagcttccttgtgcacgccctgccgctgccgcctcttgggttcagagaagtaacccctcctctcagcccctccgctacgcctcaggcagcgccgccgcgcgggctcctccccatccccgcctaatgcgggcggggcttgccccaggctcagcagctcgtacttgagagaacccttccgccgtgtaacctcctcatcctcgtcgtcctcccgggggtgcagcatcggtggtgctgtggcaggcgagggaggtggcccctcgacccgcggcttcttacggcggcggcggtagtagacgatcacggggggcttgccgtcctcggcggagcggggcttcttggggagagggcacggagcagaggaggagtagacgcggccaagtgggaggtagcgaattgggtggtccacctcctcctcctcgtgcacgaagcccccctccaccgcgatcaccat

SEQ ID NO: 22129 - DNA, 796 bp, Oryza sativa
  unsure (1)..(796): unsure at all n locations
  Clone ID: TF_OsC88193_1
gctcgtggtggtgccctcttcctgtccccttcctgttcctgcgggtgctctggcctcccattcaacggcccctttcctggttcttgcggagccgcgctccagctcccctggtgcctccctcgggtgcgtgtggtacctcctcaggatcgggtttgccgcccccgctcccgcacgcgtccgcccacgcgtccgctgaatgttcctcgtcaaatattggttctacagaaccaatgacaggcttcacatcggcgagggatctttgcattgccatactgagggaagatggactcataactgaatctcgaactaaaatcaaggcagaggaattgactggttatgatgccgacttactgttccaatgcaaaacttgtgggaaatcagaccatccattaaagatgcttatatgtgattcttgcgaagcagcgttccatctgtcttgttgcatccctcgtgttcatgaggtaccaactgatgaatggtattgtctgccatgcttcaggaagaaaccaaagagtcagtatggcaagctgtcagagggaaaggtcaaatcttcagggaatatcaaccaaaggcctcatggcatgagtcatatagagtacatgttacaagatacgtgctgatatgttactggggttcgaantggtatagactntcaagcagaagtgccagaatggtcttgtcctacttccagcatgnttgncttgttattccttttcttggagnggggatgtttaattgcgaggagccctctgaatttgattctgctgacctcactaaactgaactggtcaaaaact

SEQ ID NO: 22130 - DNA, 4046 bp, Oryza sativa
  Clone ID: TF_OsC11114_1
atggcatgcgctccctcttcacacctggtacatatggatgttctggctgtgatatttctagaagaaagaagtgaaaaatcctcactttgttttgagtttggagggagagagagtagaggaaggaaacctccctccggatccaggaaatcctcatccatcctcatgacttccgacgagctcgccggtgagggtgaggtcgacggcgcggagctgatcctgtcgctgccggaggacgtgctcgggctcatctccgcccacctccgcccgcgcgacctcctcgccctctccgccgcctcccgcagcctccgcaacgccgtctccaccgccgacaaggcgtggctcgcccagtgccgccgcctcctccccaccgcctcccacctcctcgcctggcgcaccgccctcgcccactcctccctcgccgtctgccgcttcctccactccgccgccccgctcctcggcctctgggcccaccagaaccccgagctcggcaacctcgtcctcgccctccctggcttcctctccctcgtcgccgtccgctccatcccccaggagctctccccgcgcctcctctgggcccccgtcttcgagctcctcgccgaccaccgcggccaccccgccttcctcttcctccacggcgccgcccacgactccctcttccccggcctcctctcctcctccctccaccccctcgccaacaccctcttcctcgaggcccacacctccacctccacctcccacttctcccgcctcgccttcgccgaccgccgccgcctcctcaacgccctcgtcgccgcctcccgcctcaccctcccccccgatgtcgccactgccccgctcttcgcgcgctccgacgccgacctcccgctgctcgccgcgcgccgggaggccatgctgcgcctgcacagccagtctggcgggggcatggtgcgcagggccgagatcgaggcgctgctgatcggggccaggaagacggcggcgctgccggccgacaccgccggcgacaagatgcggctgcggaggaccttctcggtggtcgccggttttgtcaggaacagcctgcggcagatggtgacacggtcggcgtccgccaattccagggctgagtacgcccaccccaagcatctgccattggacgagttcctgcgagccggagagagcgtcggcctgagcctccgtggcgcgcggatgaggctgtctatctaccggaattggccaagcatgcatgacaaccggtttgtgctctacaagctgacgacgcaggcgcccatgcctggccgggagtatgccggtttgtggggaggcacattcgggtggccgccagggcggccggaggatgagcgcaaacctggcaaggctctcttcttcctactcctctcctatgaggaggacagcgaagggaagcttcagctgattgcaaccaaggtgttggagggtacacactatgtcgtgcatccgaatgggtcctctatgtttatcgtgcgggtcggtgagccatccactgagacttttccgtggcaaaccgatgaggagtcgcgtgctgtggagatcaatagaagctttgctggtgagggcattgccaccgggtatgggttcaggtatcctggctcaaagcccggatcgctctttgtcctcctggatggccggcttgcatttgtttggagagagaacaaagctgttctcaccttgcaaaggctggacctggaggatatgataaggagaggggagcgtgtgccttcattgccgccgatacccaacttcgcctacctcacaaagtcttactccaatgtctttgctgtggcacctggcagcacgagcttcccagcttctccaaggtttatctattttggtaattcagttgtgagcaaaatcagacgctttatgctaaactttagatataaactaaaatgtcaaaatttagcaaatgagctacagtcgcagatccagcctcctgatgataacatcatgagtattgattacctgcgtgctattgctacgtctacagctgttatggtagaatataaatggaggagtaaaagaaacgctactagttgtatttgggcctttgggggcgtatggagcgttgattttggtccagcccggcctttgccactcatggccaacggcgccaattctaagaaagacgccaaggcccaacattggattagctggagggacactctccacggcttcctccaatcccctgctattagccagggtggaggaattcagacctgcatccgtcatgctctccaacacaatccttgcttgctcaccaatggtgttgttgttcacactgaattcaaaggtaacccagctcattcccaaggagaggaagcaaaagtgcagcaccctaatggtgctgctggaggcaaggtggtttctgcagatgctgctatacaagatgcggctgccgcagcttcttccgaagctaacaaggcaatgtgtaataatgccctcttcgacattttggtctcccagaaatttgccttgttgtgccatttgctacttgggaccttccatgtcaataaacctggtgatgtcatcgacttggaaaaaatcgacgccaagatgagaaatggagactatgcccacaaccctgcactatttgacgatgatatccagcagatgtgggagaagtttgagcaagttggccaagagatgacaggtctagcgagcaacctttcaaccatttcacgagtttcataccaaaagcaggcttctggattttctgaagctgaggtggctgagcacagaatagaggaaataagtttgccgggtgctgtccacgttgtcacaaaggagtcgactaccaccgtgcagttggccccatgtgattctagtcattctacaataccgaaacgaactgtgccacctggacgtgatctgtgcccttgcgatggttgtggcaccaaggtagatgttgaagaaggcctaatctgtgatgaatgtgacaccatgtaccactttgcatgtgtcaagctactcaatcctgatattaagcaagtcccagcaatctggcattgttcaacctgcagcttcaagaaaaaagaattggctgcagataccacgaataatgttgcccatgactgcttgcatggtggtaactgtgttttgtgtgaccagctcgagctggtgaagacagaagaagaagatcccaagcttcccataaaaattgaattagctgaagaaagagaggggagctccgtctcaagcatgggggaagacaatgaaccagacctgtcaacaactgccctgtcaaacttgtgcaaacactgtggcacatgcgaagacgatgacaagagattcatggtatgcggacatccttactgcgtttacaagttctatcatatccgatgcctgaaaacaagccagcttgcaattgagcaacaaaagaagcttggttgctggtactgcccctcttgcctctgcagagggtgcttccaagacaaggatgatgaccagatagtcatgtgtgatggctgtgatgaaggttatcacatatattgcatgagaccagcacgcaacactatccccaaaggtaagtggtactgtacattttgcaagatccgcagggcagcggaaggaatgcataagtatgaggattctgtgctgaaaatacatgggaatagtaagcatgcttgtaatgtgaatcagtcgaaggattctgaaggtgatggtactgaaaagtgatcatcacaatagctttgtggattagcttctgagctcgcttggacaagctcaggaaaagagattctttggccccttaggagggctatacaccgactttgatactgaatcagttgtgtagtttatttaattaactgccgttgacatctacaggaagaactcttacctggtgaagatggtgtatgtagtcttttagctgggcggaatgatgtgtctgtgttacttgttcaccttccttctttacccccttgtcagtgaccattgtgaatgttgtcctgtacttgccctgtgatggtattcttaaacacttttttttgggggaaatatgattttgtttttttaaaaaaaaaaaaaaaaaa

SEQ ID NO: 22131 - DNA, 1246 bp, Oryza sativa
  Clone ID: TF_OsC1327_1
gcacgaggcccgctgcgtcccgttcacaccaccaccgtctcgtcgcctcgtcggcggcgtctcctccgcgcgagggtccccccccaaaccctagccgccgccattgccacgcgcgcgccccccaccccacgaatggaaggaggcggaggcggaggcggaggcggtggcggaggtggaggtggaggaggcggaggcggggcaccgtacgccacgcgcacggcggaggaggtcttccgcgacctccggggccgccgcgccggcatgatcaaggccctcaccaccgatgtggagaagttttacaagctctgcgaccctgaaaaggagaacttgtgcctttatggatatcctaatgaaacatgggaggtgaccttgccagctgaggaagtgcccccagagatccctgaaccagcattgggaatcaacttcgctagggatggcatgaatgagaaagactggttggcgttagtcgcagttcacagtgattcctggttactgtctgttgcattctactttggagcccgatttggttttgacagagaagcaaggaggcgactctttaatatgataaacaatttgccaacaatatttgaggtagtgacaggagccgctaagaagcaggcgaaagaaaagactcccaacagtagtagcaagagcaacaagcctagttcgaaagtgcagtcaaaagctgagtctcgttcgaaatctaagctgtcagcccccaaggatgaagagggaagtggtgatgatgagggagaggaagaggaggatgaccatgacaacactttgtgtgggacctgtggaaccaacgatggcaaggacgagttctggatctgttgcgataactgcgagaagtggtatcatgggaagtgcgtcaagatcacacccgctcgtgccgagcatatcaagcagtacaagtgcccggactgcaccaacaagagggcccgggcatgagtaacaagaagctgtgtcgaactgtgttagagtggagttgtcaatctccggatgtcatgatctcttagatattatcttgccctagcttttctagtttgtaagcttgtctctaatttaattttaaactgtaactgttgattaacctacctgtgtttaaagcttcatctttcctgtgttaattctagcattcatagtgtgtaaacttgcacatcttgtgtcaactgaagcctgaaggtactgcggctcccctgacccaaaaaaaaaaaaaaaaaaaaaaaaaaaaaaaaaaaaaaaa

SEQ ID NO: 22132 - DNA, 419 bp, Oryza sativa
  unsure (1)..(419): unsure at all n locations
  Clone ID: TF_LIB3434-034-P1-N1-C10
acataattgcagccatgaaaaactggcatggcggatatgaatccttgttatcgttatgtacatgttagctgatttgaggccacagtaatccttcagccgcattgctaaaggaacctgtgccagtcttacatcttttgttaggtgcactactatacatgagcctaggaccactgctcttcggcttgtgggttagtttacatgatttacatacatatctctttggaaccctatcaaaatcactgattccagcacacctagtgtgcatccacatatggcaagtgtcacaggatagcattctctcaccgtcatcgtccgttgctccacaggagcatttaactgtccatttgtccacacccatctccatgcggtcaattgcaaaccgtgtnnnnccaccaatgcacctgcctttgatgtggaca

SEQ ID NO: 22133 - DNA, 3242 bp, Oryza sativa
  Clone ID: TF_OsC133489_1
atgtccacctcccccggccgcacccgctccggccgccccctctcctcctcctcctcctcctcctcctcctcctccgcccccgcccctgcccccaagaggcggaggagaccggacaagccccccgaccacgaccccgcccccgcccccgcccccgacaaggatcttctcgtctcccctcacacgcctcctatggacgccgaggcgcccaagcccatacacctcctcaacgacaaggacaaggacaaggagggggacgatggatctcaccaggatacacccacgctacagtcaccccctcgtggatctgatgctcatccaataccaacggagctcaatgtttctgctgctgtcgccaggcctccacaaccaccccatgcacaaccaacggagctcaatgctgttgccgccgccgcgtctgctctaccaatggagcttgatgctgctgctgctgctgctgtgcctgccgaatcaacggagctcaatgctgctgcaaccgctgtgcccgcacaaccgacagaggtcaatgctgctgctgagattgtcaaaccaattgggctcaatgctgtcgctgctgagactgcaaagccagacatggccatggaattgcaggaaccgcctactgtaactgcagccaatgggagggatgtttcccatgaatcatttgaacaaaacctgcaacaccaggtcctggacaatgccttaaccgatccttctttgcttgccgagagcactgcaacaccagcctctactgctggcctcaagcctgcgaggcgcttcacacgatcgctgctcaagaacaaaccagaggaagagcccacagctagcaaaagtcaagaccctgctgtctccatgatatcggaggacaacaacgaggcctctgttgatttggctcttgccccagggaagccacagaggaggttcacaaggtctcttctcaaggtaaaggttgaggcgcgctctaccaacaatttgcttcaatccaaggaggcaattgacagcacatcagactcttctcggtcagtgaagaagatggagatgaagatgtctaagaaggtcgcctgcctcacaaagcacccaagcaacattagagagttgctcaacactggcctgctcgagggaatgccagtcaggtacatcatccccagtagcaagttgcagaaggctgtgctgaaaggagtgattacaggctgcaatatccgttgcttttgtttatcctgtaatggttccaagaacatctttcttcatcacaaactgaaatctttggaagctttttgtgtcaacgttgccttgagccaaaacaacatcaagatcccccttccccatcttatgcttgtaagagcaattccagggacaccgggctacacaaattggtctttaaagttctgcttgatgaggaaagttgatgggtatatcaaggatcaaagaatctactgtaatcactgcaaccgagtggttagcccgtcagcatttgaggctcatgcgggtgagggaacaagacgcaagccgtatgacaatatttttacatcaaatggagtatcattacatgagctgtcaatgaaaatatcaaaggacatggaattatctgaacgcgaaacagatgatttgtgcagagaatgtggtcaagggggagatattttcccttgcaaaatgtgcccaaggtcatttcacccagcctgtgtagggctgtctggagtcccctcagagtggtattgtgataattgcagcaaccttgttcaaaaggaaaaggctttagcagaaaataaaaatgctaaagctgctggaaggcaagctggagttgattctattgaacagataatgaagagagctatacggattgtcccaatctctgatgaccttggtgggtgtgccctatgcaagcagaaagattttaacaattcagtatttgatgagcgcactgtgatactctgtgaccaatgtgagaaagagtatcatgttgggtgtttgcggagccagtggcaagttgacctgaaggaattaccagaaggggagtggttctgttgtaatagttgctcagagattcgttcttccttggacaagataatctctgatggagctttgattttggctgagtcagatattgatatcataaggaagaaacatgagatgaaagggttaagcatggacactaatacagatctgagatggcgattacttgctggtagaaaggcttctgaagatggtgacttattgctctctgctgcagtcccaattattcatcaatcttttgatccaatcattgaagttcagagcgggagggatctaattcctgagatggtcaatgggaggagacccaaggatggaatgcctggccaagattatagtggaatgtactgtgcagtgttaactttaggcacttctgttgtgtcagctgcattgttgcgagtcatgggaggtgaagtggccgaactgccactagttgctacaagtaaagaccttcaaggactgggctacttccaagctttgttctcgtgcatagagaggatgcttatttctctgaagatcaaacacttcatgcttccagccgcccaggaagctgaaggcatctggatgaacaaatttggcttcactaaaattcctcaggaacagtcggatgcttatcttaatggggcacacctgactatattccatggaacgtcaaatctgtacaaggctattccttcgtcataatattggtttgaagccttgtgctgtgcatgtatgcagtcagacagatttgtgttttgaagctctgctgacaactgtacataagatgatgaagcatgggctaaaggatgatgatagcacacagaagaaagggggagaaaagatgaaagataaaagtaactcgaggcggcatgatattggtcgaccaaaattcttatccttcagtttggagatatgctggatgatggaggcaatgcattttgcttaattttgtttatctttttttaaaaaaaaaaattggctttcagcattttcagtgtggctgctatgccgctgagaaatgcagctatttttgatgtacagacctcaaacatcagaaactgcaggtttaatgcagtgctgaccctgttctgtttggagttagacttttggtctgtttcttgggttggcattattgcaagatttggaagggcctgtttgatgtggctgtcaagttttgatgggaaagagcatattgtatttgtggatatacatgctagcttaagtaaaagttttgaaggaatgcagtaagtagtggt

SEQ ID NO: 22134 - DNA, 2094 bp, Oryza sativa; identical to SEQ ID NO: 12684
  Clone ID: TF_OsC294928_1

SEQ ID NO: 22135 - DNA, 1014 bp, Oryza sativa
  Clone ID: TF_OsC78000_1
agaaacaaggcatgaacaaatttcctctaaaggctacaatgtaacagtatccatatctcaaatgaacaaccacaacagtaaccgaccagtttatgaaacaaactatcctgtaaagtttcttcttttttgttttccagcatctaccacaacagtgcgcaatgttctagagcaaattcttcacatctgccgccaacttgggactggaagagggatggcaagtatcatttgattgatcagcttagtcagcagtagagagccacagcagcagctccatggtttttattgcctactcttcttggagctgctgcaatcagggcacttgtagtgctttatgtgttccgctttcgctggtgttatcctaacgcatttgccgtggaaccaccgctcgcaaatgtcgcacccaatccaaaactcgttggcgttgtagcggccaccgcaggttccacatagggtttcactgtgttcttcttcatcgtacccatcgtcaacaactgctggcctcgaggtttttgtctgcacgtcatttgctcgctttcctgagtgcctggatttgctgccattgtcggcaccagatttattatcccttccatgcttcctatcagacagtgcttcaagcacggttggatggtcattgatcaagctgaataagcgcttcctctcgttgccgttgaggcgcgcgccgaagaagaaggcgacggagagcagccacgagtcggagtggacggcgacgagcgagagccagtcgcggcggtgcatcccgtccctggcgaagttgatcccgagcgccggctccggcagctccggcggcacctcctccgccggcagcgccacctcccaccgcccgttcgggtgcccgtacaggcacaaattctccttctctgggtcgcagaatccgtagaactcatccacatcgacggtgagggcgcggacgaggccggcgcggcggccggagaagtccttgaagatgtcctcgacggtgcgcggcgcgggggagacgggggcggccatctccat

SEQ ID NO: 22136 - DNA, 2256 bp, Oryza sativa
  Clone ID: TF_OsC53130_1
atgggcaccgcccgcggcagggtcgccctggagggcggcggccggcgccggaggaagctggacgaagaggatgatgaggagtatgtggcggacgacgacgaggagaaagacgaagacgaagacgaggaggagtaccaacaggccgccgccccctccgacgacggcgaggaggggggcgacgacgaaggggagcaggaggacgaatcaggtgcggatttcgtcggggacgaggaggaggaggaggaggacctcgaagacgcatatgatttggaggaggtcaaggcgccgcgccccaagcgcccgcccaaggggaagccgccgccgagatctcgccgtcggaggcaaaaggacgacgacgatgactacgaagaggaggaggaggaggacgccgacttcgatccggacgtggacgaagacgacgaggaagagaaagacagcaccaagaaccacgtggccaagcggcaacgaccacccgctcgtaagaagaacaagaggaaccctgctagggtttttaagacaaagcataagaagcacagctcagggcgtcgacggagggagcgctgggatacagatgacgacgaggaacaagaggaggatgcggatcacatcttgaaggacgatcaggaagtagagccggacgcccgccacccaaagaagaaggcctaggctgctaggaagaccagggatgtcacgccggagccggatgtcgaggcaagcgcatggccggccgtcgaatcagacacttcagaattcgaattcgtgacatctgatgaagaagctgctgacaaggaagcaccagccgctgaaccagcaaaaaccaaggggaagaagggcaggaagaggtggggatctgggtcagagtcatcatctgattctgattatgtcatatcagagcaggaactgaaggatctggaagtctccatgcctccagatgcagctctgcaatcacctgcaaccctgccgcgccggacctttctttcaaggagggtgggggagaaggggaaagagcctgaagaggcttggaaacagacatgtgggatatgcctctcggaagaacagagagccacgatacagggtgtgcttaattgctgcgcacattacttctgcttcgcttgcatcatggagtggtcaaaggtggagtccaggtgcccattgtgcaaacgccgattcacaacaattaccaagtcatcaatggcagatctagggcttggatcaaggaaagctgtcattagggtagaaaaacgtgatcaggtgtatcagcccacagaagaggaaatgagacgttggttggatccgtatgaaaatgttgtatgcatagagtgcaatcgtggtggtgatgacaacctcatgctactatgtgatatttgtgattcctcagcacatacctattgtgttggtctaggaagacaagtaccagaaggaaactggtactgcggaggatgtagatccggtggggagggcccctctgcacaggatacggtggttcactgcagagaaagtaataccaaccctgccaacagtagttctggatcatttggctcagccacaccaagtggagtgttccagagaccaccaccaatcaacacccaaccttctctacaaggattcgatctaaatctctcaccaagagaaacccctgatgaagataagcgagaagagtcacatgtttcagctgatgctgtttcgactcctactggaaggcatgccactctcgataggaggcgggcctttaaccgacgaattcgcatccttctatttagaccaagggtcacacctaatgggtggcagaatccgattcagtctgacaggacaataccagagaatgaacaaaatccacagagcacgtccactccaactgaagtgaacccatcatgttccagggatagttctatgcagaaccagcagagtagctcatcttttgttcagccagcaaggggtcttattgaacgcacctatgggggtggaagcaatttccaacaaacagaaggtgctaaggaacagctgattcctattgtcaagaggaacctcaaactaatgtgtgctcagtccccattgggtcaatctgatttcaagaatgttgcacggagagcaacacacactatcttagcactgtctgggattgcacacaacgaggattttgttgtcactatattggatgagcgagagatggaaatgaacattgtgcaatcaaatgttatgttgagaaatggttgcagtacagagtacagaccatgtctaagttgccttagaagttag

SEQ ID NO: 22137 - DNA, 1314 bp, Oryza sativa
  Clone ID: TF_OsC4349_1
ctggaggcgcctcctcggcgggcgagtgcgctcccctcgcctctttgtgtttttttttttatcaataatgaggctgagaataaatgaccacaagcaatttttaacaaactacaagagtacatgtttgacacaaatacacaattcaaatctaaaacactaaagagtccagtacaggtgcacttagaagggcttgaagaagcataagctattacagttagtttctactactaacagaaaatctagaattgatgccattgacatacaccaaacaacacattaaagaccctaaagctggtcctaaactgaaaaccaacagctgaatgcatatccattgggcattctatctcatgagggtctttacagcgagtcaaattcttggttcttcagacataagccatagagggatccaccatcaagctctggctctcttgctactactgctgcagttcgggcacttgtagtgcttgatgtgctcagccttggcaggggttatcttgacacacttaccgtggaaccatgtctcacaagcatcgcagcagatccagaactcatcctgtccatagttgtcaccacatgcaccacataatgtgttttcgtgatcttcttcttcctcctcttcctcacctccgctatcatcctcatccttcggaggtggcatctttggacccctagagttgggttccggctggcgcgatggcttcgtgccggatttattgctcttgccactggtcttgggggttttttctttgctctgcttctttgcagtcccagtgacaacctcatatatggttggaaggttgttaatcatgctaaaaagccgtttcctggattctttgtcaaacccgaatcttgctccaaagtaaaaggctactgctagcagccaggtatcactatgaaccgcaacaagtgacagccagtctttctcatccatcccatcccgagcaaaattaattcccagagctggttctggaagctctggaggaacctcctcagcaggcaagttcacttcccatgtctcattgggaagaccatataaacacaaattctctttctctgggtcgcactgctggtagaacttctccacatctgtggtcagcgccttgatcatcccggcccgccgcgcgcggaagtcccggaacacgtcctccggcgtgcggtgcgccccgcctccgtccattccacccaccaccaccaccaccccaccgccgccgcgccctcctcctccgccgctcccgcccgccgctagggttagggttttggaagagagagagatagagagagcgcaaagcgaagcacaaaaaaaaaaagcttacc

SEQ ID NO: 22138 - DNA, 828 bp, Oryza sativa
  Clone ID: TF_OsC31997_4
gtggctttagccagtcagacttatgacctggttgatgctcatatccaacagctagatcagtttatgagaaaacttgaagaacttcgacaagaaaaggaggcagctacaactgctgctgctgctgctgctgcggcggctgctagtgttgctacaggtacgcctgttgctgctactgtaacagctagcgctggtacttcaactgctgacaatactccaaaaggtggaaggtctagcgaaagaggccgagggggtcgaaagaagactgctaaggtgcccactgagcaaccagcaccagccatagatttagaactgcctgtggatcctaacgaaccaacatattgcctctgcaaccaagtcagctacggagagatggtcgcatgcgacaataatgattgcaagatcgaatggtatcactttgggtgcgtcggcgtgaaagagcatccgaaggggaagtggtattgcccaagttgcattggattccaaaagaagcgaaaaggaaagtgaaatgtgatcaacccttgataggaggtagcttcttgatgataagtggtgatggacgtgggtaacaaaaacatagtagctggtactgtgaaatactgttgtagcttcagtgatgatgtacatgttacccctgtgttaccgaggaaatgctgtaggcgtcttagagttagggaccagtcaatcatgaagagcagttgtgcctgtattggtgtatcttcattgcctttttttggtggatgtgtaggttgtaattgtaatctatccctcccatgtgggcttgatgcaatctacacataaatctgtttatacctaaaaaaaaaaaacaaa

SEQ ID NO: 22139 - DNA, 2212 bp, Oryza sativa
  Clone ID: TF_OsC152828_1
atggcgcctaagatggtgatcagcctggggagctcgcggcggcggaagcgcggcgagatgctgttccggttcgaggccttctgccagcccggctacccggcgaacttcgccggcgccggcggcttcagggacaacgtgaggacgctgctcggcttcgcgcacctggaggccggcgtccacggcgagaccaagtgctggtcgttccagctcgagctgcaccgccacccccccaccgtcgtgaggctcttcgtcgtcgaggaggaggtcgccgcctcgccgcaccgccagtgccacctctgccgccatattgggtgggggaggcatctgatatgcagcaagaggtatcacttcttgctgccgaggagggaatcggcggcggaagccgacggcctgtgcttcgcgatcaaccacggcggcggcggtggcgcggagaaagcgtcgtcgaaagggacgacgacgacggcctccagcagaggccacctgctacacggcgtcgtgcacctcaacggctacggccacctcgtcgccctccacggcctcgagggcggctccgacttcgtctccggccaccagatcatggacctctgggaccgcatttgctcagccttgcacgtaaggacggtgagcctggtggacacggcgaggaagggccacatggagctgaggctgctgcacggcgtcgcgtacggcgagacgtggttcgggcggtgggggtacaggtacggccggccgagctacggcgtcgcgctgccgtcgtaccggcagtcgctgcacgtgctcggctccatgccgctctgcgtgctggtgccgcacctgtcgtgcttcagccaggagctccccatggtggtcaccaagtaccaggccatcagcggccacaagctgctcagcctcggcgacctcctccgcttcatgctcgagctgcgcgcccgcctgccggccacctccgtcacggccatggactaccggggcatcatgtcggaggcctcgtgccggtggtcggcgaagcgcgtcgacatggcggcgcgcgccgtcgtggacgcgctccgccgcgccgagccggcggcgcggtgggtcacgcggcaggaggtgcgcgacgcggcgcgcgcctacatcggcgacacgggcctcctcgacttcgtgctcaagtccctcggcaaccacatcgtcggcaactacgtcgtgcgccgcaccatgaacccggtgaccaaggtgctcgagtactgcctcgaggacgtctccagcgtgctcccggcggtcgccgccggcggcggcgtgccggcgcagggcaagatgagggtgaggttccagctcacgcgtgcgcagctcatgagggacctggtgcacctgtaccggcacgtgctcaaggagcccagccaggcgctcaccggcggcgcgttcggcgcgatcccggtggcggtgcggatggtcctggacatcaagcacttcgtcaaagattaccacgaaggacaagccgcggcgagcagcaatggcggtggcggattcgggcatccccacatcaacctgtgctgcacgctgctcgtgagcaacgggagcccggagctagctccaccgtacgagacggtgaccctgccggcgcacgcgacggtgggcgagctgaagtgggaggcgcagagggtgttcagcgagatgtacctcggcctgaggagcttcgcggcggactccgtcgtcggggtcggcgccgaccaggagggcctcccggtgctcgggctggtcgacgtcggaagcgccgtcgtggtgcaagggagcgtgggcgagcagataaacggggaggaccacgagaggaaggaggaggcggcggcggcggccgtgtgcgaggggagcggcggcggcgagcgcgtcgtggactgcgcgtgcggcgcggtggacgacgacggcgagcgcatggcgtgctgcgacatctgcgaggcgtggcagcacacgcggtgcgccgggatcgcggacaccgaggacgcgccgcacgtcttcctctgcagccggtgcgacaacgacgtcgtgtcgttcccgtccttcaactgttagatgtgatgctgctgctgctaactgctactactacttgcctctgctgctatatatgatgctaacctagtacaaagtgatccagaattcaatttgttttctcggcaaaaccaaaatgaaaacgaaggtaaaaccaagtgaacttcagatcaaacaaaaaaaaaaaaaaaaaaaa

SEQ ID NO: 22140 - DNA, 1268 bp, Oryza sativa
  Clone ID: TF_OsC32575_1
gcacggggctccccgcgccgcgctctcctctcctccgcatcgcgatcacctcctcctctcctctcctcgcctcgcctcgccggagatcgcctcgcccacgcgccgcctccctcccatggacgcatcctaccgccgcgacggccgcggaggcggcggcggcgggggcggcggcggttccgcccctcgctccgtcgaggacatcttcaaggacttccgcgcccgccgcaccgccatcctccgcgccctcacccacgacgtcgaggatttctacgcgcagtgcgatccagagaaggagaatctgtgcctgtacgggtacgcgaacgaggcgtggcaggtggcgctgccggcggaggaggtgcccaccgagctgccggagccggcgctcgggatcaacttcgcccgcgacgggatgaaccgccgcgactggctcgcgctcgtcgccgtccactccgactcgtggctcgtctccgtcgccttctactacgccgcgcgcctcaaccgcaacgaccggaagcgtttgtttggcatgatgaatgatttgccaactgtttacgaagtcgtatctggttcaagacaatctaaggagagggacagatccggcatggacaacagcagcagaaataaaatttcatcgaagcataccagcgacgtggcgcgtgtcgaaaataatatcaaggaggaagatgaaggctacgacgaggacgatggcgaccacagtgagaccctatgcgggacttgcggtgggatatacagcgccgacgagttctggatcggctgcgacgtgtgcgagaggtggtaccacggcaagtgcgtcaagatcactccggcgaaggcggagagcataaagcagtacaagtgcccgagctgcagctccaagagacctagacagtagtagcatatgccaccctcctccggcgagaggaggtgtcgccggcgacgccgccattgacagaggcgtcaggctgtgggttactgtacctttcgtttttcgacttacatatgatgaagatgatgccaaatgtgaggtaagaagatcacaagacattcatgtgaggtggagatatgaggctatgtatgttgccagaggaataggggtaacgtaatatatgtaactttgcgaaacaagatggaagtttatctgacaataatccgagaggtttgtgttgatatgttgtgtcaatgactcgaatccgctgtaatgtgggtcttgtacctgaatacatgggtttattcccattagataaagccataattttatgacatttccc

SEQ ID NO: 22141 - DNA, 567 bp, Oryza sativa; identical to SEQ ID NO: 12728
  Clone ID: TF_OsC308411_1

SEQ ID NO: 22142 - DNA, 1345 bp, Oryza sativa
  Clone ID: TF_OsC359_8248
cttgttttaactgaagttgaacttcccttgatgtctgggttcctgctgctctccacgatcatggaacatgacgcatgcaagaatatccccgtcataatgatgtcttcaaatgattccgttagcatggttttcaaatgcatgctaaagggtgctgcagatttccttgttaagccaatacggaagaatgaattaaggaacttatggcagcatgtttggagaaaacaactgtccagcggtgttcttgatgtgcagcatactcaacaagaagataatcttacagaaaggcatgagcagaagaccggagtgacgaaagctgaacatgtgactgaaaatgttgtccacaagaacatggaatgcagtgaacaagaaagtgatgctcaaagttcatgtacaaggtcagaactggaggctgacagtaggcaaaccaacaatttactggaatataagcagccaatgggaaggcatttctccaagcctgaccacaagaacaccgagaaaaatggagggactaaaattcatgcatctaatgatggcaacttgattccacggagggaagaggatgcatcactgaggaggatgacatgttcaaatgatattaattgtgagaaagcttccagggatatggagctggttcatattattgacaatcagcagaagaataacacacatatggagatggatgttgcgagagcaaattcccgtgggaaatgatgacaagtgcttttccattccagcacaccagttagaactttctctcagaagatctgactacagtagattagagagccaggagaaaaatgaacgaagaacactgaaccactcaacttcatctccattttccttgtacaactgcaggacagcatcatctaccattaatgctggtgatgctcaggcatgcagcacctcggcaacacatatagatcttgaaaacaaaaatggagattccaaaactccctctcaagacaagagggaaacaaaccaacctcccattagagttgtaccatttcctgttcctgttggaggactaacatttgatgggcagccattctggaacggtgcacctgtggcatcccttttctatccacaatcagctcctcccatttggaatagcaaaacatctacctggcaagacgcaaccacacaagcaatttctctgcagcagaatggtccaaaagatacggatactaagcaggttgaaaatgtagaggaacaaactgctcggagtcatctaagtgctaatcggaaatggtacaactctaatgggaggttggtttgtttccctcttgtcttgagagggagttttggaatctctattatgcggacgcgtggtcgacggggattcgac

SEQ ID NO: 22143 - DNA, 754 bp, Oryza sativa
  Clone ID: TF_LIB4370-019-R1-K1-H1
agaagagggagaaaaaaatatctgaagaaaaaaaaaagaggagaagcggtttgtatttgctggctggtttggtttccacgccctccgatttgattcgctgctgacgtggcacccaccgcgtaaaaaaaaatttgcagatattttcccacctcccccttctcctctctctcttcctcctcctcctctctctcctcttccaaaatgtctcccgacgccgacgcggcggcggcggcggcggccggcggcgagggcgcggcggcggcgggggtggggacggcgggtgaagggcggggggtgatccggtgggaccagatcctgccgcggcggtccctccgcgtgctgctcgtcgagcacgacgactccacccgccaggtcgtcaccgcgctcctccgcaagtgcggctaccgcggtgagtacccctcgctctctccctacctaaaccctaatcgctctcctctcctcgcgattgattgctattgagagttttctgaggagggaattgggggggattggttccctgtttgccctgtgtgctcgttttgatcggaggtgagcagtggcggcggtggcggacgggatgaaggcgtggggggtgatgcgggagcgggcgtacgccttcgacctcgtgctcacggaggtcactatgcccacgctctcccgcatcgagctgctctccaggatcgtcgcctccgaccagtgcaagaacatccccgtcataatgatgtcgtcccaagattctattggcacagtgctc

SEQ ID NO: 22144 - DNA, 616 bp, Oryza sativa
  Clone ID: TF_LIB4370-026-R1-K1-B1
agcagtgtaagagttcatgggctcgcaagatgatcagggtgctcctcgtcgaggacgaggagataatagggtcgtggcgagagcggcgctgaaggcggcaggcggcggcgacgtcgtggacgaggcggagaacggggaggtggcggtgcagcgggtgcgggacgcggcggcgccgtacgacctcgtgctcatggacaagcagatgccggtcatggacggccacgagcgtgtgttgttgttgtgcaggcgacgaggcggatccggggcatgggggtgaccacgccgatcgtcgccgtgtcgagcgacggcctccccgccgacgtcgacgcgttcatcaccgccggcgccgacgacttcacgtccaagcctctgtccaaggagaagctgggagtcatccttgccaaatttagacttgcttaacgacgtatatatatgtgtactgcttaattagtatatatgccttgctagatcaagatctccaataaacgggatttatggagtatatatgatgctgcgtttaggaacaaaattttaggcgtgtaatctccgaaaaaaaaaaaggtgtgtaatgtgtatatatgtctgaactaccttacaaagtactatgatcatgatg

SEQ ID NO: 22145 - DNA, 2620 bp, Oryza sativa
  Clone ID: TF_OsC359_8450
ctctaaactagtggatccccgggctgcaggctcgaggagagagagagaggaggaggagaggtggttgcgccttgcgcggtgaaagggtagttaccgccgcgggcgactccggcgaggaggggcgagtgggctggagctagcggcgggggaatggggggtggagtggaggagaggaaggtggtggacttggaggacggggacggggaggaaggggaggatgcggcggcggtggcggcggggtcgagcagggagacgcggatgctgccgaggatgccggtgcgggtgctgctcgctgagggcgacgactccacgcgccacatcatctgcgcgctgctccgcaagtgcgggtatcgagttgccgcagcctctgatggtgtgaaagcgtgggacatactaaaggaaaaatctttcaatatagaccttgttttaactgaagttgaacttcccttgatgtctgggttcctgctgctctccacgatcatggaacatgacgcatgcaagaatatccccgtcataatgatgtcttcaaatgattccgttagcatggttttcaaatgcatgctaaagggtgctgcagatttccttgttaagccaatacggaagaatgaattaaggaacttatggcagcatgtttggagaaaacaactgtccagcggtgttcttgatgtgcagcatactcaacaagaagataatcttacagaaaggcatgagcagaagaccggagtgacgaaagctgaacatgtgactgaaaatgttgtccacaagaacatggaatgcagtgaacaagaaagtgatgctcaaatgtatttagcccttcagatctgcatcaatgttggtgaactaatttatcaatttttcaagtcagcgaaatgtcacagttcggtcctcttgggtattgcaaaatggagtacatatgacaacagtaagagttcatgtacaaggtcagaactggaggctgacagtaggcaaaccaacaatttactggaatataagcagccaatgggaaggcatttctccaagcctgaccacaagaacaccgagaaaaatggagggactaaaattcatgcatctaatgatggcaacttgattccacggagggaagaggatgcatcactgaggaggatgacatgttcaaatgatattaattgtgagaaagcttccagggatatggagctggttcatattattgacaatcagcagaagaataacacacatatggagatggatgttgcgagagcaaattcccgtggaaatgatgacaagtgcttttccattccagcacaccagttagaactttctctcagaagatctgactacagtagattagagagccaggagaaaaatgaacgaagaacactgaaccactcaacttcatctccattttccttgtacaactgcaggacagcatcatctaccattaatgctggtgatgctcaggcatgcagcacctcggcaacacatatagatcttgaaaacaaaaatggagattccaaaactccctctcaagacaagagggaaacaaaccaacctcccattagagttgtaccatttcctgttcctgttggaggactaacatttgatgggcagccattctggaacggtgcacctgtggcatcccttttctatccacaatcagctcctcccatttggaatagcaaaacatctacctggcaagacgcaaccacacaagcaatttctctgcagcagaatggtccaaaagatacggatactaagcaggttgaaaatgtagaggaacaaactgctcggagtcatctaagtgctaatcggaaacatctccgcattgaaattcctacagatgagccgcggcatgtttctccaaccaccggtgaaagtgggagcagcactgtgctggacagcgccagaaaaacgctcagtggcagtgtctgtgacagctcttccaaccacatgattgcccctactgaatcatcaaatgttgttcctgaaaatcctgatggtttacgccacctgagccaacgagaggctgcactgaacaagttccggcttaagaggaaagacaggtgctttgagaagaaggtgcgataccagagcaggaagctactagccgagcagcgaccgcgggttaagggtcagtttgttcggcaagatcatggtgtccaagggagctagggctgtccaaacttcaggagattgctgtgccacggttatcctggtggtcagtgtcagattttgtttgaagagtgaaagtatgattgccctgacctacagtcagcagtgtatggtggtgttgcatatatatacaggctaacttcgtgtgctaggttaggccatggacctcgtacattgtagagtttgtcagtagggatcatattttgcttcagatctagataagctgcgtttatcatgtagcacacgtatttatgttttctaaattgtatctagccaacagttaacgtgtaagctggacgtgtgtggatgtaaggtgtcaaggatatccaaagacaaagttcttttgtacagtttcttacactgaacatcgttggtgtagtttcatactttcagtaaagcttgtgatgcttccgaaaaaaaaaaaaaaaaaactcgagactagttctctctctctcctcgtgccgaattcctg

SEQ ID NO: 22146 - DNA, 633 bp, Oryza sativa
  Clone ID: TF_OsC261347_1
tgtctgcgcgcggggcggcgaggcgagggctgtcgcgattcctcctctttcaaatactcccacggcgaggaccgcggcgagggcgcgcgggccattgctgctgcttcttctgctgctgcgtgtgtgtgggtgagacctgagaggatgggggcggaggcggtgagggtgctggtggtggacgactcgccggtggacaggcgggtcgtggagctgctgctccgggcgcactgcggtggcggcggcggcgccgccgccggcgaggcggctccgttccacgtcaccgccgtggacagcggcaagaaggcgatggagctgctcggccggcggcggggggaccgggaccacctcaccccatcctctccggcggcggcggcggcggccaacgttcgtccccccgcccccgtcccggccgtccactgcagcccggtgatgtctcatcacctgatataggagtgttcatcaattctgaacgaactcggtctctctcaccccctcctctgacacaaagtctaactcgctctgttctttctctgttcctcggagagaaatttaatcccttcactaatcatcactagcagagcaacagtgcggtagtttgaatgtctgatgagttctttgatgaaactcatgttg

SEQ ID NO: 22147 - DNA, 2553 bp, Oryza sativa
  Clone ID: TF_OsC1281_24
gaatgcatcagggtacgctttcttggcctcctcgagctctttgagcacctgggtggcgtcagtgcacccgaacatgggcagcttccacatggtccagtacctgccatcgtagtatccgggggatctgtggttctcacggtagacgaatccgaccttgctgaactcgaggcagggcacccacttggatcgaagcaggtactcgatctgcttcaaaagatcctccacggtgagtggtggcaggtacgatagggtctcgaacttcttgatgccctcaattggccacacctgcatgcacttgatccttccgccattgctgacgttgccgaagcccgagttggtggagcggcggctgacggggagcccggcggtggacttgagccctaggaatggagccacgataccattaacagtctccatgtttggcctcccaacattgggagcagtactaggtcctctttgcccattgtttccattatggccacctgaaaagctcccgttcacactatagtttgccgcatgaccttcaatgggaggatcaaatacattggatgaaccacactgagcatctgatgatcctcgctcaatggatggctgctgctgctgctgtgtcataacatggacgtagtaatgaacatgatgatggtgctgcataaagctattttgtacatctacagggtggcccacattaactccattagcaattccttcatcaactttgtctttccctacaacattagcaggtgacgtttgacgctgcacaggatggaatgctgatgtatgttgggtagctttgacagctgatggtgatatcacttttcccctgtttgaagaaggttttgtgatggcattcttagtactggagcccatgtcattgttgttgctactaccattggagccttgctttatttcagcagcatctgaatttgacttcaccttgcagttggagtctgttttcagagcctctgaactgttatcttgaggtgaacagcttcccccaaatccagctccaccttgattagaagccacagttgtatggtacctggtgaaagctgagagatctgatcttttcagaatatttcgttcatcatggatttcagttgcagatccagttgttttcaatctcttcaaacccaactcttcagatgtcatatcaatgagagaatcacgatttttatcatttccatctggaaccttggaggagcaatcaggagcattattgattctaactacttgtttgtcatctgtgcttctggctattgaactaattaaatcaacagtttgagtagttggttcattctgtgtgttcctactatctgtttctcttgttgttttactttggggcatgagagtttcatgctgtttttctgttggattaacggacatctctcttggagaagattggtactccatactagaatttctaggagctcctatttctaagtacttccccatggagtcatcgttattttctttatgtttctttccgctccttttatttgcagtcggtaaccacctgttgctgcatatctctgatgtggggtgaattacttgcgcacaagtactatctggtagatcggatggttgatcaggagacatttgttgtgggctgtcaatctccactgcacgctttgtccatgaactctgtgttttaaaacaggctgatggcatgagaatacattggcacaattgtcctacatttagagaaaattgagtgccactgccattatcactgccatccctagcgttgtgtccaacacttaagtcgtcatcatcttcatcattgtcatcatcatcctcgttgtcattattgctaccgctgttattctcatattcatcatcaacctttggtttggtacacttttgtgttcggatgccactttcgcttccactgccactggaactgtggcatcgtctccaaacatgctgccaaaggttcttaagttcattcttacgtataggcttcactagaaagtcaactgctccttttgacaaacacttaaagactgtacccattgagtcattcgaagacatcataatcacgggaatatccttgcaaattttgtggcttgtgatcttactaagcagaccaatgccagacagacgtggcattacgacctcggtcaatacaaggtcaatgtggttttgcagatcttcaagacattgccatgcatgtagcccattttcagcagggataactgcacttggaaatctggaagcgcagaaccctcttgaatcttcataacaacacttacgaagcagtgcgctgaccacctgacgggtagagtcatcattctccaccagcaagaccctcagtgtcttcacagggaggaacctctcccaccggacaatctgcacttggtgctccttctgttcatctgtttgctggggctctggtggtgtactgtgcccattgggtaagtcctctcccatgccattcctccattcctcctcctctggcttgtgactatgaccattctccaggatgccattccctgtccccttaacatcgtctcgggaaggctcgtccgtaccagcttcgcaggcgctacccat

SEQ ID NO: 22148 - DNA, 3090 bp, Oryza sativa
  Clone ID: TF_OsC53858_1
atggggaagccggaggcgaggagtgggtggaggaacgcggcggcggcggcgtgggtgctggtggccgtggcgtgcgcggcgtacatgcactggcacctgcggcgggagaccatggaccgcgccgaggagcggctcgtcagcatgtgcgaggagcgggcgaggatgctgcaggagcagttcggcgtcaccgtcaaccacgtccacgccctcgccatcctcatctccaccttccatttcgagaagttcccgtccgccatcgaccaggatacatttgcaaagtacacggcaaggacatcgtttgagcgcccactgctgaatggagtggcatatgcgcagcgtatcttccatcacgagagggaaatgtttgagaaccagcagggatggattatgaagacgatgaagcgacaggctgcgcctccacaggatgagtatgccccagtgattttttcacaggatacggtttcctaccttgcacgtatcgacatgatgtctggggaggaggaccgggaaaacatcttacgtgcaagggctaccggcaaagctgtgttgacaaacccattcaggttgcttgggtcaaaccacttgggggtagttctcacttttgctgtgtatcgccctggtctagctgctgatgcatcagttgaggagcgtgtggaagcaactgctggttgtttggttgttgtggtctcatcaaatcaaatccctactaacagatatcttggtggagcttttgatgtggagtcactcgtggaaaatttgctgagtaaacttgctggcaatcaggatattgtagtgaatgtgtatgatgtcacaaatgcttctgaacctatggccatgtatggtcctcaaagtccagatggtaaagtgtccctcttccatgtgagcacgcttgactttggtgatcctttcagggcgcatgaaatgaggtgcaggttggtagcttctttctcatggcataaatttgttggttgcttcttacttggctcttgcactaattctggcaacctgagcaggtataggcaaaagcctcctctgccatggtctgctatcactaatcctttgggaacttttgttatatggatgcttgtggggtatataatttgtgccgcatggtctcgctatgataaagtttcagaggattgtagaaagatggaagagctcaaaactcaagcggaagctgctgatgttgctaagtcccagtttctggcaactgtatcccatgagatcagaacacctatgaatggcgtccttgtcgtccagcgatctaaaattctaccttttgatgtaggaatgctcgacatgctcttggggacagatctgagtatgactcagaaggattatgctcagacagcccagatgtgtggcagagcattgataacactgataaatgatgtacttgatcgggctaagattgaagcagggaaattggagcttgaggcagtgccatttgacctgcggtctctcatggatgatgtgatctccttattttcttcaaaatcaagagagaagtgcattgagcttgcagtgtttgtatgtgatgatgttccaaaagttgttattggagatccatggagatatcgacaaatactgacaaatttggtgggaaatgcagtcaaattcacagaacggggccatgtatttgtgcgagtctgcctggctgagaactcaaaagtggaagctaatcaagtccttaatggaaccatgaatgggaaagacggcaaagttgagactacagctaatggcgccttcaatactttgagtggttttcaagccgcagatgagcgcaataactgggattattttaagctgctgctatctgataaagagccccatatggatgagcttgagtgcgacagatcttatcaaaatgattgtgactgtgtgaccttgatgataagtattgaggatacaggtgttgggatcccattacatgcacaagatcgtgtttttacgcctttcatgcaggctgatagttcaacttcaaggaactatggtggaactggcattggtttaagcatcagcaaatgtttagctgaacttatgggcggtcaaataagtttcactagccgtccatttgttgggagtacatttacattctcagctgtcctcaagcgctcatgcaaagatacttcaagtgattcaaagaggagcttatctgaggcactaccaactgcctttaagggaatgaaggctattttagtagatgggagacctgtacgtggagctgtcacacgatatcaccttaacaggttgggaatagttgttaaagttgtgaataatttgagtatggggcttcagactttagctggacaaaatggtgtgaaagagtccagggagaaactgtctatgctttttatagagagtgacatctggaggcctgagacagatatcctattattgaatcgtctgcatgagctaaagaataatggtcaggtgcatgagttgccgaagctagttcttttggtaacatcagaagctgacaaggacagatatggatccgcatttgatattgtgatgtataaacctataagggcaagcacaattgcttcttgccttcaacagttgctaaaagtagtgatgcctgaaaggaaagacaatcaaaataggccctcatttctccgcagcttgctgattgggaagaatatattgattgtagatgataataaagtcaatctcagggttgctgcagctgcgctcaagaaatatggtgccaaagttcattgtgttgaaagcggcaaagatgcagtctccttacttcaacaaccacactgctttgatgcatgctttatggatgttcagatgccagagatggatgggtttgaggcaactagacaaataaggcaaatggaggtaaaagcaaacgaggaaaggaaggcgttggatttaatggagggttcaacattcgtcgagtcccatttgcctgttctggcaatgaccgcggatgtcattcaggcgacatatgaagaatgtataaaatcgggaatggatggttatgtgtccaaacctttcgacgaggagcagttataccaagctgtctccagattagtggtgggaacgaaggaatcagcggtatgatgatgggctggctag

SEQ ID NO: 22149 - DNA, 3119 bp, Oryza sativa
  Clone ID: TF_OsC1281_22
ttatccctgctgaaaatgggctacatgcatggcaatgtcttgaagatctgcaaaaccacattgaccttgtattgaccgaggtcgtaatgccacgtctgtctggcattggtctgcttagtaagatcacaagccacaaaatttgcaaggatattcccgtgattatgatgtcttcgaatgactcaatgggtacagtctttaagtgtttgtcaaaaggagcagttgactttctagtgaagcctatacgtaagaatgaacttaagaacctttggcagcatgtttggagacgatgccacagttccagtggcagtggaagcgaaagtggcatccgaacacaaaagtgtaccaaaccaaaggttgatgatgaatatgagaataacagcggtagcaataatgacaacgaggatgatgatgacaatgatgaagatgatgacgacttaagtgttggacacaacgctagggatggcagtgataatggcagtggcactcaaagttcatggacaaagcgtgcagtggagattgacagcccacaacaaatgtctcctgatcaaccatccgatctaccagatagtacttgtgcgcaagtaattcaccccacatcagagatatgcagcaacaggtggttaccgactgcaaataaaaggagcggaaagaaacataaagaaaataacgatgactccatggggaagtacttagaaataggagctcctagaaattctagtatggagtaccaatcttctccaagagagatgtccgttaatccaacagaaaaacagcatgaaactctcatgccccaaagtaaaacaacaagagaaacagatagtaggaacacacagaatgaaccaactactcaaactgttgatttaattagttcaatagccagaagcacagatgacaaacaagtagttagaatcaataatgctcctgattgctcctccaaggttccagatggaaatgataaaaatcgtgattctctcattgatatgacatctgaagagttgggtttgaagagattgaaaacaactggatctgcaactgaaatccatgatgaacgaaatattctgaaaagatcagatctctcagctttcaccaggtaccatacaactgtggcttctaatcaaggtggagctggatttgggggaagctgttcacctcaagataacagttcagaggctctgaaaacagactccaactgcaaggtgaagtcaaattcagatgctgctgaaataaagcaaggctccaatggtagtagcaacaacaatgacatgggctccagtactaagaatgccatcacaaaaccttcttcaaacaggggaaaagtgatatcaccatcagctgtcaaagctacccaacatacatcagcattccatcctgtgcagcgtcaaacgtcacctgctaatgttgtagggaaagacaaagttgatgaaggaattgctaatggagttaatgtgggccaccctgtagatgtacaaaatagctttatgcagcaccatcatcatgttcattactacgtccatgttatgacacagcagcagcagcagccatccattgagcgaggatcatcagatgctcagtgtggttcatccaatgtatttgatcctcccattgaaggtcatgcggcaaactatagtgtgaacgggagcttttcaggtggccataatggaaacaatgggcaaagaggacctagtactgctcccaatgttgggaggccaaacatggagactgttaatggtatcgtggatgaaaatggggctggaggtggcaatggaagtgggagtggtagtggtaatgacttgtatcagaatggggtctgttaccgagaagctgcattgaacaaattcagacagaaacggaaagtgaggaactttggaaaaaaggtgcgctatcagagcagaaagaggttggctgagcagcgccctcggatccgcgggcaattcgtgcgacaatctggacaggaagatcaggcaggccaagacgaagacagataactaagaaccacctacatatccaacatggcatctgctttgacagctggagagctacgcaattcattccatagctgaaagcagctcatcgatccccacattggagtgctcaataaataaaacccatatgattattttctgtgcctgactccagatgaaatttgtgctatggagtggaccacgcatttaattttaatatggcaatcggtaacaacttagatgcgatggttatttgtgacctccagttcccttgcagagatccacttggacactttgtcgagtctaaggaggagcaaaccatctgacgtttctatcggatcatgaatgctaaatctttactctactactacatcgagctgacatcagtgagggttcaactattcattgcgagacattattttcaagtcaaatagtacatacttttctgctggctgcatttctttttcatgttaatttccgctggctccaattttgtggttgactactgttatggagtaatggcaaccccagtgcagtaatgacggtttctttttaagttttgctttagctttgtcttgtaatgaacctctgtgatgtttgggatttcttacaaagccggatgctgacgatctttcctctaaaaaaaaaaaaaaaaaactcgagactagttctctctctttgatcatagtggcccacagaaagcaaagaagattcagacatcccagccctatgggcctgctggaggagtggtgttcaaggaaggtgttgatgcatctggaagggtagccaagggaaagggtctttaccagttttcccacaagtatggacgcacaatgttgatgggtacagccccaatatatacccccagaagaatggtcttcaactggtgatgtctatgttggaggaaaggcacggtttacttctctgggcaatcactcttgctggaattctagttggcggcgctattcttgtctacaacactagtgcactggcttagctaagtgcagcagaccacagctgtgcctgcttccatgtatataatcttcactaggaatgtaaccagttatgtacctggactggacttgactgccagcgttggtaatgaataaggccgagtaatgttaattctaagttaaacaaaaaaaaaaaaaaaaaaaa

SEQ ID NO: 22150 - DNA, 2712 bp, Oryza sativa
  Clone ID: TF_OsC15088_1
cggcacgaggcctcttccaaaatgtctcccgacgccgacgcggcggcggcggcggcggccggcggcgagggcgcggcggcggcgggggtggggacggcgggtgaagggcggggggtgatccggtgggaccagatcctgccgcggcggtccctccgcgtgctgctcgtcgagcacgacgactccacccgccaggtcgtcaccgcgctcctccgcaagtgcggctaccgcgtggcggcggtggcggacgggatgaaggcgtggggggtgatgcgggagcgggcgtacgccttcgacctcgtgctcacggaggtcactatgcccacgctctccggcatcgagctgctctccaggatcgtcgcctccgacgagtgcaagaacatccccgtcataatgatgtcgtcccaagattctattggcacagtgctcaggtgcatgcagaagggtgcggtggatttccttgtgaaaccagtgagaaagaatgaattgcgtaacttatggcaacatgtatggaggcgacatgcaatgaatagccaaacaaatgcatcggaaaacaatgcggctagcaatcatttaagtgccaatggtggtaatgggtcaaagacaggagaacacagcgatgaggaaagtgatgctcagagttctggtagcaaaagggaggttgaaattcaaagtgctgaaaagttaccagaggttgttgcagatggtggggcaggctcatccagagaacataaaatacagaatggtttcattgatggaatgaacacaaaatcacatgcattaaagggtaatgatgatgctccaagtggaaacgcgtgtggtgatagtgaactacaagtgctttcaactgagaagaatgtgcgttccaaattccttaatggtattacttctgcgaaggttgctggacagataatggataatgccttgaggtttgctgattcaagttcacttcgttcaagtgatcctggaaaagatcttttggttgttgcccagaccacagctgacagaaaatgcaaatcttcagcactggaaaataatgctgtcatggaaaataaccttagtgaaaattcaaaggggactgcaacaggccatgctgaatcttgtccgtctcactttgtggagataaatttagaaaagcaacatcatctcaatggttatacaaaccacaagttgaatgagaaagatatctttaatcactcaaattcctctgccttttcgaggtatggtaataagaggatagaatcatcagctcaacggccatttcccccttccttccgcgtggttcaccaacaacctgtttacgacaagaatccccaatccagccgggtcttgctttcctgtgaacataatacacgcgagagtacagtgcaagctcaggtccctttggacagaagcacagagggtgctgcaatcctgtgttccagtagtgtaagagaagatgctggtacaagcagttcctctcctagaaaggacagtttaactcatccttcttatgggtttatacctgttccaattcctgttggtgctgctataccctaccactacggtgcaattatgcagccaatgtattatccacagggtgcttttatgcattgtgattcagctgccatcaacaagacagcaattcagcatgtctcttgtcaatctaactaccatgaaaatcttggtaaaccgccacagattgatgagcacaagcagccagaagaaaaccatcagttgcatcattcaagacaaattctccgagaatcaggagaaccagttgacttggcgaaggctcatatggagcgtattaaccagagtgctagctgtagccaggatattcgcaaaggaagtggatgcactgggagcggtgaaactgatgcaaatacaaatacggtaattgcactagaaagtggcaatgagagcggtgtccagaactgcagtaataatgtattggatggtgaccggtctcgccgtgaagctgccttgttgaaattccggatgaaaagaaaagatagatgtttcgagaaaaaggtcaggtatcatagcaggaagaagcttgcagaacaaagacccagggttaagggccagtttgtgagccaaaaactgaagtcagctataacaacagaggcagaaactgactagtgacaccgttaactcatactgtacttttgatacttcccttctcagcgaagggcattcgaagtaacccgtgtaagttaaaggctggcaacagttttccttccgtagttagccttttgtacaagtgctctcttcttttgtcggttgtttattggcttccatgccataccttgtaaagacctcaaattgataaaagtgttcagggggtaaagaaattttcaagctggtgctaaaaaaaaaaaaaaaaacggacgagagcgacatgttcccgcctccggaggcgccgacgacgacgaacccgccgccatcaccgccgcctccaccgtcgtcaccaccgccgccgacgacgaagagcagcagcgggtcgacggcgtcgccgccgtcgtcctcgtcccacttctcatcgccgccgtctccgccgtcgtcgtccaacccgtactactacttctacctctccggcagcggcaggcgctgcggcggcggcggcgcggcgagcgtttacacggcgctgatcctagcggcgttgctgcccatcgccacattcctgacgtgacaacgcgcacgaattttagcgcacgatatgatcggaattaa

SEQ ID NO: 22151 - DNA, 2212 bp, Oryza sativa
  Clone ID: TF_OsC53137_1
atggtgggcgccggcgagggggatcgcgttggcggcggggcggcggtagggggagggcagcagttcgtggaccggagcaaggtgaggattctgctctgcgacagcgacccaagtagctcacgggaggtgctccgcctcctctgcaactgctcataccaagtgacttgcgccaagtctccgaggcaggtgatcaacgtactcaactgcgaggcgggggagatcgacatcatcttggccgaggtcgatctgcccgtctccaagtgcttcaagatgctcaaatacatcgccaggaacaaggaattgcgccacatccccatcataatgatgtccaacagagacgaggtctctgttgttgtcaagtgcttgcgtctcggggcagccgagtacctggtcaagccactgcgcatgaacgagctgctgaacctctggacccatgtgtggcggcgaaggcggatgcttggtttgtcggagaaaaacttcttcaatgacaatttcgagttggcgttatcggaacctagtgacgccaataccaacagcaccactcttctctcggatgacacagatgataagccaaaagaaaacattaatcaagaaacaagcacctcgaatcaacatgaatatgagtctaatccttctgatgctgagcctaaacaaaaaggcacaccagagggtttactagtctctactgaaggcggcgaccaagcttcatctcccggagtaatgttttcacgtccaataaagactaacttgagggttgctgagtcttctgcttttctagcttatgttaagtcaagcaccccaactaccagctcatttgacagcgaactacaaaaaggtggaaatcggttagactcttcggatcacaggggtaatttctctagtacaactgacagaagtgacactggcactgatgtaaatattcgggataaagaagcctttgagatgccagtgcaataccctgtggtatgcttttcttcctctaacttgcatctggagcgaagcaatgaaggccaaaatgatgcttcaggaactcctcctgtatatcattttcccttttattacccagggatgatggaccacggtatgacacatcctccggtgcaaaatttccaagggaacataaacaacgctcaagtgcatacaccacaaacgttgctccctcagtataatgtttatccccaatgtcatggtgtatctatgatgccaccatttcagtataatcctgctggtatgagcattcaatcaaatcaactgccaacacaaaatatgtggccacaggcatcaagcacaccaatgcccgaggaaacatgtagtcggtctgaacggagagctgcagcacttgccaaattcaggctgaaaaggaaggaacgttgttttgacaagaaggtgaggtacgtgaataggaagaaacttgctgaaacaaggccgagggtgcgagggcaatttgttagacaggcaaactatacagatataaccagcactggagatgatatctcagaagatgaagatgatgatccatcctccagggaggtagagatggtttcttctccagagtagtttgaaaggttttcctatatgtaaaatagagtgcagatgattactgctcactttgcaactcattagatgtaggcaatacatttcttctgcttttaactaggcaatacatccactcgctcacacacaatacatcctttttgtcccccaaggaacttgtggcatatccatcactgttactatggacgttttggagaaaatcatctttgaaggtgagatgtaattatgctagttagtgatgcataggccagtctagatcgtaaccatcttgtttcagaatcttataggactttactcagtgctccttcttagacacgtttttacttccattttctcgatgttggaggctgtccatgtttgaacatcgtgttctaccacagaagtcgattttggaggttgtacatgtttgaactttgtgttctatcacagaagtttgcgagcaccattgaaaacaaggacactagcgacctgacctaccgtactgttctgagtagtgccaatatttctaggaaattgtccctttctaaggacaatttcgtttttccccccactttcatcttcaatattgattttgcccctatcaaaaactttactgctaatccatgtatattcgtgacaaatgtcgactatatattttgtagctgtactttgtcatgtt

SEQ ID NO: 22152 - DNA, 2749 bp, Oryza sativa
  Clone ID: TF_OsC50511_1
tcgttcctcttcttcctccgccttcgccgccgccgccgccgccgccgattactcgcttccgcctccgcctcaaccccgttcgtccccaaccaaccaaccgcagtccaatccaagcgaatactaagctcacttgaattcggttggtgcctcgtcgtcattctgccaccacttgagagttccttcatacacacaccactcgcagtctcagcagcagcagcagcagcgcagtcatccctgctgaaaatggccagcaagcatggacatatctagaagatatgcaaaacagcattgatcttgttttgacagaggttgttatgcctggtgtatctggaatttctctattgagtaggatcatgaaccacaatatttgcaagaatattccagtgattatgatgtcttcaaatgatgctatgggtacagtttttaagtgtttgtcaaagggcgctgttgacttcttagtcaagcccatacgtaagaatgaacttaagaacctatggcagcatgtgtggagacggtgccacagctccagtggcagtggaagtgaaagtggcattcagacacaaaagtgtgccaaatcaaaaagtggggatgaatccaataataacaatggcagcaatgacgatgatgacgacgatggtgtaatcatgggacttaatgcaagagatggcagtgataacggcagtggcactcaagcgcagagctcatggacaaagcgcgctgttgagattgacagtccacaggctatgtctccagatcaattagctgatccacctgatagcacttgtgcacaagtgatccacctgaagtcagatatatgcagcaatagatggttaccatgtacaagcaacaaaaattccaagaaacaaaaagaaactaatgatgacttcaaggggaaggacttggaaataggttctcctagaaatttaaacacagcttatcaatcctctccgaatgagagatccatcaaaccaacagatagacggaatgaatatccactgcaaaacaattcaaaggaggcagcgatggaaaatctggaggagtcaagtgttcgagctgctgacttaattggttcgatggccaaaaacatggatgcacaacaggcagcaagagccgcaaatgcccctaattgctcctccaaagtgccagaagggaaagataagaaccgtgataatattatgccatcacttgaattaagtttgaaaaggtaccatacacctgtggcttccaatcaaggtgggacaggattcatgggaagctgttcgctgcatgataatagctcagaggctatgaaaacggattctgcttacaacatgaagtcaaactcagatgctgcaccaataaaacaaggttctaatggtagtagcaataacaatgacatgggttccactacaaagaacgttgtgacaaagcctagtacaaataaggagagagtaatgtcaccctcagctgttaaggctaatggacacacatcagcatttcatcctgcacagcactggacgtctccagctaatacaacaggaaaagaaaagactgatgaagtggctaacaatgcagcaaagagggctcagcctggtgaagtacagagcaacctcgtacaacaccctcgcccaatacttcattatgttcatttcgatgtgtcacgtgagaatggtggatccggggcccctcaatgtggttcatccaatgtatttgatcctcctgtcgaaggtcatgctgccaactatggtgtcaatggaagcaactcaggcagtaacaatggaagcaatgggcagaatgggagtacgactgctgtaaatgctgaacggccaaatatggagatcgctaatggcaccatcaacaaaagtggacctggaggtggcaatggaagtggaagcggcagtggcaatgacatgtatctgaaacgcttcactcaacgagagcatagagtggctgcagtgatcaagtttagacagaaaaggaaagagcgcaacttcggaaaaaaggtgcggtaccagagcagaaagaggctggccgagcagcggccaagggtccgcggacagttcgtgcggcaagctgtgcaagaccaacaacagcagggtggtgggcgcgaagcggcagcggacagatgacccccctccccacctacccgatgcctgcggcctcctatccgcttttttccacccggttcccaccaggggtcctttctcctccctcggccgatcgatcaacaacatcccatgcatccggcatcccaccaccattgattccatcatatttagagtctggaataaataaggaactcctatcctatttatcccctatctatatatgaagatatgataatggtgatctgcgttactactagtagaagaatatggtgtggctgactccacttcaggtggacctataatactactccagtagtatgtgcctgtggagtcaagctcgaacgtactactccatatttaagcatgtcatgtactgctactatgagacgagagtgctctgccctgtagggacagcactattgtcaatgtcatgtgtttgttgggtcactggtcttcttagatttgcgtccatgtctggcagcagcactccactgtagttggctcacgcatgttgttgaaatgagccacatgccttgccttgagatagaacttgctgtcactgtttctccttaatctaaatatactggagtggagtattttattatctaaaaaaaataatccggtgattgaccaggctcgtccaaaaaaaaaaaaaaaaaaaa

SEQ ID NO: 22153 - DNA, 1637 bp, Oryza sativa
  unsure (1)..(1637): unsure at all n locations
  Clone ID: TF_OsC22028_1
ccacgcgtccgagcagctcaagcccaccggaggagagagagaaaagaggaaatcatggaggcgatttgctgtggagattcgggtgtgtgatctggtcggatcttgctttcctgggaggaggaagaagaagaggtggaggtggccgcggtgtgatgcggtgggtagtttgcttatatcctcgagatgccgcattagccaagccagccacacccatcatcatcagcttcctctccctagctccattgccgcggcagcaagaaagaaatcaccaggagaagacttcttggtggtttgatatgctttgattgagcccctggagaagagaggaacagaggcttttttctctgcgggttcttcaattattcagggtttcttctggttcttgtctcgccatgacggtggttgatgcggagtcgcggttccatgtcctcgcggtggatgatagcctgatcgacaggaagctcatcgagatgctgctcaagaactcgtcctaccaagtgaccactgtggattctgggagcaaggccttggagctgcttggattgagggatgagggtgatgactcctcctcttcaccttcttcctcctcacctgaccatcaggagattgatgtcaacctgataatcactgactactgcatgcctggcatgacagggtatgatctgctcaagagggtgaagggatcatcttcattgaaggacataccagttgtgatcatgtcttctgagaatgtgcctgcaaggatcaacaggtgcttggaagatggtgcagaggagttcttcctgaaacctgtcaagctcgctgacatgaagaagctcaagtctcacctgctcaaaaggaaacagcagctgcccatggctgctgctgcaccagataagccgccacacaaaccagatgaagctgcagcctcagcagctgcaattgctgaagctgcaacagctcaaaccgatggaatcatcagtgattgcagctgcagcggcagcagcaagaggaaggcggctgcaatggagcaggaggtcatctcctcacctgatcagaggacgaagccaagattgtcctccactagcagcggccttgcagtggagacctgatgaaactgaattaattagaatccccccaactaagaaatgattttggcctctttttctgttttgattttttttatggagctgctcatggaagtatggaaccattagctcctgggggttttaattaatttacttaattagtagtttgaggtgaaaggaaagtccacgtacttttacactagctcttgcttcgatccacaaattttgttgtgccaaaggaacaccatggcaccaagtggtgttcgttagaaaaggagttgtgggaatgaaatggaaggggaagttgtagataaaggcagcaccttggatgcttttaggctaattttaaggcttattattcaagcaaaaaagtgttttgtttgaacttggagaggaaaaagctaagtgctactgctactatgaattgtctagcagattgatggaccaaccaactggtcttttgcaaaaaaaaaaaaaaaancgggggggccctttttagaggaccaaagtttacttccccgtgcttgcaagttaaaattttttttatggggcacctaaaataaaatcaat

SEQ ID NO: 22154 - DNA, 2511 bp, Oryza sativa
  Clone ID: TF_21735411
atgttgctctccacttggacgccaggatgcttccagggcaataaaatcttgttaagatctctaatcacatggtattatctcgaatttatgccaaagctgcggcctttttattttcttttttacttaaccttgccaagttgcgctacggattcgccgcctatttctgacaaaagctcctccattttcctcccattggcgcagcagcagcagctagtccactggatgatgcctccaagattcagatgccaagattacctcctgccgctgctgctcgccctttcgccggccgccgcccccgcccgccaggtggagtaccaccattgccactgcgacggcggcggcggcggcggcggcggggggttgtggagcatggacagcatcttcaggtggcagaaggtgagcgacctgctgatcgcggcggcctacttctccatcccgctggagatcctctacttcgtcgccgggctccggcatctcctcccgttccggtgggtgctcgtccagttcggcgccttcatcgtgctgtgcggcctcacccacctcctcaccgccttcacctacgagccgcacccgttcatggtggtgctcctcctcaccacggccaagttcttgacggcgctcgtctccttcctcaccgccatcacgctgctcaccctcatcccgcagctgctccgggtcaaggtgagggagagcttgctgtggctcaaggccagggagctcgaccgcgaggtcgtcctcatgaagcggcaggaggaggcgagctggcatgtccggatgctcacccacgagatccgcaagtcgctcgaccgccacaccgtgctctacaccaccctcatcgagctctccagggtgctcggcctcaccaactgcgccgtctggatgcccgccgccggcgagatgtgcttgacgcacgagctccggcgagacggcggcggcgaggatggcgtcgtcggcgtcgacgacgcggacgtcgtcgaggtgcgggggagcgacggcgtcaagctgctcgggccggactcggtgctcgccgcggcgagcggcggcaaggaggagggcaccggcgcggtggcggcgatccggatgccgatgctgaaggtgtccgacttcaagggcggcacgccggaggtgatccagacgagctacgccgtgctggtgctggtgccccccgccggcaagagctgggggcggcacgagatggagatcgtcgaggtggtcgccggccaggtcgccgtcgcgctgtcgcacgcgacgctgctggaggagtcccgggcgatgcgggaccggctggcggagcagaaccgcgagctgctgcaggcgcggcgcgacgcgctcatggcgaacgaggcgaggcaggcgttccagggcgtgatgagccaggggatgcgccgcccgatccactccatcctcggcctcgtgtccatggtgcaggaggaggccctggcgccggagcagaggctcgtcgtcgacaccatggcgcgcaccgccaccgtcgtctccacgctcgtcaacgacgtcatggagatgtcggccgacagccgcgagcgcttcccgctcgagacgcggccgttccacctgcacgccatgatcagggacgccgcctgcgtcgcccggtgcctctgcgacttcagggggttcggcttcgccgtgcacgtcgagaacgcgctgccggacctcgtcgtcggcgacgagcggaggattttccatgtcctgctccacatggtcggcaacctgattggccgcaccgagcccgggcatgtcacgctccgggtgcgcgccgccgacgacgacgtgctggacgacaggctcggccagaggtgggatccatggtggccgtcctactccactggctactcctcggtgaagtttgtcattggtgtcaagcggcagcagaacggcgatgccggctcgccgctgtcgcggaggccgagtgggaagggcattgatctcagacttagcttcagcatgtgcagaaagcttgtgcagatgatgcaagggaacatctgggcgattcttgatccccaagggctaccggagagcatgactctggtgctcaggtttcagctgcaatcgccactgacatcatcaagccttggaggatcattcgagcagaagcactcgtcgccgtcgtgccagattgcaggcctgaaggttctgcttatcgacgacgatgacgacatcaaccttgtggttgctcggaagctattggagaagctcggctgcgtggtctcctcgccgccttcaggatcaggatttctcagctctgttggctcctcagcagcagccttccagcttgtcatggtgaacctcgaaatgaagagagtaaaagcccttgatgtcgcgacgaggatcagccagtacaggagcggccgatggccaatcgtcatggccatggcttccgaccagaaggcctgggagaagtgcgctcaatccgggatcaatggcatcctcaagaagccggtgattctgcaggagttgaaagacgagctggcgcgaattcttcagagcacatga

SEQ ID NO: 22155 - DNA, 2859 bp, Oryza sativa
  Clone ID: TF_OsC945_1
atggcatcaattggatggcatctttccctggaacccaatatcgatagcttcactgttgcagacaacaaactggttctgctcaactttgagcagcagcagctagtccactggatgatgcctccaagattcagatgccaagattacctcctgccgctgctgctcgccctttcgccggccgccgccgccgcccgcgaggtggagtaccaccattgccactgcgacggcggcggcggcggcggcggcggggggttgtggagcatggacagcatcttcaggtggcagaaggtgagcgacctgctgatcgcggcggcctacttctccatcccgctggagatcctctacttcgtcgccgggctccggcatctcctcccgttccggtgggtgctcgtccagttcggcgccttcatcgtgctgtgcggcctcacccacctcctcaccgccttcacctacgagccgcacccgttcatggtggtgctcctcctcaccacggccaagttcttgacggcgctcgtctccttcctcaccgccatcacgctgctcaccctcatcccgcagctgctccgggtcaaggtgagggagagcttgctgtggctcaaggccagggagctcgaccgcgaggtcgtcctcatgaagcggcaggaggaggcgagctggcatgtccggatgctcacccacgagatccgcaagtcgctcgaccgccacaccgtgctctacaccaccctcatcgagctctccagggtgctcggcctcaccaactgcgccgtctggatgcccgccgccggcgagatgtgcttgacgcacgagctccggcgagacggcggcggcgaggatggcgtcgtcggcgtcgacgacgcggacgtcgtcgaggtgcgggggagcgacggcgtcaagctgctcgggccggactcggtgctcgccgcggcgagcggcggcaaggaggagggcaccggcgcggtggcggcgatccggatgccgatgctgaaggtgtccgacttcaagggcggcacgccggaggtgatccagacgagctacgccgtgctggtgctggtgccccccgccggcaagagctgggggcggcacgagatggagatcgtcgaggtggtcgccggccaggtcgccgtcgcgctgtcgcacgcgacgctgctggaggagtcccgggcgatgcgggaccggctggcggagcagaaccgcgagctgctgcaggcgcggcgcgacgcgctcatggcgaacgaggcgaggcaggcgttccagggcgtgatgagccaggggatgcgccgcccgatccactccatcctcggcctcgtgtccatggtgcaggaggaggccctggcgccggagcagaggctcgtcgtcgacaccatggcgcgcaccgccaccgtcgtctccacgctcgtcaacgacgtcatggagatgtcggccgacagccgcgagcgcttcccgctcgagacgcggccgttccacctgcacgccatgatcagggacgccgcctgcgtcgcccggtgcctctgcgacttcagggggttcggcttcgccgtgcacgtcgagaacgcgctgccggacctcgtcgtcggcgacgagcggaggattttccatgtcctgctccacatggtcggcaacctgattggccgcaccgagcccgggcatgtcacgctccgggtgcgcgccgccgacgacgacgtgctggacgacaggctcggccagaggtgggatccatggtggccgtcctactccactggctactcctcggtgaagtttgtcattggtgtcaagcggcagcagaacggcgatgccggctcgccgctgtcgcggaggccgagtgggaagggcattgatctcagacttagcttcagcatgtgcagaaagcttgtgcagatgatgcaagggaacatctgggcgattcttgatccccaagggctaccggagagcatgactctggtgctcaggtttcagctgcaatcgccactgacatcatcaagccttggaggatcattcgagcagaagcactcgtcgccgtcgtgccagattgcaggcctgaaggttctgcttatcgacgacgatgacgacatcaaccttgtggttgctcggaagctattggagaagctcggctgcgtggtctcctcgccgccttcaggatcaggatttctcagctctgttggctcctcagcagcagccttccagcttgtcatggtgaacctcgaaatgaagagagtaaaagcccttgatgtcgcgacgaggatcagccagtacaggagcggccgatggccaatcgtcatggccatggcttccgaccagaaggcctgggagaagtgcgctcaatccgggatcaatggcatcctcaagaagccggtgattctgcaggagttgaaagacgagctggcgcgaattcttcagagcacatgatgctgatgtttgctggaggtctgtttgtctaagagctctgaagtctgaatcggtaaaagctgtgaatcctgtgatcagtgtacaacctcgtcatccagcattgaagaatgaagaactcagaagaattctgtgatcagtgtacaatctcgtcatccagcattgcagaatgaagaactcaaaagatcttcgcggcgaaaacggggaacatctctaacgaaagaaagggtgccctgatggatggcaagaacacatggaatcttggcagcaatggcgtccccgagaaatcttcttcgcacaaattttgtaatatgagtttgagtgggaatacaagtcgtgtaattttctaatgatcgagatgtacactcgggtgaagtcaagggaattcgtacttgactctctctgtcaaagcaaatcatgagattggaatcaatgagatgatatctcaaaacaaaaaaaaaa

SEQ ID NO: 22156 - DNA, 609 bp, Oryza sativa
  Clone ID: TF_OsC50061_1
accgcaaagcctcttctcctcttcttctcctactcgcttactcaatcgctcgaggattcttggattggattattgggttggattttgagttgatcaatggcggcagcggcgcaggctccggcggcggcgaaggtggtggtggcgacgtcgccgagggcaggcggaggcggaggcggcggcggggacaggaaggtggtgccggttgtggtggcggcggcggccggcgacgaggcgcagagcgagatgcacgtgctggcggtggacgacagctccgtggaccgcgccgtcatcgccaagatcctccggagctccaagtacagggtgaccacggtggagtcggcgacgagggcgctcgagctcctctgcctcggcctcgtccccaacgtcaacatgatcatcaccgactactggatgcccggcatgaccggctacgagctcctcaagcgcgtcaaggaatcgtctcagctcaaggagatcccggtggtgatcatgtcgtcggagaacgtgccgaaccggatcagccggtgcctggaggagggcgccgaggacttcctgctcaagcccgtacgcccctccgacgtgtcgcggctctgcagccgtatcagatga

SEQ ID NO: 22157 - DNA, 1127 bp, Oryza sativa
  Clone ID: TF_OsC51348_1
cggttccccgcgccccccctctccccccgagcacacacaccatctgcatcttctcttctaccattctggctttctccttgtagtctcttctgtgctttcagagaagagaaaaacatatctgtgctagctgtgccttcttccacacgcgtccgctgcatcttctcttctaccattcttgctttctccttgtagcctcttccttttccagagaagagaaacatatctgtgcaagctttgccttcttccatggcagtggctatagaggctccgttccatgtcctggctgtggatgatagccttcctgacaggaagctcatcgagaggctactcaagacctcttctttccaagtaaccactgttgattcggggagcaaggctctggagttcttggggctccatgatcatgaggacagcccaatttctactcaatcagatcagcaggaggttggagtgaacctgatcatcacagactactgcatgcctggcatgacaggatatgatcttctcaagaagatcaaggaatcgtcttatttaagggacatcccagttgtgatcatgtcatcggataacattccttcaaggatcaatagatgcctggaggaaggagctgatgaatttttcctcaaaccagttcggctctccgacatgagcaagctgaagccccacatactgaaaagcagatgcaaggagcactaccagcaggaacaaaacctgcaaagcaacagcgaaagcaacaacagcagtaaccccacaagcgagaacagcagcagcagcactagcaccaacagccacaagagaaaggcagtcgatgaagaaattttgccccacacaataagaccaaggcatagttgatttagcatctgactggtcatttgacactgatttttttttcttgcttctgtctgatcggtttttgacatactgatttgtaaaagggatactaacatctagtttacaaaatagaatggaatccgttaacggatactgcttgaattcgaatgggtgattctcagttcatcacattgtgattttaagccagttaagccttcaaattcctgctgagattaagggccactgaaaacatcttgtgccatatttgttaaggaatatcttaaaacccctaaaaa
